United States Patent Application Publication US 2015/0315605 A1 - sequence listing, part 25

SEQ ID NO: 37843 - DNA, 3312 bp, Zea Mays
gactgatgtcctcgtcggtcaaccccaatccattaaccttccctcttaggcacatctgtgtatctagtgtcgtcatatgccatgccatgtgaccactccgggcccacatgcgccatgcgccatatactcgaacccctaactcacacatgcccgtgaaactcgcgagggtcggctctgataccacttgtaacaccccgtccattcccggaccggtggtacttactcctgacagctctctaggatcatatattgtctccacagaccaacacgagtcttttgtgcgcactttgtcctcactcatgcgcacccgagaaaacttcctggccggtcacccatcccaaattgctctaagcccaagcacgcttaacttgaaggttgtttcgatataggcccgaaaaagaagatgcaccttgttgatgagtactctattaattctattaagccttgggccaggatatcaccatcccctagggccagaatatcacaatgacgagaccttcaaccccgtggtgaagcctggtaccatccaaactgttctgactctggctctctcacgggcctagccaatgcatcagctcgatgtcaagaatgccttcctccatggcactccgatggaaacggtgtattgcactcattcggtcggctttatggactaggcgcaccccgacatggtctgcaagctcgatcggtccctctatagcctcaagcagccgtcccgagcttggtacaatcgcttttctctcacagggcttcgtgtaggccatggcggacacctccctattcgtcttccgtcgcggcctggacatggcgtacctcctcctctacgtcgacgacatcgtcctcacgacctcctcccacgacctcctgcggcgcatcatttcctccctccagcaggagttcgcgatgaaagacctgggtgagctgcaccacttctcggggatcaccgtggagcgtcggtcccagggcctgtttctgcaccagcgccagtacaccgtcgacatcctcgagcacgctggcatggctgactgtaagccctgcatgactccaatatacacttaaggcaaggcctcctcctccgatggttcccggtggttgatcccactagctaccatagtcttgccggggcgctgcagtacctcgtcttcacacggcttgacatcgcctacgccgtccagcatgtgtgcctccatatgcatgcccagcgggagcctcatctcactgctatgaagcggatcctgtggtacctctagggctctaccgactttggcctccttcgccacttctcgaccatcgaacttgtcatctacactgactccgggtgggctggttgtcccgagtctcgacgcgctggtccacttctggctatgtcgtgttccttgcgacaaccttgtctcttggtactcgaagcggtagcctgtcgtctcccgctctagtgccgaggccgagtaccgcgttgtggctaacggcgtggctgaggcggactggcttcgttagctgctccaggaacttcacagtccgcagacgaggagcacactggtctactgcgacaacatcagcgccgtctatctctccaccagccccatccagcatcagcgcacgaagcttgttgagctcgacctccacttcgtgtgtgagtgtgtcgccgtcggagatgtgcgttttcttcatgccccgactacgtctcagttcgccgacatcttcatcaagggcctccctacatcggtgtttgaagagtttcggtccagtatcaacatttaccgtggctagagtttcgactgtgtgtgtgtgtggggggggggggtgttagatgtattgtgtgtgtactagtgtattgtgtgtgattgtctctatattagcctaggcccacttaccactattattaatatatcacctaaccttggtttagggttagggtttcaatttctatcgcatatgacaccatctagtacaggcaagaactcggagcttccagatgagccagctaatgtgcccccctctcagtttggcagccaaaagcaagctcatgttcctataactcaagcttttgaggatgatcagggaatgaattgtgtggcaatatctgcagtagagtgggcagatacccttacaaatatcagttttgggcacttactgacagaagcatctaaaggcactcatttggactgcggaggaactagtcctccaggaagcaagaaggttcaaacactcttagcagctctcctgatactaacaatggagttcatccctcaaattctgaaggatttaaaggacttggctggagaggctgatgctgataatcattataataatgatgatgccaaagacgaggagttttatgccaaatcaccacctcgaaatgatgaaactaatgagttgaaggatcaatctttagctgacatatattggcctgattcactcggaccactggacttggacataccgtctgtgagatacgaagccgatgacatacttataggggacagtcaaaatagttggaaccgtctaatggcaaatagcctcgacgcatttcgaaacctgtcattcttctcagataaaaatgactctattccatcgatcatgtagaactggggatgttagggcttccacgatttgttttggtaaggaaggaacctccaatctgccattcccggaagagggagctttatattgcccaagtgagctgtttgctgctgatacgggtatccaacagatgcggatttgatgcatatgagaggggctcgtgctgttgtaagataacataacggatgtgctaacctgtactccatgtaaatgtgttgcccttgtacataaagcacatacaagcacttgggtacaggtaaagcttcctggggccgagtataagataagtttgcctaatgaccatcaaatgattgtgcacttcattcttccggtttacatctaatatgtccacgtgggttatctcaaggcaatcagatcggagaattgtgacaatggaggacttctgttgagtagtttagttactttgacacgaaggatttctgtaagattcagtttttttttacgagagcctttagaacataggattgcaaagggaaggatccaatgtaatcctttcttagaatatagggttgcaaagggtccaatgctctttcctatgcctcacggaaagaaatcctacgtcgagagtaagcaccctcgcatgcaggaggcttatgtataccgagactttcgtgttctatcatgcacggtttttaggtgagatcaatcgatacatactctttacattctagattgtgcttcattttagatcttttagacatgtaactgttg

SEQ ID NO: 37844 - DNA, 1896 bp, Zea Mays
cacgcgccggaccggaccggaccgggaccaggcacaccacgcacgcagaaccctagaggcattcccaagttcgagcaatcgagctcgagccccagaggaacgagtcctgccggacgccgccacaccatctgaaactgacggcggcgggcggccgctgcttcctctcccttctccgtccagatccggcgactggcgtccctcctccgccatcttccctaccctcgacgtggcgatgagctgtgagccgtgagctgttccaacattccggaactagcaggagggggaaattttgaaaagctttttcccaacattaacaggtggaacatatgctaaagaaataaggggcaagcgagaagatgaggctggtgggtttgacgggtggcatcgcatctgggaagagcactgtctctaacctctttagggactctggtgtccccgttgtggatgccgatgtcattgctcgggatgtagtgcagaaaggcaccagaggttggaagaagattgtaaaagcctttgggaatgatattttgctggaaagtggagaaattaacagagctctattgggacaaatcgtattttctgacccatcaaaacgtcaacttctaaaccgtcttctggcaccacatatttcttatagcattgtctgggagatagcaaaactgtggatgaaaggctgcaaggttatcatccttgacatcccgctgctgtttgagacaaagatggatagatggacgaatccaatcattgttctctgggttgatccaaaagtccagattgagaggctcatttcaagagatggatgctctgaaggacaagctcagaataggatcaatgcacagcttgcactagactggaagaaatcagaagcagacatagtgattgacaattctggttccctggatgacaccaaacagcaattccaagaagtgttgatgaaagtctcggagcccttgacatggaaggaacgcttgagatctagagatggtctgatctctgttgtcgtctttactgcagtgggcgtattacttgcccagaagaatctgctatgatcatgaaggcttagggagttaaaaatgttgatacgatgttttaaaggactggcacaactaagtaagaacccttagtaagaaccactatttttagttgtccttactggataatgggtcaagtaatgaaagtctgcatttagggattgctgggcttagccaaaatcttgttgtaccaaattgtgttgatgggctgggaattacaactatattcggactacgggctatccatgttcatgtgattttttgtaccgagtataaagcatggccatgcatgcgaatccgcactgcctaattatggaagccacttgattagaagcttgccctttagtcacagaagtgttcttttcaggcttgtcaacatttcaattttgggtacacattactctttcaatcataagtttgggggtgtttggtttcaagtttgggggtgtttagtttctggggactaatttttagtctctcaaatttattctatgctaatctctaaattaccaaatacggaaactaattagcaatttagaagggactaaaaatctctagaaaccaaacacctctttttgaaagtgatacgagtgtatttgtttttttagaaatagtatgataaatatttgccaaagtttgaaatggctgatttcaggaaacctaatacaccacttatttgtcactggacggaataatcaactctgagggctagtttaagagctaaaataccagtgggaattggaggagctaaaattctcttattttgaaaaaaaaagattttagtttcatcaatcccctccggttttgtggctcccaaacaagtcccgaacgtaactgacataaaagcaaatgtatgcatttaaac

SEQ ID NO: 37845 - DNA, 3123 bp, Zea Mays
agggaaccaattttcccaacttcagaaacaccgagccttatccaaagcccttcccttcactgtcccgctaaaccccggccacgaccacgatggccaccccctccacctccgctccgtcgccgtcgccgtcctccgccttcccactcaccaccaccacacgcttcccccgctcatgctcctgccccgtgcgagcctccgcgctcgccgagcggcggcgcacgcggcggcgccgggcgcccgatggtgggggcgccggtggggaccgctcggcggccgccggggcggtggagaagggcctgcgcctggtcttcctcgagcagctcgcggagcgcgcgagggctgccgacgccacgggcgtggccgacaccatctacgacatggtcgccgcggggctttcgcccgggccgcgctccttccacggcctcgtcgccgcgcatgtcctcgctggcaacgctgaaggcgccatgcaatctcttagaagggaactcagttctggtgtgcgccctctacatgaaacttttgtggctctggtccgtgtttttgccaagaagggtctttctaccaggggcatggagatccttgctgccatggagagatataagtatgatattcgcaaggcctggctaattcttgtagaggaactagtgaagaatcattatctcgaggatgccaatacggtatttctgaaaggggcaaaaggcggtctacgaggaactgatgatatttatgatcttctgattgaagaagattgcaaagctggagatcactccaatgctttgacagttgcttaccaaatggaggcttatggaagaatggcaaccacattccattttaattgccttctcagcgtgcaggctacttgtggaattcctgaagttgcctttgcaacatttgaaaacatggaatatggaggtgaagattacatgaaacctgatacagagtcttataactgggttatacaagcatttactagagctacgtcctatgacagggcagcggatgtcgcagaattactcgggatgatggtggaagatcacaaacgcattcaacctaatgcaagaacttatgcgttgttagtggaatgctttacaaagtactgtatggttaatgaatcaatcaggcattttcgtgctttacaaagaatccctggaggaacagaagtcctttacaatgaaggaaattgtggtgacccactttctctctatctacgatcattgtgcctcgatggaaggcctgttgagttgcttgaggctttagaagcaatggctaatgataaccaaagtattgcacctcgagcaatgatcttaaacagaaaatatcgcacattggtgagctcctggatagaaccattacaagaagaagctgatgttggttttgaaattgattatgtggccagatatattgaagaaggaggtcttacaggagagcgcaaacgttgggtgcctcgcagaggaaaaactcctttggatccagatgaatttggatttgcctattcaaatccgatagaaacatcctttaaacagcgatgctttgaggaattgaagttatatcatcgaaaactcctaattacgttgagaaatgaaggccctggtattttgggtgatgtctctgaagaagatgtacgcagagttattgaaaggctaaaaaagttagttgtagggccaaagaaaaatgttgttaagcccaaggcggcaagcaaaatggtagtatctgaactgaaaactgagcttgaagctcaaggattacctactgatggaactagacaagtgctttaccagagagttcaaaaggctaggagaatcaatcgctcacgtggtgtaccactttgggttcctcctgtagaagacgaggaagaggttgatgaagatttagatgagctgatctcacgaatcaagccagaagatgggaacacggagttctggaaacgccgttttctgggagaaactcgaaactatctttgtgaagaagatagtaaagaagacggtcaagatttagatgatgaattggaagatgatgatgacaacgatgatgatgaggatgacgatgaatctgtaaaagaagcagaagaagatgagatagatgatgaagaggttgttgagcaaacagaaaatcaagttggtgatgacactaaagataaaccagcaaaagaacccaaccatcatcttcaaatgataggggtacagttattgaaggatatagagaggacacctgtttcttcaaagaaattaaagcggatgccagagattgatgatgatgaagactggtttcctgaagatccaattgaagcctttaaggttatgcgggaggagaggatgttcgatgtatcagacatgtatactactgcagatgcctggggatggacgtgggaaagagaaataaagaacaagatgccacgtaagtggtcacaagaatgggagcaccactcccatctgcttttataccaatattgcaaacaacacacagtctaggttataagtttggaagcccactgtatgacgaagtagtcctattgtgccttgatctggaagaaattgacgcagccattgcagtagttgcggaaatggagacttgtggggttaaggtgccagatgaaaccttggacaaggtgcttgcgtccaaacggtctggaaattctgccctcccaccacctacggaggagtaatcaatttggacatgcgagacttctgctgctcgtgcttgacgtgacaccagaaaatcacaagcaatgcatatgtttggagcttctcctggaaaagaacatgctgtatgatagtttgtcggtgctgtgtccaacgatagaggagatatgaagttgttagtatgatacctggcatggtatatttgattagtccgttgaatttttgtatggatggtgaagcatgagaaaaggtcgagtttttttttataactggtggaatggtgtgggtgcgttgtcttagggtgctttgggtttggcttctgggagttgcttttgcttcaaaaagtcaaaagctgattaaagtgatagaaacaagaactttcggattttaactttttgctttttaaaatggtcaaaacagttgtttagagacatagataacaagtagaatttcaagtagaatttctacttgtttgaatcaaata

SEQ ID NO: 37846 - DNA, 3488 bp, Zea Mays
agaggtgtctcggtccgacttggtacttggcggctccactgctcacgtcacgtgcccgcgttctctctccgactcccatgcctctccggcgagctagtctggtatccatcggcgagctagttttgtctccaccggcgagcacgcgtctgtaacctcctccacccccatcgaactccacctgctctccaatccgctagatctcggctccgtgcagctgtgctgattgtgaggaatttggtagcacctctatcagggttttaaaactagagtgctgccgccccagcatacataatatggacgaagaaaatgttgttgagctgctgcaacgttatcgccgtgaccgtcaagtattactcaactacattctttctggcaacttgatcaagaaagttgcaatgccacctggtgcaatctctttggatgatgtagatatagatcaagttagtgttgattatgtcctcaactgtgctaagaaaggtgaacctcttgaccttggagacgccatccgcctttttcatgatagccttgactatccatatgtgaataacactggagctgtggatgagttctatttgcttacaaaaccagaatattcaggaccagctccaacacgagaaccaccacctatcccagccactgcaccatcatcagttgtgataccaccaccggatgtggaaccagcaccaattattgtgtcatcgccagtcacagctaccaacttgccaaaatcacaaccatttgattctccgaccgagaaggagttaactatagatgacattgaagactttgaggatgatgaagatgaatttgatgggcgaagggcttctagaagacatcaaactgacgctagtgatctatcgttgctgttaccatcatttgaaacaggtatcacagacaatgatcttcgtgaggcagcatatgagatccttgttgctgctgctggtgcttcggggggccttatagttcctcagaaagaaaagaaaaaagagaagagacacagattgatgaggaaactcggtcgtagtaagagtgaaagtgtggatatcaacactcaacggcaacctggtttagttggtttgcttgaaaccatgcgagctcaacttgagataacagagtccatggatattcgaactaggcaaggattactcaacgctatggttggcaaagttggaaaacggatggacaatcttttgattccattggaactattatgctgcatatccagaactgaattttctgacatgaaagcataccttcgttggcagaagagacagttaaacatgctggaggaaggcctcataaaccatccagttgttggatttggggagttaggtcgaaaagtcaatgagataaggagcctttttagaaagattgaagaatccgagtccttgccaccatctgctgcagaggttcaacggacagaatgcttaagatcactgagagaagttgccacttctctatctgaaaggcctgcccggggtgatcttactggtgaggtttgtcactgggctgatggataccatctgaatgtagcattgtatgagaagatgcttggcagtgtttttgacatcttggatgagggaaaacttacagaggaggcagaggaaatccttgaactcttaaggtcaacttggcggacactaggaatcacagagactgttcatgatacatgctatgcatgggtattatttcgacagtttgttcttacaggtgagcaaggacttctgaaagtcgtgattgacaatttgaggaagatacctttgaaagaacagcgtggtccgcaagaaagattacacttgaaaagcctgcgtagttctgttgatgctgagggtagctatcaagacttcacatttttccagtctttcctgtctccaattcagaaatggacggacaagaaactaaatgactatcacctacatttctccgagggctccagcttgatggctgatgttgtgacagtggcaatgcttacaaggcggatccttggtgaagaaaatgacaaggtagcggagtctcctgacagagatcagattgaccgatacatcacttcttcagtcaaaaatactttcttgaagatggcacattctgtagagttcaaagcagacactacaaatgagcatgttttagcatctctagctgaggagacaaagaaactgctgaaaaaagatacagccatttttacacctgttttgacaaaatggcatccacaggcagcagttgtttctgcttccctcattcataaactttatggaaataaattgctgatgctttggagcaatacgtaatgtctgtgatggcctccgtcacgggagatgatggtttggatagcctatgcagacataaactagttccatatcagattgaaagtaaatctggtacattagttttacgctgggtaaatgggcaacttgagagaattgaaacttgggttaaaagggctgctgaccaagaggtttgggaccctatatcccctcaacaacgccatggaaattctattgtagaagtctatagaatcatagaagagactgcagatcaattttttgcatttaaggttcctatgcgagatggagaattaaatagtctatgccgtggtcttgacaaggcattccaagtttatacacagctggttactgcacccctagttgataaagaagatttagctccgcctattcctgttcttactcgatataaaaaggagcttggaatcaaggcttttgtaaaaaaagaggtccaagaagttagaacagttgatgagaggaaagctagcgaaattactcagcttacaatgccaaagctttgtgttcgtcttaacagtctatattacggtatcagccagttgagtaagttggaggacagcattaatgagaggtgggctcggaagaaaagtgaaaacactaacatcagacgaaaaagtgaaaagtcaaagagtgccgtccctaatcagaagaatcaatttgatggcagcagaaaagaaatcaatactgctattgatcggacaaaggttatattctgggacctgcagcagccatttgttgagaatttatacagaaatggtgttgctcaagctcgattggacaccataactgaagtgcttgatttggtccttaatcaactttgtgatgtcattgtggaacaactgagggatcgtgtggttacagggcttctgcaagcatgcctggatggcttccttcgtgtgatactggatggaggttctacacgtgtcttctctccaaatgatgcagctttattggaggaagatcttgaaaccctgaaggaattttttgtttctggtggagatggactgcctcgtggaactgttgaaaacttagtctcgcgtgtacgtcctgtaataaatctgatcaagcaagagacccgcgtgctcattgatgacctacgagaagttactcaaggtggcaagagcaaatttggagcggactccaaaaccctccttagggtcctgtgtcacagaaatgattcagaggcatcac

SEQ ID NO: 37847 - DNA, 2422 bp, Zea Mays
gaggaacatttcaaccgcactataaaacacccaaatttgccacccaatagtttggaccttggctaccatcgcaaaccccgcttttgtttatcattccgcctctccagtcttgacttcccctctctttctctcttcccggcggggcggccggaaatctccccccaaattcagctggtttcacgggagctatcggccggtggagaggaaaggacgagtcttgagctggacttcttggcggattggctgctggcattcgcaggaactgtgtgtcaggagcggggagatgagctgcttaccgtgctccggttcctcggggaaggaggacaagagcttggcggcgctctcgccgagcccccggcctgcggccaaggcggcaccagttcgatcaaattcacgtgcttcgagctccaggaaggaagattctgtacctgttcgcagaggaggaaacgctgcacatggcccggcacagattttcagtttccgggagttggctgttgccaccaaaaatttcagaagagattgcctgttgggagaaggtggctttggtcgtgtgtataaaggacatatggaaaatgggcaggtcattgctgtgaagcaacttgatagaaatggttttcaaggaaatcgtgaatttcttgtggaggttctcatgctaagtctcttgcaccatcctaatctggtcagattaattggctattgtgccgatggtgaccagcgcctcttagtttacgaatacatgttgttgggatcactggaaaatcgtctgtttggtccagcaggcaaggaacctcttgactggaatacaaggatgaagattgctgctggtgcagcgaagggtctggagtaccttcatgacaaggcaaatccaccagtcatatacagagacttcaaatcatcaaacattcttctgggccgcaaagcaatcgatcacacccagccttcaggggagcaaaaccttgtcgcatgggctcgtccacttttcagagaccgaaggaagttctgccagcttgctgatccattgttgcatggcggctacccgaaaaggggtttgtaccaggccttagctgttgcagctatgtgtttgcaggagcaagcagcatcccggccgctgataggagacgttgtcactgcactgtcttacctagctgcacatccttatgatccaaatgcgccttccacaaaggattctaagacctgcccgtctaccccaagggcaaagacacaccgacgaaccaccagtgttcctgatgctcaacatgctgctgagtcgcttattttgaacttcccagacatgaggaaggagactgtcagaggaggggaattcgagaaggatcgtactgaaggttctggcagcagcagtagctctggaaggaacgattgcctggatgtcccgcgacttctatccgttcctaacggcaaagtttgcggtgaaggtaataacattcagaagtccactgttaaggttggtgcccgtgagaactagaatacagagccggccaaattctgcaggcatctttgaatggatgcatggattagaccattctttccatgcttgctgtcaattttgcgaggaatcttcgtcgcttggcgtgagtctttctgaaggggactgttgtcgagagttgagtactaccactgcaacaggtttggttttgcagacccggatagcctcatgctccacggttggtttttggttgcctccacggaacagttcaacaattcctccaggctttacatgaagtctcatgctgatgaaaggaagaactactctgtcgctgagattcagagcttagactctttagagtgtgcatttcgatgagaatctgctacattctgaatgtcacccacaccacagctttcacctgtgctgactaacgaaccctgcagtaatgtgtcattgaaggatgtggttgagtttccttgttctgttcttgtaggaaccacgtgccgacagggctgtgtctgtacatgttaatgggttgtttgtaggaacaattggatctataccattaaaagatccaaactttagatatataccatggacctcatatgtcattgactcatgtggacccacatgtaagtgagatagtaatggtatggatctaaagtggtgatcttttaatggtatggatccaaatttcccttgtttgtaagtagagctgttcatatatttattttttcttcttcgtcggtattgtgtaatggggtgatttgcagacaacatgtcaggcgtagctctgtagtctgtacagaaaaagaaggtttgcttttttgtttgcttggtattgtatgtaacattgactcgtcatatactattgtacaaatggggaagaacactgatcctttgggtaaggtgctgcttctcttcggtttgaactggagcgaattggaatgaggaagaggggaggggaaaccccccaag

SEQ ID NO: 37848 - DNA, 519 bp, Zea Mays
gctacattaatagtaaatttaacctcttcttgctaatgcttttaaactgggtaaaaggaagaacacgctgcaggtttggtcttagctggccaaacaacatcggtagcatacatatcttttgactcatcatcagagttacaattatcatagttaacaaggtgcatggacatgtcgatttttgcgtttcttttctttggctttcacaagccaaacctcgttgatgtaaactgggccggggagggaaagaccgccctcccggtattccatataagaagagaccgaaacaatggtcctggccaagaaaatccccgaaccctggccccccaccactaacgggacgacgtcaactgtccactctgcaatggcccaaccgaagggtggcgcacaagacatcgcaacccgagagcggatggggcacagcgaggggatttttttaaccaagcctgaaaattcgctcccgataggaatcgaacccaggacttggaggtgctactcagaagtccttaaccgctaggctag

SEQ ID NO: 37849 - DNA, 6808 bp, Zea Mays
atgtcttcaaagtggcggtcactgcagcatcggcaccggtacacctacacctccattgtgttcccgaagcattaccttgaggccctaactctcgtgccagctgagatctcctcatccaatttctttgtccgattgagcaacttgatttccctgacctccacttactcccaagttgttgtggtcaaggatcttgcctcggcatatgtgcagtttctgtccactacagggactcctgatgaagcagtgctcgctgccacaaagctttatttggagatcctctttcttgagaattccctccctctccaccggacactcatatcagtgcttgccaagtgcaagaaattctccacagtgatcagtgggtgttttgccttgctctgtgaggagtatggtggctctggtagtaaggcaaagaagagatttatggtatctcgagcagccttgtcgcttattgggtacccaaagttgggatttttggatgaggcagtagagaggtgtgcagagatcatggcactggatgttgttgatgggcttgatggagtgacaaaagacattggtgaagggtcacggccatctccagtcgtgatggagcagtgccaggaggccatgtcttgcatgtactacttgctgcagaggtacccgtataagtttattggccttgacaaggcgtcaagtgtcttcaagagtgctgtcaggacaatactatctgttcttaagtcatctgccttttcaagggattgcctggtggcctctggagtaagcttctgtgcggcaattcaggttttcatgagcacagaggagatttcctggttcatttctcaaggtctatttggcatctatgcaaatcatgaagatagaaaaaatcagtctgtgcacaatgtattttcggactttgatctgtgtgaacaaatcagagacctttcagtgttgagtagactttgtctactaagagggattttgacatctattccaaggacagtactcaacatgcaccaacttcattccagtggacctttatggactgttttatatgatggaattttacctgagctttgcaagcattgtgagaacccagttgatagccacttcaatttccatgctcttacagtgacacaaatatgtttgcagcagataaagacatcggtttcatctgatatcaccgacttctctggggactataagcctttttcaagagatgttgtcaaccgtatattgggaatcatatggcgcaacctggaagatcctttgagtcagacagtaaaacaggtgcatttgatctttgatctcctattagatattgaactatgtattgcatcagaagaccgtgaacataacaacaacttgttcctttgcaatgttgcaaatgatttacttcgcttaggtccacgatgcaaagggagatatgtccctttagcttctttgacaaagcgattgggtgccaaatctcttctaacattgaaatcaaatctgctttcagaaacagcttatgcgtacatagatgatgatgtttgttgtgctgtcaccacatttttaaaatccttcctggagactttaagaggtgaatgttggaatgacgatggtgttgagctaggatatgatgccttcagagctttgtgcttgcctcctttcatgcggggacttgtatctggaaattcaaaactacgttctaacttaaatacttatgctttacctgctctaattgaagttgatgcagagagcatattcacaatgcttggattcatctccattggccctagcacaaatgaaactaaactagatgttgttttgaaaaatgaccagtgtatagctgcactggtttctctgcttaaggtctcacggaatctggctcttgttgaaggggacattgatttagatcctgatgaattgtcacagattcagcagatggatagtaagggtgctgcagttatatctgttaaagggattaaagttacagttccttttaattggtttgctttggcactgacacacagtgatgaaagtctccgtatagatgcagctgaatccctctttctaaatccaaagacatcaagtcttccatcctccttggaactgagcttgctcaaagaagctgttccgttgaatatgcgttgtagctcaacggcatttcaaatgaaatggacaagtttatttcggaagttttttgctagggtgcgaactgcacttgacagacaggtaaaacaggggtcttggattccatcattaacgtctagtgttaaaggggctggctctattgatacttctaaggccactgttgtcaagagggctgaagatctcttccaattcatgaagtggctgagttcctttctgtttaattcttgttacccctctggcccttatgaaaggaaaacaattgcaatggagctcattcttacactactagatgtatggcctatttgccgctctgaagggaaaattgatctttatccttacaatgatagcataatattgccagactcaacaatttcatttgttgggtctataattgatagttgggacagattaagggaaaactcttttcgcattctactgcagttcccaacaccgcttcctgggatttccttgagtacatccataaatgatgttatcagatgggcaaaaaaacttgttctaagcccacgtgtccgggaaagtgatgctggtgctttaaccttccgccttatatttaggaagtatgttttgcagcttggatgtattcttgtattttctaaagaaagtgattgccttgaatgttatacacaatctatgaatggagatacagaagttactagtcaaaacccagttgcacagtatatatcttcactcattcaatggctctgtattgttgtcgaagagggtgagagggatctctctgaagcatgtaagaagagctttgttcatggagttcttcttactctgcgctacacatttgatgagatggattggaactctgaggtagtacaatcatgtatttctgaaatgaggtacctggtagaaaaactgcttcaactcataatgcgtgtaacttcggtggccctatgggtggtttcttcagacgcattgtctctgccatatgacatggatgacatgattgatgatggttccttcctctcagatatatatgatgatcaacctactaccacttcagaaagagaggagaagaatgcaaaaccagggagtaatggcaaaccagccgaacaagttgttatggttggttgctggcttgctatgaaggagtttactttttggaaccatcatcaggaagataccattgcctggctgttctcattcagcttcatctcagaatggcttgcctgacagtattgaagagacaagtatatctgaagaaattcttgatgtggggcagttaaagatgatgggtgaccattttttacaggttcttcttaaaatgaagcataacggtgcaatagataaaacaagggctgggtttactgccctttgcaaccggcttctttgctcaaatgattcaaggctgtgcaaaatgacagagtcatggatggtgctactaatggataggacaattgctaaagggcaaactgtggatgatttgataaggaggagtgcaggaattcctgctgcatttatcgccctgttcctggcagagccagaaggaacaccaaagaaactacttccaagggcattagaatggctgatagagtttgctaagaactctttagctaatttccagaaagactccaaccagaggtctggagtaatgaaagagctgttggaatcacagtcagaaactacaagtgtatattctaatggtaacctatctaaaggtcgagatgagggtgttgttcccactgtgcatgtgttcaatgtgcttaaagctgctttcaatgatgcaaatctggcaaccgacacttcgggtttcagtgctgaagcaacaatagttgctatacgagcattttcatctccctactgggaagtgcgcaatgcagcttgccttgcgtatactgcactagttcgtcgcatggttgggtttctgaatgtgcagaagcgtgaatcagcacgacgatctttaactggccttgaattcttccacaggcaacaattgagtatcttttacatgatacatggacaaattgaccagaatttttttagcatcgttgctgctttgaggtatccagcccttcatcctttcctttctagtgaactgcaaaccacaactgaacaactagctgatggagtgtccagcaatttggagtcacacattacaaaagcaatacaccctagcctgtgtccgattcttattcttttatcaagacttaagccttcacctataagctgtggaactgatgattctttggacccttttttgcttttgcctttcatccaaagatgtgctacccagagtaactaccgggtccgtatccttgcatcaagggcattaacttgtttggtatctaacgagagattgcagtacgttattagtgatatactggataatttacctcgtggaagtcacaaagcaatggctcacagtgttcagcatactgatcctgccatatcagctaatatgggaaaagcaaatgtacttctgctgtctaagtcattcaattcaatacatggccttttgctgcagctggcttctcttctggataacaactttagaggtttgacagacggtagcatgaaggatcagattattggcctattactggaggttctttcaagatgctcttggcttggctgcacgaaattatgctcatgccctatcgtaattacatcttacttgcgggtattggatctcatgcttgatgttgcaaggacagggaaaagcagacatactgaagtcattcaggcattgctgctagagttaacttcccagtgcttgagcaacacagcatcaacccagtacgcattccatgatccaacccgtattgaactaaaacaacaagcaactgaatcatttttgagctgtgttggtctttctaagaaaaccgatgaaactaacgatgatgatgtgcagttgcaaatactcggtgaaccaactttagagatgcctagagtggattactcccttcatgaagtacacaaggagatcctgtcatgtctcactgatccttcatatgatgttagaattacggtgctgaagaggattctttggctcacaaaatcaatcagacatggttatgcagataacattttgcaccagtgggcaggagttaatctgcagcctgctttaatggaacggttgtttgtggaagaacaccctaagtgcctttattataatctgaagatcatcttttcatggaacatggaattcccattcaacaatggagaagattctagcacacttttgtccttgtgggataggttagttcatttaaacagcaccatgtcacatgcaaaaacgagagaaatagttctatgttgcatgggtatgtgcatgaaattgttcactaaacaatctaggggtggtatttcaatggattgtcttaagaccagtgagatctctgcatcctttgtcagaatcaatgaaggggatggattatctgatgccatgcttagattaaacttgtttgtcacacttgtcaagaaccaaagtgaaccatcagaaagcatgaatgctcgacgggctgctgctgaggcaattgttgcttctggtcttcttgaagaagcaagctacgttgcttcatctgtgtccaacatgtactctccttcagaatttgatgaagaccataccaaagagaaatgcatggaagatagcgtttttgaatttgttagtctttatacatgcaagatacttgacttgtggtttgtatgtattcagttgctggaggatgaggatgcatatctgaggcaaaaacttgcgaaggatattcagaaaataatcgctaagggttcagctaataccttctgtgatgattccacaccactacaagttgatagagtcattgaattaagcttggactatttaacttctttgtttggcctctggctgaaatacgttgaattcttgttaaggatagtcttgggcactggaaacgctctgaactcccgtggcgatttggtccgtcagatatttgataaagaaattgataaccaccatgaggagaagctattgatatgtcaaatctgctgttcaaacattcagaaacttctgaattcaaaatgccagatggaagcaggagcagagactaaactgttcctgcagaattggagggagatatttctaaagcagctcacatcgctgactggtggctatattgagaaagaggggaagaacgattggattggcggcataggtaaccacaaggacgtgttcatatcagtgtatgcagtcctactcggtttatacgcgctcacgcagtctggctctctggatcaattggaggaccactgtgcagtttatttgcaggaatttgcaaaccttgaaaggtctatcacaccattcctcaagaacccgttgatttctaatctttacgctctggtaaaattgtcacacgagaggttcatatcatcagataagcctgaggaccaagtgggtgattcaggatcaagttttgacccatattttcttatcagatgattttcgctaatgtactagtaattcttcattgttattcctccgttgtaagactcaatactaattgcttttttatacaaattaccatactatagattctttacttgatgccccttctctgtgtatcagtgcattttaagtgccttgggttttctagcactcaaaaaatgtatgacaaggttgtgactaacgtccgaacaactgataatgatataaatatttttccgattaacataggactacatcaagattcag

SEQ ID NO: 37850 - DNA, 2081 bp, Zea Mays
gatcttatttcctagttgattttgttcctttttcttgtactgttgcttatattacgacgccgctgtttgttgcgtccttttggagctttgtgatctttcctcttgtgactttctaccaactggcattttggctgacaaacgaaaaacgatagatagatgtggtgtccttaaagccttgctcgctgctctctcgagagtaaaaaaatcctagcttttcttgagagtttctgagaagtgtcccagctcacagctaatcatatccttgggcacaagaatatgtcgtccaagagactacatggcgtgtttacccttcttatgctcatggttttcaatgtttcaggggcatttgttggtatcactattggcaatgacatgtcaaacataccaccagcaacagatatagtgtctatcctcaaagcaaaaaagattcagcatgttcgcctgcttgattcagaccatcaaatgttgaatgcccttgcaaatactggaatagaagtgatggttggggttccaaatgatcagctacttcgtgtgggccaatctcgttccacagctgctgattggattaataagaatgtcggtgcttacattccggcgactaacatcacatatattgctgtgggtaatgaggtccttactaccattcccaatgcagcacttgtactcgtacctgcactgcaattcctccagtcagcactgttggctgcgaacctcaatactcaagtgaaaatttcaagtcctcattcaatggatgtgatctcaaaggcctttccaccctctgctgcgactttcaatttgacatggagctcaataatgtctcaatatcttcagtttctcaagaatacgggatcttcgtttatgctgaatgcccaaccatactatggctatgtcggagggcaaggcgtatttcccttggagtatgcactattccgctcacttaatccgaacagtcaaatctcagatcctaacaccaatctcttttataccaatatgtttgatgctataattgatgctacctacaactcaattcaagcaatgaattttacgggcattcctgttttagtcacagcttctggttggccatggcgtggtgggccaagtgagaaggctgctactgttgataatgctttggcctataatacaaacctcatacatcatgtactgaacaattctggtactcccagccaaccgaataatcagccaagcacctacatctttgaacttttcaatgaggataatcggtcagggcctgtatcagagcaaaattgggggattatgtttcccaatgcaaccactatatattctctatcatttgaggacgtggccacagctattcctgaatcaccagctttgcgtggggtgttttgtgtggcaaattcaagtgcatcccatagtgcactgaagcatagtttggattgggcatgtggccctggttctgcaaactgcagtgcagttcaacctgggcaaccatgctatgcatcagatgatattgtagctgttgcttcttatgctttcaacgattattaccatagaacacagtctagtggtggtacatgcaacttcaatggcaccgcgatgataacatcgactgatccaagccatggttcatgcattttcagtggaagcgctggcgccaacggcagcaacggtggaacagcatccgggcctgtaagcccggacagttttgcttcaaaatcccagtcgtgctggctgactcacctagtagccacattgctgccaattctatttgtagtgatgtaaatcattgtaatcatgtcgcattttggatgagatgcccgcaatttatcgtggatcttgtcattagatacagtagtgactagcgagccatttgttctgctgtattcaggtagatgccatgtaaccttatcccagaatttcttgccctaggaatcagtacttcgtcaaatcatcaattttgaacgccaacttggaaaattgagctgtgacaagccgagaactctctgaaatattggaagttccaaatgatttgtactgcatagtatttagtttctcagctatacgcatatagtttaagggctagtttgggaactatatttttt

SEQ ID NO: 37851 - DNA, 434 bp, Zea Mays
cttcacttggctattagcaggactatcatggcatgaaaatttctgttttacctccaattcccaatcaagatatacagcaggatcatatttaccattaaaagatggaattttaaatttaatcttagcaaataagtcattagggggatgatgaaccacacggcatgcacgaccacgacgatctcaatcgtccttctcagtgtcaccgccatagtcctgctccatctttgtggtcaacgcatcaaggcgtgccaggatggtgttgagtgtggtgcgagtcgccgtttgagcaaggccaagctggttgaaacgcgtggtcgtcgaagtgaccgttgaatcaagccattcatgcatcgtcctaatgtcagcagcaagtccatcaacttgtccccttacttcctgcaactggacatccaccgtgtcatgtgctcctgcca

SEQ ID NO: 37852 - DNA, 1520 bp, Zea Mays
caggtctcggtagtaaaccacgcaagagaaaataaaatgacagagagttgtatgttgtagacgggcgagtgcgacgagcggagaacgtaatgccagcgctacaccgctgacgtgtccgccccggctccgggtgaaggtcaaaaggggcaaagggcggggggaaaccgtgggccctatatagcgggccttctcgctggagctaggagaaatcgccaagccaagccaagccagaagcggcagcctcgcgcagcggtctggtctctctggtgggtgcccctcttcgccggtggccggaaagggtagtggagtgggaccgctcaaggagaggccggcgtccccaagtctcacttccgccgtccgcttcccccctgatcgaagctttgaaagaagttggggtcacagaggtggttttggctatcaactaccgcccagaggtaatgattaatttcttgaaggactttgaggataagcttggcatcacaattacatgctcccaagagactgagcccttaggaaccgctggccctcttgctctagcaagggacaagcttgcggatggatctggccagccattctttgtcctcaacagtgatgtcataagcgaatacccatttgctgaactcatcaaatttcacaagtgtcatggtggtgaggcaacaattatggtcactaaggtggatgaaccatcaaaatacggtgttgtggttatggaggaggcaactggcagggtggaaaggtttgttgagaagccaaaaatatttgtgggtaacaagatcaatgctgggatttacttactgaacccatctgtccttgaccgcattgagctgaggccaacatcaattgagaaagaggtcttccctcaaattgcagctgatcaacagctctatgcaatggtccttccaggtttttggatggatgttggtcagcctagggactacattactggcttgcgtctttatctagactcgattaggaagaaatcagctgccaagctagctactggagcacatgttgttggcaatgtgctggtgcatgagagcgccaagattggagaaggttgtctgattggtcctgatgtcgccattggacctgggtgtgttgtggaggacggcgtgaggctttcccgctgcactgtcatgcgcggcgtgcgtatcaagaagcatgcttgcatctcaaacagcattatcggttggcactcaactgttggtcaatgggcacggatagagaatatgactatcctgggggaggatgttcatgtgtgtgatgaggtgtacagcaatggcggtgttgttctcccacataaagagatcaagtcaagcattctgaagcctgagatcgtcatagtcattgtgatatactgagcttggaggttttggaccattgatctgcagaagttcaatacaataggaagaataagttaaaaaaacgtggtccaaagtaaccttcagcagtaatgtttgtgtgctaaatgctcttccggagaattgtggtgatgcaaaccttgtaccaatgaatatact

SEQ ID NO: 37853 - DNA, 3206 bp, Zea Mays
cgcctccgcccgcccgcacgccagaaacctcgccgcaggaaaccgccgaccctaccacccgcccaccctaccgccctaccgcccgcccgcaaatccttccgccgcgaaccgcccaaccactcgctcccacgccgcaatcccaccgcgaaagccgcgaacccgacgccttccaccatcccgccggccgggcggcttctggggccaccccgaggacggccaccgctcgggcgacgcgaccttcaagggagggccccacgacgcgcgcctcaaggccttcttcgtctgcaacacccacatgtagccggctcgacgttctccgctaattcgcttggacgcctcgccggccggagggaaaggaagagtcggagtagcctgcccggctgggaaccgacagcttctccgtttcagaagcacgcgggcggggaggtggggtcgggagatcgcggggtgctcctttgtctccagggcagaggagaaacgcgcacggctggggaagaaccgaagaaggaagaggaaggtgccggtggaccaaacacggatctttcagtggagttcgggaagagtactggcacgcacgccaaggttgcatctccgccgtccaccacgaagcgcacgcgaacccgacgccttccaccatcccgccggtcgggcggcttctgggaccaccccgaggacggccaccgcccgggcgacgcgaccttcaagggagctcggcatgttcgacggggaccccgcggccgagccgttcgggcgcctgggccccgcggacgtgtgctccagggagcaccaggacctggcgctcgacgcgccgcgccagggcgtcgtgctcctcaagaaccggagcggtgggtggctacacccatactttgcagctacacccatactttgcagttacttaattcggagcggtgggcggccgctccctgccccgctccatctcgccagagaaggcaaagatctagctgccaagttctggcagctctctctgtgtgaatcaaacgatacgtacaggtagatgtattggtgggcctgcttcttcaacatcatcatctcctcctccgatgctgcttacctctcagtcctcaccactcccctcatggtgaatgacccttctggcagttttcccaaatcaagtctgaatcgagcacttcagttgagagtagtcactctggagtagagcaatggagaattcatttgcacctctacatattcaagaaatcccttgggaaagtgagtacatctgacgtgtttgatgtcaaagactctgatttggtcccaggaaaatatgaaggtgtcaagtgggttgaagctttgggaaggttcattagacttggtgaaggccctgaattctgatatcaaagaatataaattgcgtgtagaaggcaaacacgtattagagcttggatgtggacatggactccgtggcatttttgcaggtctcaaggaatctggtgtgaaagggattttagtccctcgccactcgcttgatgtggactgatacagacatgatcgagcaagtgtctcttcttatcctttcatttttttaaagaaaaaaaaatgattctttcatttgttttggttatgaatattatctattccatgaattgagctgctaaaagtacactctcttatttctctgtagtggagtatagtgaactacatcataagctgtagcattcatcgatccagatccaaacgtccttcggactcttccttctgcatttgtgtggagtggggattcatccggccttcttctcttgcaggtttctttggatgttttttatgccaacagatgaaaagcgtcatgagaaaggcaaagctgagtttaagaaggttgtagaatcactgggacatgtaatactcgggtggcgtctggttccgactgacaactcagacttgggtgaatctgcactcgagactgagccagtcattgagcaggttttcgttaccaagagctcaagatcagaggctgagtttgagcaacaggtaattccataccacttgagatgaggcaaccgacttttctggtcaccttgtaatgctgacactattaggcacaaatgagggaaatgtactgccacattaggcacaaagtagtgtatattgctaggtgcttattcctagaccatgctctgcttttagtttgtatttctcttatttttcttagggtgtgtcgttagctgtttccttcctgtaatcctgtgtagcgtaggaggcttacctgctctgtaagcttccttgtattgttctataaatgctttaatacagtcaggtattatcaagaaaacaaaaagaaaagaaacagatggctactttgaggtaaatatttcagggccatttgtatttacttatgaggtttagatcaaatgatagatgatgtcctgcatgattttggaattgcatttgtattgtataaacctgaatataaatgccatttttgtgaagtagtccgatagcatcaaaaatttgtgaagtagtctgatagcaacagaaactataattaattgagtcttattactcacactagatcttgtcccccaccgcctgatctgactacttttgagctgatttggtcaggaaaggtgccatttttacccagcggctgcctcgccaccaaattaaaggttgcattttgtctccggtctcaccattcccattttattctccgcgtgttgctgcctgctccagggcggcggtgggcatgctgctcggcggcgaggacatgcacaggttcccggtgcgctccccgcggatggaccgcggcgacctcatctgcagtcccgccgcgcggcagatcgtgtccaactacttcagcatgttcgggccggtgcaggacgtgcgcatcccgtaccagcagaagcacatgttcggcttcgtcaccttcgtgtacgccgagacggtgaaggtcatcccaagcaagggcaacccgcacttcgtgtgctacgcgcgcgtgctcgtcaagccctacaaggagaagggcaagatccccggcaggttcaggaagctgcagcacgcgcaccatggcggagccgagttcggcgattgcgcgtcgcccaccagattgctggatttcagggacccctacgccctcctgcttctttcaggtgcccaggttttctcctgggcatgaagccattgggctatgatgtgtgaggtgcatagagcaaaaaaaggggaaggggggccctccattcctctaatctggg

SEQ ID NO: 37854 - DNA, 2668 bp, Zea Mays
cgaacggacgggaacacgagaaatgctaatgaccattaatgcagtgcgatgctaattcttcaaaacgggtgagattataataccacggattcaattacgacgataatgatgccaatagtctgaagtccgccgaacggagtggcacggttgcgaaattctcctccccaacccatttcgttcgccgccagcgacgccggcacacaacaagtgagaccccggtttccttccgccgtagttttcccttcatcgtcctcctcctccgttccactagcaacaccggagcggagcggagatccactctccggacttagaccggtttccttctccgtgtggcgagttcaatacctgactcgggtgccccttccccatgtcgcacgtcgagcccgccgccgccggagtggaccaagtcggcgaggggacggtcgtgccgcacgacaacggtgtcagcggcaccgggggtgacgtggccaccacggaagcgcaagtggctgttgccgtttccacctccggcgacgagaggcggggggattacggcgatgatgcagagaacgaggaggaggaggaggccgcaacggtgcagggcagcaaggagggcactgacgagctgctccggaaggtggtgtgcagcgaagaggccgcctacaagctctactgcgattacggccaccgcatggggttcagcatccggaaagggaagcagtcctacttcaccggcaccaagcggatacgcaccaaggactacttctgctccaaggaggggctcaaggaaggggagaagctcactgatgcaaatttcaacgacccccacaccaggaccaattgcagggccatggtgcggttcagggtgaatgatcagggggagtggaaggttatccgactggtatctgatcataaccacaacctggcaaggcctgaggaacgacatcttttgcggtctgcaaggtcgcttatagcagggcggtcaagttctgtggagaatcagaagcaagatttgctcctcggctacggtgctgcgacaaagacactgactataggaactggggatgtgcagagccttgtgagccatctgaaaagcagggcaaatgaagatggtatgttttactgggatgttcaattggaccgaggtggtcggatgactaatttcttttggcgtgatgggaggagcaggactgactatgactgtttctgtgatgtggtcgtgtttgattcaacttaccgcttgagcaaacataacctgatatgtgcaccgtttgttggcgtcaatcatcattggcagaccactatgtatggttgcgcacttttagctgacgagtctacgtcagcttttgtgtggctgttcaagtctttcttggagtccatggggaaccgacatccacaatctattttcacaaatctagatcaagttgtgacaaaagcggttgaggaggtcttcccaaatgcacgccatcgcattgctcattggcacatccaaaagaatgcccactctcgtctgggtgctcttaatgtctcaaaaacattcaataagatgttcaccaagtgcatacagggatgtgactccgaagcagagtttgaggaaacatgggctcaaatgctctgtgaatttaagttgcaagataacaagtggcttaaaaaattgtataagctcaaacagaagtggtgtagtgctcttaacaactgcacctttgatggtgggatcgagtatgaaccacaatgtgacagtatgagcaacatgtttaataatgtttctgataagttgacttctctttgtgcaattgctgttgctgtggataaacagactgaagattggagggaaaaagaattagatgaggatgcacggtgtttccaaaggccacctgcttgcatcataaaatacagtgatattttgaatcatgcagcaaaggtttatacacatagaatctacaaactgtttgagacagattttcttgatgggtgtggagccacaaaattcaaagagcttccgtgtcaagataacaatacatatcaatttgagatgactatgcaagggcgaggatcaagagtttgcacagttcatttcaatatgtctatgatgcaattaagttgcagctgcagtaagtttgagacaatgggtttactttgcccacatgctttgaaagctcttagtataaaaaatatatgcaaaattccagaaagctacatactgaagcggtggaccaaggatgcgaagaaatgggtttttaatccaaaacaatatgaatcatcatatcaggaatgtatgaatgatgaagctgcatactgcaactatgttatgagatatgcttatgatcttgtcacgaagagccaagggcaggatgcattaaggaaagcactgtgggagactcttgaaagtggtgagaaagaattggagagatacctagaaaacgttacccaacatgcaccttatgccacttgaaaggatcactaattaacctcctagacttatctgctaaggatgaacaagatacttccttgttctttcaagatgcattcagaacttctctcaaattgtacatttatagagatgaaacggatgcttgtcaaagatacaggcttgacgacgctgccatgcctgctttcatcttggcgggttacatcgttgagctcgccttctgcccatatagcatacgcctcctcaccatgtacagcatca

SEQ ID NO: 37855 - DNA, 3222 bp, Zea Mays
gtgtacgtcggcgtcgcggcgtccacgaagtctccatttctgattctgaaacgcccacggcttcctcgctttgtcgctctcctctgtctgtccgcctgtccgagacctcggagccgacggccggttttaaaagagcctgcgcggtgtaaggattctcgggtcgggctcgggacgggagcaaccgcagtgggagacatgcccccttgcacaggagttggggctggggctggggctgtgcagcgccgagtagtaggagccgggaggcggtgacggacggaacagaaggcgcgggtcctgttgggcggccgcctggttcccgggtcctgttgggcgggcgcgcggctgagcggggccatccatcattgcctcctccgcgtgggtcttggctgcctctgtcgtcgtcctcgcggcgcgggtcgcgcggccgagaccgtcaacttgtactcttccggcgctcgctggcggtggaggggacgaaagtagatagcgtacggaagcatcggcattgggtcgcgcgcgtaggggatggaccgtcggagctggctgtggcggcgcaagtcgacggacaagagccccggggagaccgagacctcggcgtccgagaagattactgatgaacaggattctgccaagagctctccaaactcgactcggtcgccggagatcacgtcgaaggaactggaggacgataacgacgtgaaggtgaaggtattgagtgagaggctatcatccgtagttctggatgtccgtgcgaaggatgatctcgtgaagcagcattccaaagttgcagaggaggctgttctaggatgggagaaggccgagaaggagatctcatcgctgaaggcgcagctgagcgctgcaacggccaagaactccgcgctggaggaccggctcgtccacctggacggcgccctcaaggaatgcgtccggcagctccggcgcgccaaggacgagcaggaccagacggtgcaggacgcgctggcacggcaagcgcggcagtgggagtcccacaaggccgacctcgagctgcgcatcgttgagctcacggcgaggctggaggccaagtccgagcgctcggtggtgggcgccaccgacggcgacacccgttccagcaggctagccgccctggagaaggagaactcggcgctgaagttgcagctgctcgccaagacggaggaactggagctcaggacgatagagaaggagctcaaccggcgggcggcggagacggcgagcaagcagcagctggagggcatcaggaaggtggccaagctccaagctgagtgcaggaggctgcaggccgcggcacaacggagggcgtcctccgtgaacgtcgagctccggcgttctccgagctcggcctgcgtcgagtcgctcacggattgccagtcggactgctccgactcatgggcctcggccctcgtcacggagctcgaccagttcaagaaggacaagagcggcgcgagcaccaggacagcgagcctcgtggccgcggacatcgacgtgatggacgacttcctcgagatggagaagctcgcctccgcgaacggctcgtcgaaaggcgacgccgtcgaggacgcgagcgggcaggtggagaaggcgctgcacgaggctcagcgcgagctgaggacttgccgccgccgggtaatggtggcagaggagagatcagctgagctacagcggcagctgaaccatgccaatggcgacaaacacgccatggaggcggaggcggaagctgctgaggcgaagggaagggagcttgagggcaagctcgagctcgcccgtgccgatatcgcgggcttgctggacaaggggcgcatcctggaggaacggctcgagtctgagaaggcgctgacacttgagctcgcagccaagtaccaggacatggagacgctggaggcagagaagagggagctgaacgctcagctggagacgtcacggtccgaagccaagaagctcagcgacaagatcgccctgatggagaggaagctggaggtggagaaggccctgtcgatccgactggcgacgaaatgccatggcgttgatgctctggaagcaaagaagaagggcgtcgagctcgagctggagtcggcacgcgaggaaatcgcttccctgcgaaacaaggctagtagcttggaactgcaagtcatggaagagaaagcgtcgtccgctggactcgcaatgcggtgccaagaactggaggagcttagatcccagcttgtgtcttcaaactcacggatcgttgagctgaacgagaaggttaaaacgctcgaggatgtgatcgagaaacagaggccagtgacggcggaattggagtctcagctccagtcgagacacgacgaaatcagcagcttgaaggaggacataagcctgttgcagaagaagctggagtcccagaagaacctgtcgtcagcttacatatctgcgctgggcgcttctgaaaccgagaagaaagaactggctacccggtttgaactcggagagaaagaggccgaggaattgcgcgggaagacgagtttgctggaggaacagatccacgaagagagggcacggtcatctgagtttgcggtaaaatgtcggaagatggaggaacagttctcccgcagatctcttcttggccaccaaccagtgaaatcttcggcgatcaaagatattcagataagaaaggagacagagctggccaaggctgccgggaaactggccgactgccagaagacgatagcttcactgagcagccagctgaaatcgttggccgatttcgacgagttcctccctgaaaccgagactagtggcgccgactcagccgacgcctgggacggcgacctgaagctgctccaccctgcaagctatcccacgcagattggctgtttggcagtcacatgagtcacgatcctcgttggcaggtgggcggagaaactgtttttgttcgggttccaccgcatgattgctgtggtgagattgccatgatcttccaccacatgccatatagagttaagtttataatagtctataggtgagaaaatgttcatatgaaagctgtttatagagttggttggtgaagcttcaaaggaactcataaactttgatctcccattcttcctgtcccttggaaacggcttttaaccaccagcatgtgttccatcttgattgtcttccggctattttatattctgcaggagttcattgtgcaatgaaatgaatggaatattcagttagatctga

SEQ ID NO: 37856 - DNA, 1902 bp, Zea Mays
ctgcatcctactgctgtggtgtatagtatgctaatggatgggtactgtcttgttggcaagatggagaaagcattaagagtatttgatgctatggtgtcagctggcattgaaccagacgatgtagtgtatggtacacttgttaatggctattgtaaaattggaaggattgatgaaggattgagtcttttcagagaaatgctgcaaaagggaataaagccttcaactattttgtacaacatcataattgatgggttatttcaggatgggagaacagttcctgcaaaggtgaaattccatgaaatgacagaaagtggtatcgctatggacaaatatacatacaacatagttcttcgtggactttttaaaaatagatgctttgatgaagcaatctttcttttcaaagaattacgtgcaatgaatgtaaagatcaatatcataactctcaataccatgatagctggaatgtttcaaaccaggagagttgaagaagctaaggatctgtttgcttctatctcgagaagtgggctggtgccttgtgttgtgacttacagtataatgatcacaaatcttataaaagaaggattggtggaagaggcagaagatatgttttcatccatgcagaatgctggctgtgagcccaattctcgattgctgaatcatgtagtcagggaattactaaagaaaaatgaaatagtcagggctggagcttacctgtccaagattgacgagaggaatttctcacttgaacatttaaccgcaatgttgctggtcgatctcttctcaagcaaaggaacttgtagggaacaaataagatttctccctgcaaagtatcattttcttgcagaggccagtccgtgattgatatgttgattttttttggaatcagtccttgcacgcacctgtcacagttaaactagtatatgatcttaactaaaaccattggtttacttcatgttcatgtttctcggaagattttcttctcatttgacctgcttgatatgcagatgttcatttacttttgatccaatatatgcagagcgttttatgtttttcgaagcatattcgttccggtgctgatgtagctatgtgctctccgtacacaactgatgtgtgattctctcttgtagcatgttttatcatgtctgttaacacagccgatgttgcatttatgaggaatgacgttataactgctgggagaataatgtagcatgctgaatcctgttttgggccctggctgagccgcccagttcgtcatgaccagcaaggcagtctggcctaatgctgtggcttgtaagggcaaagtggataccctgctgctgggtagtactagtatattgctgttcaaacctgcaaatatctgggatcagctgatggatgaagaacaatcagtagtctctgggtaaaatagcatgcctgcgcaagcgagcggacatgagtgacaagaagcggtgagtgcctgcctgcctccatttaagggcctgttcgttctcatcttaattcatgtggattggataggattagacgaaatggaagcagagcattgtggtcagaccagcaccatctctaagggagaacaaagagaaggcaagcagagcctgtgcacgtattggttggttcagttgtgcggttgctctttttggctcttatcttcgtcgccattcttgtatttgtaggattgtggaaatgtaaaccgttcaagttgctgcattagtagcagctagtagtatctgtgattcagaaatctaaaagttgtgacttgttcatgtagaatgaaccttgtgtagatgagttgcaaggtgtgagtgttccatatattattgtaggatgagttagaatcctgaatgtcaagtgcttattacgtggatgcaaaatgcaaataaataaagtgatgcagaccacggc

SEQ ID NO: 37857 - DNA, 1806 bp, Zea Mays
aaattagcacaaagcgtcccaaaggaccgaactgtaaattcttaaaatcacgtgcgttcttcagtgttagttctccaccctctccttggcggaaaaccctaaccccctttctcggcgacgatccgacccctaccccatctcccggccgaccccacggcgctctccgccatgccggacgtgcaacctctcgtcagcgacttcgtcctcaagctcaagcgccggaaggtggaggggtcgcacgcggtggcccggcagacggcggagctgctacggtcggttgtgtcgcagcatcggatgggtagcagcgccaaccaggcggccacacttgccgatgccgtacgggctgtgggggagcagctcattgccgccaatcccattgagcttgctgttggaaacattgtgagacgtgttttgcatataataaaggaggaagatatatcttccacagcagttggtatcgaaggtctttctgttactgttgacagtgatgatgaatatgacagcgaacatgatgatcgccctgcattatctgctgctgttcttgctgcacatgctagaaatgcccttcgtgcaccttcattgcagactctgctagaagacattcctgtgagtcctgcaatttcccgcactgcatcatcaactggtgactcagacggaaaaagtaaatcagctggagataagagctcaactagaaaactgaagcatgatgtcatcgcagccattggtgatcttattgatgagattgactcatgctatgagccgatttctgagcaagctgtggaacttattcaccaaaatgaggtaatcctaactctaggtcgttctagaaccgtcaaggagttcctgtatgccgcgaaagaaaagaaacgatcttttcgtgtatttgttgctgaaggtgctccaagatatcagggccatgttctcgcaaaagagctggttgagaaaggtgtacaaactacagttataacagattcagcagtttttgctatgatatctcgagttaacatggtcatcgttggagcgcatgctatcatggcaaatggtggagtcattgcaccagtagggatgaacatggttgcacttgctgctcaaaggcatgctgtgccttttgttgtggttgctggtagtcacaagattgcatgaatttcagtactcaggatggcagccccttgttaaatgttgtcaacccaacatttgactatgtgccaccgaagcttgtgagcctattcatcactgacactgggggacacagtccatcttatatgtatcggcttattgctgagtattactcagctgatgacctggtagtgagacggaaggcaacatcttgaaggaagacaaaagcgctgcgaagtctccttggtgttctgatcataggatttgcgatcttattggaatcctagtgttcttgtactcgtcatgatctgttgcctgtagagcggtgctgctgtgataagtggaatcacctgtttgtggatccagttactgtcaaactgcaggaaatcgatgcaagcattctcgcgcatcgttgtaaccatggcggcattttaagtataaactgttgaggaatggagcgttacgtcatggaagaattgtttcactataggagaggttcaaatatatgattgactggttgtgtagagggtgtctgtttcttttctggtcataggttaatctgggccttggctggtccaaattttgaatgttataaactccagcaagctgttcgatatgtctatgaagtgttaccatgcacactgatgggtatttgctgagccattttgttttctatatctatcgtatata

SEQ ID NO: 37858 - DNA, 1962 bp, Zea Mays
aaatctctcgccgctgcgcgtctctcttctttccctctgtataccgcgagcgcccgcagctagctgctagccgcgcgcccgccgctacctgcccgcctccagcgcgcccgccgcgcgtgccccgccgccacccctcgcggtgatctgtgtgggcgacgtccacagctacatcacgaagctggagagcctctggtccaacctctaggccgcactccccgccgacgccttggccaccgcgctggtcatcttcctcggcgactacaacgaccgcggcccgcacacccgcagggtcctcaacttcctcctcgcgctcccgacgcgctacccagcgcagcgccatgtcttcctctgcggcaaccacgacctcgccttcacggcgttcgttggggcgccgccgccgccgcccaacggctccccgttcttcggccacctgcgcagcgccatctctctttcctccctatctcgctgctccctcccctgccgccctgcttatttacgcccatttcttaagagaggatttgatggcctgtcagaataaaagagctcgaggaaattgcggcggccggaaatcctggtgatggtgccacacaaacacgagaatctgcttcgtcctcggcggaattgccgtcggggtcgggcgattcttcggaggacaagtgcctctgtttcgttgagctggctaggtccatggggattagtcaggacactcatgagtcgatggcaacagatgcagccaattacctttgccaccagcttcagcatcttcttgggcctatctcttctgcgacgagccaaagtggcccctgggaggagaggtcggtgatggttaggttgactcagaagctgcagaaatctaagagaaataagtggtggcggcagaggagaaggaagcatgttgcagagctttttcagaaggagcgtgcggattatgatagagttgaccaggaagctgatgaatggagggctaagcaaatagccaaggacattgcaaagcggagggtggaaagcatgcagcagattgctagaaagaaaacaaatgaggaaagaaagcgcctagaatctgagactggaaatgctttgggtgattcagatactgagccaaggaacacaaagtacatgtcactgggagacgaccgcagcctgtgcatggaatgcctggggtctgcggtcatggacaccggtgaatgccagcccctgtaccattctatcagggactactacgaggggatgaaaatgaagctggaccagcagatacccatgctcttggttgagcagcaagcgcttaacgaagccatggaaggagagagtagaggcccacaccacatgcctgagacaaggggcctgtgtctgtcggaggagcagactgtgagcagtatacttaggaggcccaggattggtggaaaccggttactggacatgagaactcagccacaaaaactgactaggagatgtgaattgaggtgtcccagtgggtcaaggctatgatttgaccgaaacttgtgctggagcagctttcactgaatgggatgacaccacttgctgctatgtgaagcttgtttcatgggaagaaggtggttacaagatttctgattatccgatgccgagaggagaggtagtggttggcggacacagtacaacaaaaggctataggactaactgtattgattccggctcccatcaagtgactccttcccctcacgttgactttgcggacagatgtctcaattctagtggtagagctacgaacaacaatctgatgtcctgatcgagagttgaacttgtgtatttgaacttgtgaactatggatgtgaacttgtgtgaatttgtgaacttatgtatttggaattatgtgaatttgcgaacttatatatttggacttgtgtgaatttgtgatatgaacatatatcaatgtgtttgaaatctgtattgtatgtgatatattgtgttgcatgtgatattttg

SEQ ID NO: 37859 - DNA, 3758 bp, Zea Mays
tgaacactgaacagccccccggtcgctcctcctccctctaccctccagctccagccgccagccgccagccgcccacgcccggagcaccgccgcaacccgcagcgccgctcgcccggaggccggagcaccgccgctctccccgcacggagcaccgccgcgaccacgccgctgtccatccgccgctccgcgctccctccttcgaccttcgccttggttccgacgcggtgaccgtgcgctaaacccttcgaccttcgcccggaggcgggagcgcggcggaccggagtccggagcaaccgtgagacgagcaggggcggccggcgggcgcggatatttgggcgcaacaactttctgcccttccatttctccaactaagaaggaataggatgccaagagagtttctgcaaccccaatgaagatggcaccagctccgcctccggaggggactgcaattctgctaattcgtggagctcagagttctatcttaacggtgctgctagttatgcttgggtgttagtgctatggctactcattaccaagctgctaccttgattgcctctccgtcttacccaaatgccattgcttggtcaagtgacaatctcgtggctgtcgcatctggtcatattgtaactattctgaacccagctgcgcttgatggaccccgtggattggttggacttcgtcacagtgacccttttcctataggagtggttaagagagaagatctcttggagccatgtttattgcccacttccttagcgcgtgaaactgaaccatgtgcccgatcgatttcatggtctcaacaaggatttgcacctaactatgggtgtttgctggctgtttgcactgtgaatgatcatgtgaagctttaccgatcaccaatttgggagttatgtgatgaatgggtagaggtcgcagatatatcacagttgctgtttaactattataaaattataaacttcggagaggataatggttctcatttgacttcttcgaagaatacaaattctggggaggcagaagttttaggatctacttgtcgatcggaagaatctctttatttcaggggtcctggacagagaaaaataaagccagcaagagttggtggttttatttatgacggcaatgaagttgatttagatgcttcaaaggatgcagacttctcgatggaaccatgctcaaaatcaaagaagaaatctttgaaaaagactgtaaaacccagggatgaagtggttgctgtaaatggacgaaacagcacagggaatgttaaagcatcattgtcctccaatgaacaaaacaaatctcttcctcttatcacggcaaaacagtatgcctgtcgtgctgcacatttgtcttcccttgtagtttcatggtctccagttgtgtcattaagtgatagaacttcttgtttattgaggcattggtgcattcttgctgttggctctaaatctggaaatatttctttttggaaactatataagccagaatattacacaatagatgctggtgtggttaccagtgatccgatgctcatcggggttttgcatgctcatgaatcatgggtcaatgccataacttggcaagttctttctgcgggctcttcaaaatcctcgttgcttttagctactggatgctcagatggaagtgttaagatatggttagggaatattgaagggttaaatcaatgtgcaattggagaagaagtgccatttgtgttagttgctgaggttgccgctaatttatcagctccagtgtcgtcaatctcattgggcatacctgcccggtctcaacatgaggttagtttggcaattggaagagtatccgggttactagaaatatggatatggaatgcatctaccaacaaaattgagagttccagtgcatggcatgcacatgatcaagtggtgacaggtttacgatgggctatcgatggcaattgtttattcagctgcagtcaggccaccagggtaatgggtgtattgagcccttcttcagacaattgttcttgacattaacgttgtttccaatacaccttccaatgctctgtacattgtgagaatgaaaatgaaaaacgtagtgttaaaaatttggtatgatgctatgtgaagcaagcagtattctaggtgcgccaagagggtgaacgcttcaatggcagcatgaggcagcaggaacgtgtggtgagcgtgccttggttataatatatatcaggacaattctacacgttgttggatatctcacgaaaaccaccttgaagaattttttttgcattcagaattttcagagctaagggagtcagaagatctatcaaaagtttctgatcgatgctatggtcttacgctatcacctggagaagagataattgctgtggtccgcagtttggatctgaaccttttgaaccagatgtatcaagtcaggacacaaaaggcggtggtcgagttcatttggatcggtggccaatttgttggtattccactggacgggagtatcgatatttgcagtccgcagtctgcggacttatcctcaagtaaccttatgtggtggggatccaacatcttgtggtcgctgaagaaatacgaaaatgtcgaaaagaggcttgtgttgtgggacgttgtagctgcgctgcaagagctgaagaaaaccgcgcccgcctttctggagactctagtgcacagttgggcctcagctttatttgcgggcgactcacagtgtgtttctatcactgcccagtcatcacgctcgatgcatgacatgatgccccatgtcagctcgcggaagctgcacttactgaacataatctgcagaaaagtgatgctcggcaatcatgcgcggcatggtcctggtgctggaaacaacagtaatgatggaacaactgatttctggagcactcttttggtagcgagtgaaacggagctgcgagagaggctggtgggtttcacctttgccgcggtcgtgaaacggacagcgtgtctgttcaacggcacctccaccgcaaattgctggttccctgtcggcgtcgcccagatggattcttgggtatccatgaactacgaaaaggtgcacggtcagctgcagtcgatcagatcgaagatcaaagagctaggaagcaggatcgacggatactccgacgtagaaagctgcccctactgctcttcgccggtccgtttcgagtcgcctgacgtggccatctgcggagaaaggcacacgctgtcgcggtgcaggacatccatgaccctgtgctccgtcgcgcagccagtgtggcactgctcgtgctgcgggggcacggtcgacaagctgctgccggagtcgttcttcaccatgcctttggacgccgtccgtgacgacaaaggatcgctcgatctgtcggcagcctccgccccgctttgccccttctgcggcgtcctgctgcagaggtcgatgccggcgttcctgctctccacctcgccggtatagtcttcggatgcccccaggtgttacatgcagtagcaatgcaatgggaatatcgtagtggagccaactaccaagtttgttgtagctgatgctgtatggctgcagagtggcagtgccgtcattggggctcgaaatgtttgtgataggttttgtgacttctttctgcttagcccctctaatatatctcgagatacctattttttatttaccgtaccctgcctctggaccaaagcctatgtggcggtggccgccaggctgagtgcggggcgaggggcttgggccagctcctgcactcagcctgatgaccatgtccg

SEQ ID NO: 37860 - DNA, 1613 bp, Zea Mays
acaccaaaagacgcaacatcgcaacgtccataaaaatttggcgtgatcccacacagcccaaagcaagcctagcaccgcaacgcaatcaaacccaagacaaatccaaccaaccaagctattccccatctccggaccagcgccgcctccagtcgctgtccacgggcaccccgggcgcgcctcctccgagcccagactcgagctccatcccgccgtggatcaccgcgtgaggtggggcgcaccgaccggaccccggagggccagatggtgtccggcgccggagggggcgagtagcgcggtcggcggccacgaacggattggcggcggcgcggcgaggcgtcggtcggagcgggggccaccatgtctgctgtagtgtgcggcaagaggtcctcctccatcttcggcgacgagcttgtaccttccccttcctcccctccgtccccttcccaccaccatcaccccgccaagagggcccgctgctccccgtcccgctggagggagggtctactccaccacctcctcaccctcttccccgacatggatccccagtacttgaaaaagctcttgaggcctctggagatgacttggactctgcaataaagagattaaacgagctgcgactggagtcagctggggctatcctatctgccactgtttgtgaatctgagaaggacatatcatcagctcataacttattggctgaaggtaccaccagtaatggccatttagacatagctactgaaaatccacctgcaattgataactctcagacaagtcatcatagctctgaatgggttgacctatttgtcaaagagatgatgagctcctctgacatagatgatgcgcgagctcgtgcatccagggctttggaggtgtttgaaaagtccatcatggatcgagttggacctgaagcagtgcagaatttgcatagggaaaatgtgatgctaaaggagcaacttgcaataattctccgagagaatgctgttctgaagcggggcgttgcgatacaacacgaacgccaaaaagagtttgatgtgaggactcaggaagtcgacagccttaaacagttggtactgcaatatcaggagcagataaaaactcttgagataaataattacgcacttagagtgcatttgaagcaggctcagcagggcaattctatgcatggacgtttcccgcctgacgtcttctaatgtctgccatggctcaacagaataattatgcatggacgttcgttaatatttgatgctgtacagttggattttgaactaagcagtgtcaaataaaaaaaatcgaggtagtacctattaagataagtagactcaggacctcaagttcgactcaaatgctgcatatacgatcgtaccccatcattggagtcgacaacactaaggtccaactacctggaagctgagatgaaatagcatgttagggttggcagtgcactggtccttgcatacttgttgtaataatggatcttgcaggggaagctcggatgaagtaatattggctgtatgcgtttgaagtgtgagaactgatatatatcgtaagcttaacacactaaaaacaaaacaatgtttaaattaatctttgcacacgctaagccggaatgattt

SEQ ID NO: 37861 - DNA, 3370 bp, Zea Mays
gtgactcagctgagcctgcagcccagctgcccgttccaactcctttccaaatccgccgcaacgcgaagcaaacgacgcctgaacggtcccaaaacccacaccgccacacggccacgcccagttctcccctctctcgctgcgcatcgacgacggcgagggcgccatgatcgtgcgcacgtacaggcgtagatcccgttccatctccgaaggcgggggcggggtctcgtcctcgcaggaggcgttcgacttcgatgccgacgtcgacgtgctgggatcgtcggcctcgcagccgctcccgccatcgcaggaatcctcctcgatgtgggatttcgacgaggacccgcctccgtccccgccgcggcccgggaaggaggggaggcgaagcgggcggggcggagccagaagaggaggagggttggagctcgcggaagctcccgcgatggcgccgacggtgacgctgatggaggcggaggagtacggagagatgatggagagcgtggacgacgtcacgttcgcgctcgacgggctccgccccgccgcgcagaagcggacgcggcgggccagcctgctcgcgctgctcgggatctgcgactccgccgagcgccgccgcgtgcttcggtcccaaggattggtacagcaaattatcgatgctattttggttctggacattgatgatcctccctgcgctattgctgcaggagctcttttatttgttttggcaagtgatgtccaagacaataatttgctgtcttcagaaacttgtgtccatttcctcctcaaattattaaaccctccggtgaatgttgttgatgccaaagcaccatcaataggttccaaacttcttggaatcagtaaatttcagatgcttaacggttccaataaggatgtggactcttgttcagaggacatacttttaaaagttgaagaaatcctcttaagctgcaaagagatcaaaccagcagacagggattataagagaacaacaaggccggaactatgttcaaagtggcttgctttgttgacaatggaaaaggcgtgcttgtctgctgttgcattagaggatacatctgacatggtcttagaactcggaggaaatttcaaagaaacattaaggcagttgggtggccttgatgatatttttaatgtcatggtgaattgccattcagaattggagaaacttgtaaaggatgcctccactacggttgtggagggaaaagaaggtgctcctctacaaagcaccacactcctcttgaaatgtttgaaaattttggagaatgccacatttctaagtgacaacaacaagacccatttgctcagcatgagtcgaaaattgagccctaaatgccgctcactttcttttgttggtgtcattctcaacattgttgagttactatcagctctctctctccttcagaaaccttccactgtttcaagaaaagcagatccaaaaaatactaaagtttgcaacggggcctgctctgacagtagaggtttgagcttattgaatcatcattgcaagtgcaataactcaaagaaaaagagcattttactgaaccgaaggtgccagtattgttcatccaccaaatcagaagcttctcatgttaccctctcttctagtagtgatgtcagtcagtcagaaaggatactcaattgctcatctttttcaagcaatgggacatcaagtggttcatttggagtgaaacatattaatggtgctagtttgaagctcaatgtaagaatggatcgttctaaagcttatccagtcagaggctcaactggttggatttctatgaaagcacaaacttctgattggaactccagagaaatggcaaaaaagcggcgcctatctgaaaatgtacgcactgatttgagtaatggtggtgatgatccatttgcatttgatgatattgatcaagaaccttcaaattgggatctatttggtccaaaaaggaaatcaccacagaagcgagcgaaaagaactaatggagaagtgttggatgattgtggaactgcattaatgggaagtcctaaattatgtcaacctgaagatatttatcagtcagttgcaacttctggttctaaggttgtagatgagtccaatcttttggaggattgccttttggcgtcagttaaggttcttatgaacttggcaaatgacaacccgtctggttgcgaacagatcgcgtcatgtggcggacttaataacatggcctccttgatcattaaacatttcccctcatttgatttctccatgaacagtaacaatcaaatgaatgaaagtgtgtcctctggtgatccgttgtcttcccagaacagcaagtcaccccaaatcaaaactaagcagttgcgggactatgaacttgattttctagttgccatattgggattgcttgtgaaccttgtggagaaggatagccttaatagggtacgacttgcgaatgctcgtgtttctgttaatctatctcaaaatccagatagcaaagaggtacagagggatgtcatacccctgctctgttcaatattcttagcgagtcaaggtaccggggaaactgctgaagctatatcaccggatgatgaagaatctctgttgcaaggagaacgcgaagctgaaatgatgattgtggaggcctatgcagctcttgtgctcgcctttctttcaacggaaagtatgaaggttcgaggagccatttctagttgccttccggacaacaacttgaaagttcttgtaccagtgctagagaaatttgtgtcatttcatctgcagctcaacatgatgacaagggaaacgcattcagctgtgactgaagtcatcgaaagatgtcggctatcatagaagtgggaagaggcgccctgtacagattagctgacctctttgcagccgaagcacacacaggtgttgctcatcacctggccagggcgcaacaaatggatgccagaggctggcctgcagtgggctttgggagctaacagtgattttattctttcttttgtccctagtttcttgttctccgcatcccccgaaatcacatgtttcattgtcgtaggaatagtccgtattatgaatgtacaataacaacataggccgtagggggaatgtagttgtgctgtttcagttcctgggctgtctgcctttcaggttgtatgctcgtgtcacatggaatcagtgaccgcatgcctaaatctgagttaagattgtatatcacataatagccgtgcaattcaactatgtagccctatgtacagaggcgccatatattgaagcatcttctggttgcaaaaaacatgaatgttgtataaatagtgtaactgaaggtatacaaatcttccaggcagttccttggtgctatataatgcacggcttagtggcgta

SEQ ID NO: 37862 - DNA, 844 bp, Zea Mays
cgaatactggatgggggaggcgtggggacgctgtccaaaacggcgatccgctggggcggaaggagcttggccggtgcgtggtggagtcgctcaggcagggcagggcagggcatgcggtctcgtccatggcatctaggctcgccgccgccgaaatggaaggtgacctcgtttccatggcgttgcctctacattagtgagggtcggtggaaggcaggcttgggttcgtgaatcgtgatccaggcgcagccttacctcttggccgcccccatgcatgccccaggatctggacttgtggaggcgctctgtctcaaggtctcacacactaccctaccctgttcaaccacttccagcgtgagctccgactggtgagcgggatgtggtgctggactgctggagtttacacaagaggaattgaatgccactgcaatgacgattccgagcatcccaagcctgtcgagtaccccgtgagcaatgggtaggctcagcacgagcaatgcgacaccatttgatcttggatgtgatcagcagctccacagttgccacttttttagggttgggaggcctgcatttggttctctattcagggttgaaggtggggcataagctgctccaacctccaactactctgtctcctggagacgtggtttgggtgagggcgccacttcttgaaggcaaggctttgcttataatcttgaggaagatggctacaacataactgtggctctagaatcacgccatggtgatgctaccttctctaggctatttggagaaaagtgtgcgaattgaccaaatttaagattcgctgattctctttcatataagcgacaaagagaacaatgtgcta

SEQ ID NO: 37863 - DNA, 1861 bp, Zea Mays
aaaaaccatgtaaaaatatatctaaataaaatataaaataaaaggctcgacgtcgtcgtcacctctctcgccgtccacgagtcacggcgggcgggcggcggcggcggccgggggtcccggttgcacacggctcgccaccatgcctgaccccaccaccaaactcccctctccacgcccccgccggcgccgcaggctcttcagcctctgcctcggcacagcgctcctcgcgctcatcgtctccgcgctcgtccacgtcgtcgcccagccgccgggtcccgctcccgcctccgcgcgcttctccgtcatcatagacggaggcagcacgggcacccgggcccacgtcttcgcggcggggcccgacggccgcccggatctggcgcgctccaccgtgatgcgcgtctccccgggcctctcgtccttcgccgccgacccggcgcgggccggggagtccctgaagcctctgttagattttgcgagggataagattggcggcgccgttagggaggcggaggtgcggctcatggccaccgcagggctgcgcctgctcgaggagcgcgcccaggaggcgatcttagcgtcttgtagggacgttctacgagcctctgggttccggttcgaggacgcgtgggccaaggctcggatgaaggtgtctatgcttgggttgcggcaaattatgctcttggaagacttggaggggatcctaacaaaaccgttggaataattgaacttgggggcgcttcagctcagcttacctttgtttctgatgaagtacttccacccaaactgtcatataattatacttttggtgaaacaacatacactctctataccaacagctttttaaactttggtcaaaatgcagctcaagactcattccatgaaatgctgaggtcaagaggctctttcaaaaatggtacacttgctgatccttgtgctcccagaggatattcacgcaatgaaggtgcttcaaggtcaacattagagaaccagtatgttaataatgggactggaaactttacagagtgcatatcttcttcacaacttttactgcaaaaaggaaaggaaaagtgccagtatcaacaatgtcacctgggatctacttttgtacctgagctgcgtggatacttcttgggaactgaaaatttatattttacttcaaagttctttggacttaagaagtcttcatcactatctgatttcatgtttgctggagaacaattttgcaaccagcatttgtcgagtcttagaaaaaggcatcctaataggtcagatgaggatttttcacggtattgcttctcgatggcatacattgtggctctactgcatgacagtcttggtgtaccactggatgacaagaggattgagtattcaaaccaggttggagacattcaggttgaatgggctctaggagctttcatcacactgatgcaaaatacgagtttaaagccattacacaccaccgcagaatcaacccatagcaatagaccattgtttgctgtgctgggaatgtttcttttatgtggagtactctttgtatcaagatggaggaagcccaagacgaaaatcatatacgacttagagaaaggccgatacatcataacacgcatcagctgacgctaaatcttgtgcagaagaactatatttatacgacatgaatagatgctgtgttgtgcaacaatgtacgagttcaattctttgtgtttttacctttaggtagcagagctgggtgggtggagcaggaagatagcgcatttgtgcgtatagaagaatgatgtgtagaacaaattgccatgtgttaattgaattatttgatgaataattatagttgctttgttcatctaatgaggtcgatatttctcac

SEQ ID NO: 37864 - DNA, 3107 bp, Zea Mays
aatttaacaaattcctctcccgtcccctttcccttcggggatggtattcgtcgtcttggcttcatcctctcgcccgccgtctcgactgtagcaagcggggctgctgtccgccgcattcaggagccatgcgtgaggggatgagggagagggacagaggcgggagcccggatgcgtcaggtcctccgcccttccgcggcccggcgtacaagacgaagctgtgcgcgctttggaggggcaggggcggctgcccccgccccaactgcggtttcgcccacggcgaggctgagctccgaaggccgccccctcgcgcctccttccagcctcgcccacgacctgggctttgcatcaccttatcatcttcttctgggttttaccgtacccaaaatgttgtcgattccatgccaatttgtcggattaggttatttggatggtttcccgagcaagagacaccagtgcgctcttcttcaaagagatgcatattcggcctgtttattcatcgagttattgggatgattggttgatgactggagacacagcccaatgtttgaatgctagtggtgcagcaaacactgacagatagcaatgtgatctgaatcatatgatctcaggaggagagttagcgaacagggaagatagttgcaactgcaagaattatataatgttaacaatttgcaagtgcatcctttgaggatgtacaaatggggttgcagatgttaatggctgacaattctgggaggttttatagtttctacccgttgctgagaagactctacccttcaattgcataacagtatgatggtttggcacctgaatcttttctcagtttgtgttatatcttctcatcttatggtgcatatacaccatgattcctgtgtagtggtacttgaactgagtgcttgctgccgcagaacacaaaaatcatcaacaagcctgatttcattgcagataatcttggcattgctggttattattttgattttacaatagatatctcatggacagatttgttgagattgactgcttccagaggatggcacatcttatttccatcctggcctttgtttcagttggcaatcggtcatttatgatacttgaatgcttaacctgcctcagaagaactgaacatggaagatattatacattttatcttctcgatgggattcatgctatgggagaagggattacagagatcatgagtttagactcaggcctgatagaagacactcaccccatgggaggtattcccctgaaagagatatcaggcgtcgttcatttcatgataagagaccaagttctgaagataggggtaatcactttttctgtgcacatttgtgccaataaaaatatttgccactgtccattgtatcttctaactactccctgagatttgatttgcaggatctagtcattcaagatcacctattaggaagaggtatgtaggaacgaataacaattattagggattcaagatctagtcattagaagtacttaaatttgtttattacatcgggctagtttatcttcatgtaccatcatgacttaatccctgctaatttattggtttcctaattttttatatgtgcgagctgcaatgttaagtttgtggtttatgagaccttttattctattgttcaaccatgatctaccatggagtctcattaccatccatttataactttggggtggggttgtagccgtgtagggtcatgaatgttggtatcaccaaggagggttttgatcttatgttaggcatgtgatctgtatacatgctttttttgcaagtttatggcttgcttgtgaaattgcctatctttatgtttatgttctatggctgctcagtgagagaaaacatagtaaaagtcctgatggtggagaaaccgattcatccgtaagtgttcgaagtcctgataacgaagacagaggaaaagatgaaaggtacttaagcagtgatgagaaaaatggtcatgaagatcaactgaaacaaatgcatctggacatggaagcattgcgtgaagacaaatcaaagctggagatgatattagagaagaagactgatgaagagcacaaactttgtagcagagtagaagatcttgaattgcaattgaacaaagagaaagaagattgccaaaggatgtcctccaaaaccaaaaagctaatcaaagcacatgggcgttatataaaagcacaggaggatttaaagaggtctcaggctcgctttgagaggctagcagatttgcttgcttcagatattttgaagccttgtaccaaggagcagggttccatagggattactgccaatgaagatccatataatgctaatgaaatgagcccaagtgaccaaagacaaaaccatgtttcagcatcgagaaaaagacttatttccctcccaacaagtgaagaagcaaaaactggaaagagacagagagagaatggtgatgatatgatcccaacatcagagaactatagacctgaagatgccctagaacatctccaagatagcaagggaactgatctaccagaatcatttacagtgaagaagttaagggagggtgacaacgatgatgtaggaaacattgtctcttcaagcaatatttttgcggataggggcttggacgtgggggtggatgaggatgtggcagttgtcaacagtttcattagctcgcgcatgattgataagcggccaataccgagctcaaactccttgaaggagctgtcaaactccttgaaggagctgccgcctgctggccatgcaactccgaaacagcagctggcatccttaggcggcgcttcaggacgagtgatattcaaccgtgggccgacagtggcacaattccggagcacactcaggggggcggtcctgaggagggtgcggtgcaaaggaggaactgacggtggaggtcgaaccagcaggaatggcagcacacgagatgagacaaacaggagagccacacatctttgtgttggaccactcaccctcgagaggtgtttggttgcctgggcaagcctctaggctatgctatccattgatcaatcttactgaactattgaataactgtggaggaacatatgtctatttttgtacaaatagagtggactaaatcttcatg

SEQ ID NO: 37865 - DNA, 1870 bp, Zea Mays
gtcctcacatcccacattcccaccactacttcactcgctcgctcgtgaagcgtctcgctgccctgcccccaccgatccaccacccccccactcatcacccctcagccaccgcccaccggccatgtcgtcgccgtcggtagccagcctccgtctcccgatgctcccagcgtcgccgcccctctcccgccgcgctatcgccggagttaccccgagcgcggccgcaccccgcgctcttctcctacaacccctcgcgcccaaggcgctcgcggcgtaccaccagcctgcgctcctcctccaccagcgacgccggcatggaccgccccccgtcgccgctgtcactgcctccaagccggttctcaaggacccgaagaagtaccaggagtgggactccatgacggccaagttcgctggcgccgccaacatccccttcctactgctccagctcccgcagatcgtcctcaacacccgcaacctcctcgccggcaacaagaccgcgctcttcgccgtgccgtggcttggaatgctcactgggctgctgggcaacctctcgctcctctcctatttcgccaagaagaaggaaacggaggctgtcatcgtgcagactcttggcgtcatctccacctatgcggtcctcgtgcagctcgcaatggcggagtccatgccggtgccgcagttcgtggccacttcggttgttgtggccgcagggctcatcctaaacttcctcaactactttggctggatccctggaaccctcttgctgctgtgggaggatttcattacagtcggcggccttgccgtgctccctcaggtcatgtggtcaacttttgttcccttcatccccaatagcgtactgcctggcataatctctggttctttagctgttgcagctgttgcgatggcaaggatgggcaagctttccaatgcaggggttaaatttgttgggtcattgtctggttggacagccacacttctcttcatgtggatgccagtggcacagatgtggacaaattaccttaacccaagtaacatcaaagggctgtcagctttcagcatgttgcttgcaatgcttggaaacggacttatgattcctcgcgctgtattcatccgtgatttgatgtggttcactggttctgcatgggcatctgtcctacagggttggggtaacctggcgtgcatgtactgctttaatagcatcagcggagaagttttctttgcaacatcagctggatttactctatggagagatgccattgcctatggcaacagctcgcccttctcttccttgaaggagctgttttttgggaagtgatgaaccgtcggcaaccttgtttctcttgcactttaagcagctaactgttcccgggtaggacgctctcctgcaataaatcatggtagctgttaagaacggtggttcagttgctcccatatggtctgaagaaacggtgcttcagtctttagcattttgaggaggaaacgtgaaacttactggtcagctgaaggctataaacattgccatggccctggactggaagccccaactttcccaagcctgtagaaagcgccgtgtgcctctacagaagccaccgcgtgatgaccagcttcatccggcagggtgggtacagtagcaagctatagccctagtctgatgtaagaacaaatttatattatccatcccatattgtctttaattagattcatttttgaaaccaatgcaatttcagctcttgctgtcgtgcaaatctgtacccattgtccatggatgagtagatgacctgggagaatcacacaatacatattgtaatatcagttcacgttttaaagaagtgaatatgagtagatgacctagggtctcattgagctagaccaaaat

SEQ ID NO: 37866 - DNA, 2170 bp, Zea Mays
gtagccgatagggaagtattcgtgttcgtgtccgactccagtggacaaggcatggcggggagaggcggcggcggcaaaggcgccgcagggaggatgatgtcgctgcaggaattcgtgtcctgcatgcagccgctcatcgatctcgagaaggcggcggagatatcggcggagtccgagacgagcgctaagagcctggagaggagggggtgcgtcattgccaacctcaagtgcactgatgcccagacgggactgatggggaagacgctcctggagttccaacccaacaaaggcgacgttctcccgtctcacaagtttggaacacatgatgtggttgccctgaagccaaataaggcagatgctggatctgcttcacttggtcaaggtgtagtttatcgcttaaaggattcttccattactgttgcttttgatgatattcctgaagatggcttaaacagccctctgcgtcttgagaagcttgcaaatgaggtcacttatcgcaggatgaaggatgcactaattgaacttagcaaggctgtccaaacaggaccttgtgcaaaccttgttcctgttttatttggagagaaggcacccatgcgctccaaggatgctatgaaattcagtccattcaacaagaacttggatgattcacagaaagaggctatttcgaaggctcttggatcaagggatgttttcttgcttcacggacctcctggaactgggaaaacaacaactattattgagataatattgcaggaggtcaagcgtggatcaaagattcttgcctgtgctgcttccaatattgctgtggataatattgttgagcgacttgcacgatacagaacaaaattggtgaggttagggcaccctgctcgtttactgcctcaagtgctcgacagcgctcttgatgcacaggttttacgagctgataatagtagcttggcaggagacattcgcaaggaaatgaaggtgctcaatagcaaattgctgaaggctaaagataggaacactaaacgggacatcaggaaagagctcaaaacgcttgcaaaagaggagagaaaacgacagcagcttgcagtcactgatgtactgaaaaatgcagatgttgtgctgaccactctgactggtgcatcttcgaaaaagttaaacggaattacatttgatttggttgttattgatgaagctgcccaggcacttgaggtggcatgctggatagccttgttgaaagggccgagatgtattcttgctggagaccatcttcaacttcctccaacaattcaaagtgttgaggctgaaaagaaggggatgggaaagacactctttgaacgccttactgaagcttatggagaggaaatcacatccatgctcactgtgcagtacagaatgcacgagcacattatgagctggtcatctaaagaactttacaataataaggtgtgatatggaagaagtaaaagatgaagaggagagcaccatgaatgagggcgaggcagcagtatccattgctcatgccaagttgcttgttgagagtggcgttaatgcttctgatattggaataattacgccttacgctgcacaggtaacctgcttgaagatgatgagaaacaaagatgccaagttgaaagatttagagatatctacagttgatgggtttcaaggccgggagaaagaagccatcatcatttctatggtccggtctaactcaaagaaagaggtggggttcttgagcgatcacaggcggatgaacgtggcggtgacgcgagccaggaggcagtgctgcctggtgtgcgacgtggagaccgtgagcagcgacaggttcctgaaacgcttggtcgaatacttcgaggagaacggggagtacttgagtgcttcagaataccagagcagctgactggcgtcgatcagatccattcagctcttcttctagtggctcgtggtggcatctggctggcatgtccgtggagcaagtggataggatccgcatggagtcttggagaacacaatatcaagctttggttcctagatatctcagcttttcttttcttttctcttggtgaacgcataaatgatgtattgttgtgacgttgccaatgccatgggaatgagatctttaacaaaacaaaaaacaaaaaaacaagagggcagtggagaatgtgctgtggcatagtgtgtg

SEQ ID NO: 37867 - DNA, 475 bp, Zea Mays
gccacatcggaccttggcgggtcttggcacttctggctgcgagccaggccagcccagggcgcatggagcaagaagctagtccagcggtccttgaaggaggaagagaagctgcagcatatgcttgcgaacttaccttctggaatgcgcaagaatgattttgctaatcagcacgaacagagctcatcaaggatgctgcctcattttaactcttcttttactgaagctaatgaatgtgaactgaagattaaggatgaaccagttgcagctcctaggaagggaagagcacctgcacctcgttggtatatctcaaccgaggagcttgattcactctcatcgtacatgaggggaagactgactttggaaaaggttaatatcgcaataaatgaagtggcttcatatgcagatgccaatgctcatcttgttacatgccctaagaaaaagttgtcagaagatacatgggaaaaagctttggtaa

SEQ ID NO: 37868 - DNA, 973 bp, Zea Mays
cggaggcaaagtgtgcacagcattatctccacctcaccttttgctttccgttattatatatggacaatccgggcggaccaataaccctatgattcgacagtggagcacacccgagctatatatacatctggatatgcacacacagtgttctgatgcagtgttcaagggaccggaaggattagagggggcagaaggagcgagatgggttccaggaaagcacacggggttttggaggaagggagttggcggatgaaaaggatcacaaggagcattccactgcctcttctgaaaagggagcggcgacggctgcaggggtggcgacaaatgattatgggcgctacgatccggctccggcgttttccaagcctcgcttcaagtttatacccaactgactcactgtgctgcttggcttctttgtgccacacgaaggtctctaaaaagtatggttttgtcgatgtttaagaagggttttctcagtctacctgatgagaaggttgatgacttatgtgaattgaggagtgatgttgcatctgcatgctagctatatggatggtgaggtctaagaaagattttatcaacttgcgtgggaggttctagctagccgcaggttaagtttgtttaaaaaacatattaatagtatgtatattatgtacatagatgacatatgagaattgagacgtgatccttcatatatgcttactatatatatgcacatgtggcatgtagaaatagccgtgtactgcagagaatgtgtgtaacttgtgtagtatctggtgttgctgcccctacgtacaccctactgaacgtagtcggcttcggttcttcagttctggcgttggatctttgatccggatgccataaagttggttctttcttaacaacaacaagtctacttattttcaatatttatgaaccgtattgatcacaaaagtcaacatgtgaattgcatgcgctagcctcgaaactcttcggt

SEQ ID NO: 37869 - DNA, 1400 bp, Zea Mays
attaggcccatctgtcagttgacgtgcgcctttccgattacggaaagcgttggagctttctctgccaccagacgctcaggggcaccccgggcctacctgccagcgtcggtcagagacccgcctccgtctctgaatcggccgctgccgctaccgccgccggcggcgacgaccatgccccgcgccgctacgggtgcgatcactgcggcgttcctgcgcgcgcaggccccgcacatggcgccgctggcatcgcgcatcgcgcgcgcgttccccggcctcgccaccgccgccgcgacgcgcttcgctccctcctcgtccgcgtcctcgccgcggcttggcctcgtcccgcgcctccgatccgcgcgctccttctccggcgcccgtgcgtctcccgttagcggcgcggtttctggctcctcgacgtcggaggagggccagcagctgcagtcggagctcatcttcctgggcacgggcaccagcgagggcatcccgcgcgtcagctgcctcacgcaccccaccaagatttgccccgtttgcaccaaggcggctgagccagggaacccgaacaggaggcgcaacacctctatccttctgcgccacgccaccccgtctggcaccacaaacatcgttgttgatgccggcaagttcttctatcactcggcactccagtggttccccacgtttggtttgaggacaatcgatggtgtcattattacccattctcatgctgatgccattggagggcttgattgtcttcgtgattggacgaacaatgttcagtcatcgatcccaatttatgtggcagaacgtgattatgaggtgatgaagatgacccactattatctcatcgacacaagtgtagttatacctggagccgcagtttcagcattgcaatttaacattataaaagaggaaccatttatggttcacaatcttgagtgttgggttagaatgactgctagaagcaaacttgcaatacttgccagcatgtgaattttagtacctatcacggaactatcatttgttctttaagtgattcctttacctgtttggcacggtcagggttaccgctctcttggttttcgttttggtgatgtatgctatataagtgatgtcagtgatatacccgaagaaacatacaagcttctggaaaactgtgaacttcttataatggatgctctaagacctgatcgttcttcatcaacacacttcggactaccaagggctcttgaggaagttaggaaaatcaaaccaaagaaaacactgtttactggaatgatgcatttgatggaccatgagaaagtaaacagtgatcttgccaggctgattggaacagacggtcttgacatccagcttagctatgacggtctcaggatacctggaatagcgatggcagacctcag

SEQ ID NO: 37870 - DNA, 3506 bp, Zea Mays
ccccgcccctcgtgaaggcctccagtccacaccagccttcgtcccgtcctgccccccaccccatcctcgcctccggatctcgctccgccggccgcggccggacgaggcgcctgcgacccggtccgaccctccctccctccctccccctctcccgccgaccgcgcgtctgtcgggactcgggccggcttacttataccgctcgcattgccgggtgcctgctccatttgtccaccccactcgccgcgcgcgcggactccgtgccccgggcgggccactcgcagcttcgagctagctcggagcttctgagcacgaccacgaggaggagaggtacaggctactacagttctgggagatggcggccggcggggtggggcccgcgcagcaccaggcggcgaacggcgcctctggcagcgtcagcaacggtggcgccgccacgccgctgcacggctcggccgccgacggctacgacagcgacggctacagcttcgcgccccccacgccgtcaactttgtccatgtccatacctcctgagcttgctggagctattccgttaattgatcgatttcaggtcgagggctttctcaaagcaatgcaaaagcagattcattcagctggaaaacgtgggtttttttctaaaaagtctgttggaccacaagctcgtgagaagttcactttggaagatatgttgtgctttcaaaaggatcctattccaacttcattactgaagataagcagtgaccttgtaagccgctcaattaaattgttccatgtcatattgaagtacatgggcgtcgattcaccagcaataataactttggatgagagaatagaacttgttgcgaagctctacaagcatacgttgaagcgttctgaacttcgagatgaactctttgcccagatttcaaaacaaacacgtaacaatcctgataggggttggtcaataagagcttgggagcttatgtacctgtgtgcatcatccatgccaccaagcaaagatattggggcatacttgtctgagtatgttcactttgttgcccacggagccacaactgattctgatgttcgagttctagcactgaacacactgaatgcattaaaacgatcagtcaaggcaggtcctagggttacaattcctgcacgggaggaaatagaagctcttttgacaagccgaaagcttacaacaattgtttttttcttggacgaaacttttgaagaaatcacctatgacatggcaacaactgttgctgatgctgttgaggaacttgctagcattatcaaactttcagtgtattctagtttcagcctatttgaatgtcggaaggttgttaacggatcaaagtcttcagaggttggcaatgaggaatacattggattagatgataacaaatatattggtgacttgctatctgaattcagatcagctaaggatcgcaacaaaggagaaattcttcattgcaaacttgtattcaagaaacgtctcttccgcgagtcggatgaggctgtgactgatccaatgtttgttcagctatcatatgtccaggtactgaaggattgccagtttgtgtgttattcaagtaatcttggttcaaaaatagagctaacaagtaacattgttctgcagttgcaacatgattacattttgggaaactatcctgttggcagggatgatgcttcacaactctctgctctgcaaatcttggttgagattggattcatcgacaatcctgagtcctgcgtcgaatggatatcacttttagagagatttcttcctagacaagtggcgattaccagagcaaagcgagattgggagcttgacatcatttcacgctttcagttaatggaacatttatcaaaagacgatgcacggcaacaatttctcagaatcttaaggactcttccatatgggaactctgttttctttagtgtccgtaagattgatgatccaataggattgctacctggaaaaattattctgggaatcaacaaacgaggggttcactttttccgtccagttcccaaggaatatcttcattctgcagaattaagagacatcatgcaatttggtagcagcaatactgctgttttctttaaaatgcgagttgctggtgtccttcatatctttcaatttgaaacaaagcagggcgaggaaatatgtgtagcacttcaaacacatataaatgacgtcatgctccgcagatattcaaaagcacgctctgctaatagtgtgacatcgcaaaatgatgttaaccatgcatataagccaccaaatattgaaatgtatgagaagcatgtccaagaactgacaaaaacagttgaggaatctcagaagcaagcagatcagttgcgagaagatctacagttgaagacaaaacaagaaacagagatgcaagaagagttggaagggctaaaagacaccttgcaatccgaacgacaaagttccaaagaagtaaaaaatgagcttgataagctaaaatctctatgtgatgagaaagaatctgctttgcaggctgccctgatggaaaaaagtagacttgaaaccagattgacaagtagccagggccgtgagagagatactttgacaactgtaggcagcgtcaatagtgacattgagatgcttaccaagcttaaggaggatttgaaatcataccaaaaagagctcgatgcatcaaaacaggtctcgaagaagctcatgtcagaaaagaatcttcttgaccagaaggttcaaaggcttgaaagaatgaaaaatgaagagaaaagcacaatggaaaaggtttatgcggatgaatgccgtaaactgaaatctcagattgctgaattggagcagaaattggaagatgcaacacaatccttaaatgtggctgaatcaaatcttgctgtaagaaatgctgaagttgatagcttgcaaaatagtctgaaagaccttgatgaactaagagagttcaaagcggatgttgaccgaaagaatcaacaaactgctgagattcttaaaaggcaaggggcacaattggtggaacttgagaatctttataagcaagaacaagttctgcgaaaacgttactataatacaattgaagatatgaaaggaaaaataagagttttttgtcgcttgcgccctctaagcgacaaggaactttcttttgaggagaaaaatatagtttgcagtcctgatgaatttacaattgcacatccatggaaagatgagaagtcgaagcaacatatatatgatcgtgtttttgatgcaaacacaagtcaagaagaaatatttgaggatactaagtacctggtacaatcagctgttgatggatataacgtttgcatatttgcatatggtcaaactggttctggaaagactttcactatttatggttcagataacaatcctggtcttactccaagggccacatctgaactttttagggtgataaagcgcgatgggaacaaatattcattttcattgaagatcctaagtatgccttcgatattatccttaaattgcattttataag

SEQ ID NO: 37871 - DNA, 1181 bp, Zea Mays
gccaggtgggcctggttgggtacaacccaacgacaacgagaagcggaggccggaggccaccgccagatcccgcataaaccatctgctctaccctccttcgcgcggccggcctgattcctcacccctgctcgccgcgaagcacagctctgtcaccgcggtttgccgtggccggcgaagatgatgtccggcggtgggtactccgccctcgacgaccccaaggcctccggatccgtcccggcggccacggggacagatccgccggccatcaggttcgccgactccaacctccagaccttcccgccgtccgaggccaggggcaagatctccggcgcctaccgcccgcccaccgacgccgatgacaccttctcgtccaagggcggaggagccggaagcggtggcagaggcggcagcgccgggttggatgatgccgcgcagggcggctggttccgcatgttctccgtggcagcgtacaagccctacttcgacgttgacacctctgacgttgtcgagagaatctgggagtccgtcttccccttccgcggcacatttaccgagaagacctccgagaaccctgacctgtatgggccattttggacatgcaccaccctgattttcgttgctgcatctattgccacttttgtcacctacctatctcacaaatggcacaagaaggaatggaactatgatatcaacttggttacctggtctgctggcttattctatggctacgtaacctttgttcctcttcttctatatgttattctcaagtacttctcagctcctgctggtctagtgcaattgtggtgcctatacggatactccctgttcatcttcattccagcatcgaaatattcagatgggtgattgctggtgttgctggtttcatgtctgctactttcgttgctgtaaatctccgtgcgcacattgtaaactctggcgagcgatggttcctgatcgttgcagggatattcctgttgcagctggggcttgctgttttgctgaaactctatttcttcacgataactgtatagggttatttacatctgtgcttgtactagtcaggaaaacacacaattttccatgtggagtcacctccatgttcattggacatcgatgtaatttcatcgggtatacaacgtgttgagcaccatttgcggtactgagcacggctggatggtacg

SEQ ID NO: 37872 - DNA, 1492 bp, Zea Mays
aagtagcattatcgccaatcagtaagtaggctccaagagcaccgtccgtcaccacacaacaaagttagcaagtagcagtgaccacctgatccaaaagcaacaagtaggatcatggacgtggggaggcgcctttcgctggcccgcgtgccagcagtggccgcgctgatggttatgctgtcgctgagttcgtccttctgcgtgtcgtcgtcggcggcgagggcggtcgccaggcctggcgccgcggagcagctgcagcggcaccccgtggtgctgatcccgggagcgggcggcaaccagctggaggcgcggctgacggagggctacgagccgtccagcctggtgtgccgggtgtggccactcgtgcgcggccgcggtggctggttccgcctctggttcgacccctccgtgcttgtcgcgccgctcaccaggtgcttcgccgagcggatgacgctctcctatgacgccgacgccgacgactaccgcaacgcgcccggcgtcgagaccagggtctccgacttcggctccacctccaccctccgcggaggacctcgaccccaatctcaagtacccaaagcaaccatttccattcgctcagcttattatatatgctacggctcctcacggggtacatgaacactctggcgagcacgctggaggaggccggctacgaggaaggccgcgacctgttcggcgcgccgtacgacttccggtacgggctggccgggccggggcacccgtcgcagcggaccgccgagagcaacctctggctgctgccgacgcccagcgtgttcggcaacaccacgctggtgctgtcgcgggcccacaaccgctcctactccgccaagaacatgacgcagttcctccgggacatcggcttcgaggaaggcgtggagccgtaccgcgcgcggatacggccgctcgtcgaggccctgccggagcccggcgtgcccctgacgtgcctcgtgggcaccggcgtcgacacggtggagagcctcgtgtacggcgaccgcggcttcgacgaggcccccgagaaggtggtctatggcgacggcgacgggacggtgaacctggccagcctcataggcccgatcaaggcgtggtcggactcgccggcgcaggtcgtcgaggtggtggagctgcccaaggtgtcgcattccggcatgctcagcgacaagagcgcgctggagcagatcataaggatcatcgattctatcaacctgaacgccacgagctatcatcattcctcttagaatgttttgctttagtagacaactaacgatgatttcttttcacttaaatcggcgacagcagctagttttttttatttggaaaaaagtttattgttttttctgtaaggattatcgggatttgctttagctggtgcctattagagttctctatgtatttcttaatcgttatgaataaatttttttgggaaaaagtacatttaaccagggttttaaagtagttatccaaatatactattctagat

SEQ ID NO: 37873 - DNA, 7469 bp, Zea Mays
cacaaacccaggagatagcaccccgcgctcgcgctcgcgcccgcgccacgacgcgagagcgcgcgaggcgtggagccctaaatcccggaagcttccgaggccgctcgccgggggcgggagagggagctcgccgccggtgacggagccctcgccgccgtagatctcccgatctgagacgccgcttctcaattccctacaggtttttcggtgccggcgacggagatgactgtggagagccccggggagctaggcttctgaagcgcaccgtggggcacagcttggcggacgacggcccccgacagccaactaggttttccatgggagatgggggtgtcgcgtgcgccgtccgcgcagtcgagggcttccatgccggcgccctcgtgaggagaggaggagcgggagaagcgatgccggataagggggagaaggctcatggacaccaccaccagcagcagcactggaagaaccagcagtcagcgtcagctactgacctggaggagggggagctgctcagtggggaggcggagaccaatgggttgcctgagaggagcatgccacctaagaagtggaggaaggtgctggcagcctccgcagctgctgtggaggtggagcctggggagattgtgagtacgaagcaagcagtgccattgaagaaagcaaggagaaatggggaggttgacaaggtagagctgctgccggagaggcagaggaaggtaaaatcttctgggaagagcaccaggaagtctatcaaggatgacatggagccaggggagattgcaccgccagaaaaaaggcgagatgccaagtcccaacgggctgatgataacagcaggaggccaagttcatctgcccagaaaagctccttgcgggattctgatgaagagcctggtgaaattaagccagagagcagcaccagtggcagtctaaggaagaaccagccaacagagccccacagcattaaccacaagcaccacactgacacctctgaccagtcaggatcaaaaagtcataggaagggtccgaagggagaagggaagagatctgctgccaggcatttgtctgggagaaaccgtgagatatcatcaccaacacgggatcggcgtgatcggcacgagaggagcccaggcatcttgggtcgttttcctcatgagcgctctcgtcatgacaggtatgacaggagcccgagccgcttagagcgttccccacatcgagagcgtgctcgccactacgaaagcagagaccacagcccatatgtttcacctcgacatagagctcgtcagccccatttcagggataacacgccaagtcgtgttgataatttccctcgtgggagagtccagcgtgaggatgtcagagaccgtagcccatttcttcacgacagatcgccttctgaacgttttcggcctactgatactcatgaagcaagcaagaagagcagaagtggcaacaactcagaaaagtcacagcacaaaagcaaatcagcgaagcaatcttcaaagaccaagagtggtagcaatgagaagaatgagaaaatctccaatgaaaagcccactgaaagcagtaagtacactgaactgccaccgccacctccactaccgctgccaccaccgccgcctccaccacctccacctccacctctgccacctgctgtaccgcctcccctgcctccaccaccagaacctgagccaactggagttctagccgaagatatgatagaagacatggatatctgtgacaccccacctcacactagtgcagcacctgaacccacggatccaatttatgatatagggaggtggttttaccttgatcacttcggtatcgagcaaggaccttccaagcttgctgtattgaagaagctggtggaagatggatatcttctttctgaccatttgataaaacatgctgatagcaaccgatgggtgactgtagagaatgcagcttcaccactggtgccatctgatttcccctctttttattcggacacttcaacacagatggttaacccaccagaagcaccaggaaatttgctcgatgaagctctagaggaggcttctaacttggcatcaggttctgaggataaacaaatggtggaagcttctgcagaagatagtgaagaattctatattaatgatagggttgaagcactgatggatggatcaattttggtgcatggccaggagctcgagatcattggagagcttttaggtgcagattttcagcctgctgattggcaaagattgagtcaccctgaagattttactaggttccatgtgcacatcgaaggagacgatgaaatcattggaggcacagaattcttagaaaatagaacaacagatgcttatggccttgtttctgtggacaacttccatcattatgtcgagtctagcgaatggttttctgggagatggtcttgcaaaggtggtgactggaggagaaatgacgaattgggccaagatactccattcaggaaaaaacttgttctcaatgaagggtatcctctatgtcagataccaaaaggtagctatgaggatccacgccggccctgcaaggatgagttgtactaccctgtacgtggtaaaaagcatgacttgccattgtgggcattctcatcgacagaagaagatattgacggtgttaatgacaccactaaaaacactgttgtgcctgggaggccaggtcagaccagacagcctcctagcgaagtgaaggtgatgcttcaagtggttagtataaattatcatgttattaaagaccaatcatctgtcgaaccccgtacaaaacccagaggaactgatcgaccaccgtcgagatcttcacgctcccattcaattggggctgagagaagttctatccatgatggttcgtcgcatttcaggaagcaccatgaccatgattcacaaagttttcacaagtccaagtctgttccaaacattccgaaggaccatgtatgcactgttgatgagctgtcagttaatcggggtgactggtactaccttgatggcactgggcatgatcaaggcccattttcttattccgaattgcaagaattagttaaaaaggacactatcattgaacaaagtagcgtgttccgtaagatcgataacacatggtttccagttcttaaggatttaaaacctggaagctctgttcccagtgcagcaccaagctcaaacttaattgctgcttttacgcacccagaccaatataattttggtgtgaaccaaggatcaagtagcttccatgagttacacccccagttcgcgggttatacacgtggcaaattacatgaactagtcatgaaatatttcaagagcagggaacttactttagctataaatgaggtcttggatccatggatttcagcaaagcaaccaaaaaaagagtttgaagcatacttttctcacaattcagcatctaggaatttcctgccagaagatggtgggtctgcaaaaagggcaagattgctacctgaccagagtgacgaaaatattcatttgtcagaagacattattgctagtcggaaggaggacatctgttttgaagagttatgtgatggagcatcgtctgttgataatgattctgtgaatcccagagcaggaaatgcaagctggggtctactaaatgaccatctgttagcaagaatctttcattttatgagggcagatttgaaatcacttatttcttctgcagctacctgtaagagctggaatgctgctgcgaagtattacagaaacatgtgtagattcattgatctgtcttctgttggtcctctttgcactgattcagtgttttgtgatattatggctggctttgagaagcaaaatattaggactcttattttagctggttgttcgaaccttagttcacatgcccttggcagagtacttgaacaccttccacaaatatcttatgttcatattcaaggttgcagtcatctaggggatctgaaaaataaatttcagcatgtaaaatggatcaggagctcattgaatccagaggggtcatatcggaaaatgaaaaccttgaagcagataggtgatgggaacaactatgcatccaaagttgcaaggaacttcgaccagctagatgattctgatgagcttgatggttattttgctgatatttcaaaaatcgagggtgctagccttttttcatttggacaaggtttctataaacgatcgaaattgcttgatgctagaaagtcctccgcggttttgtcgagggatgcagaaatgaggcgtttgatgcagagacaggcagagaacagttacaggaagatggaagagtttgtcataaacaggctgagagaaattatgaggtgtaacagatttgattttttcattccaaaggtttccaagatcgaaggtaggttgaaaaatgggtattatgctcgccatggttttcgtaccatcaagcatgacatccgtaccatgtgccaagatgcattgagatataaagatggcaatgatttggatgatgtaaagcaaattgttgtctccttcatacaactagcaaagagactagggaacccaaggtacatttctgagagaaacggagcagcagcccaggacagcctggacattagtcaatattcattcgatactaaactcaaaaagaagcaaaacaaaacaagagcaaatttggtggctgctggagcagataattcatctcgcgcatttgaccttgaaatcaaaagaagcctgtctaaattaaagaaaaaggatgtctgctctggtagtgaaacatctgatgatgatggctactctgaaggtgatgaaactgagagtgaaactactgtttctgatactgagagtgactttgatgtaaattctggagcctgggatttaaaaggaaattgcctaaagttaactgaacatggggagtctgtgatcgatgatcgtatattaggtgcccgcatgacaaaggccagccttgttcctccagttactaggaagtatgaagttattgaggagtaccttattgtagcagatgtggaggaagtacaacgaaaaatgagagtttctttacctgatgactattctgagaagttgctttcacagaagaatggcaccgaaaatttggagcttccagaggttaaggattatcaaccccgaaaagtagcaggggatgaaattcttgagcaagaagtatatggcatagatccatatacacacaatctactgagtgacattatgccttctgatcttgagttgtcacctactgacaagcatatctttattgaggagttgcttctgaatgcattgaataagcaagttaggcatttcactggtttgggaaatacccctatgacttacaacattaggcctgtcattgaagaaattcaaaggtctgcggaggatagtggtgacagacgaactttgaagatgtgcttggggatgctaaagtccatgagaaatcgctctgatcagaactttgttgcttatagaaagggtcttggtgttgtttgcaacaaaaaaggtggatttggtgtagatgactttgttgttgaattctttggggaggtctacccttcttggagatggtatgaaaagcaagatggtattaaacatatacaaaataacagtgaagatcaagctcctgagttttacaacattatgttagaaaggccaaagggagaccgacatggatatgacttggtttttgttgatgcgatgcacaaggccaactacgcgagtagaatctgccactcctgcaaccctaactgcgaagcaaaattggagtttacacacttcgaccaattgcagaaggcgaggaaatcacttttgattacaattctgtaactgagagcaaagaagaacatgaagcatcagtctgcctctgtggaagtcaagtatgccgcggcagctatttgaatttttctggtgaaggagcctttgagaaggtattaatggaatttcatggtgtgctcgataggcatagcctactgctacaggcttgtgaaacagactctgtctcccagcaagacttgattgacttgggtagagctggtcttggtacctgtttgcttgctggtttgcctgtatggcttgttgcttacacagctcacctggtacggtttatataccttgagaggcagaagctccctgatgagatcttaaggcacaatgtggatgagaagcgacagttccttatagaaataaacatggattctgagaagaatgatgctgaggttcaggcagagggagtactaaattcaagattacagcaaatagtgcatacacttgacaaggtgagatatgttatgagatgcatatttggagacccaaagaatgctcctcctcctatggtaaggttgtctgggaaaagtttggtctctgccatctggaaaggggacagttcgatagttgctgaacttcttcagtcgatggaacctcatgttgaagaagaggtacttagtgatctgaaggccaaaatctgtgctcatgacccatcagattctgaagatattgagggaggcatccgtaattctctcttgtggctgcgtgatgaattacgaactcttccatgcacttacaagtgccgtcatgatgctgctgcagatttgatccatttgtatgcttatacaaagtgctttttccgagtccgggattacaagacagtaaaatctccaccagttcatatcagtccgcttgacttaggccccaaatatgccgataaactgggaccaggctttcaggagtactgcaagacatacccagaaaattactgcttagcccagcttatctattggtatagccagaattcagaacctgaatctagattgacaagagctagaaaaggttgcatgtcattgcccgatgtctcgtccttctatgtgaagtctctaaaaccattgcaagagcgagtttatgggaacagaactgtgagattcatgttatcacgcatggaaaaacaggcacagagaccatggccaaaggataggatatgggtgttcaagagtgatccgagatactttggcagtccaatgatggatgccgtgttgaataattccccccttgacaaggagatggtgcattggctcaagacgagaccaaacgttttcctaggctagaaaaaaaatgattgtaggcagataagatggtatttggttgtttctcccttttggagattttagtctgcaggattttttttttccaggctcacaccttggctacctgatcacagggagtttagcttatagatagcagggtaacagtcaccaccccccatctgtacattccccagtccctacataccttgcggagatgtatctggttagtaaatgatagatttgtcattgatttaatgtagtgaattttcccataggaatgcccccccccctcttttgtttcatgtaaatgcagaacaatttcaatcttgaattcagtaatgtgttacaggcattttgcatttctatggttcagttgggttgtttcagtcaataaaatggttttaagggctcaata

SEQ ID NO: 37874 - DNA, 235 bp, Zea Mays
cagcatttcaccgaaaatagggtgagtgatgcgtcgaatcgcgcttcttctttgtccacatcgagaattttccggccacgtactgatttatttccttctgcgcctaatcttttcagagcttggcgtagactaggataacgatcgatgacttgttcgagcttttgtcgagcacttggtgaatatcaccctgctagcttcgtcttcacctgattcttgggatttcttggggatgcac

SEQ ID NO: 37875 - DNA, 3251 bp, Zea Mays
gtcgatcgagcactccacgcccctctagtaccctcctctgcacctccctctctctctcctctctactgcctttgtttttgctcgcaagaaaaacccgaaaaagaccttgcgcaaatccgtcgtcctgtccaccgacgaagcttctgagtcctcctcgccgcgcgcctctacgcgtgatatcggtcttttcccctgaatggtgatgtggaggtcattctcttcaattcaaatggtccccccccgcagagcaagatgaggaaatgttcaaaatactcttaagccgtgtagcacgacaagtttgttgcagaggacaagcgacgactgggttttcttggcactttgtcaagtccgtgagtagaagtttggtgtaagcttgtcttcgaacaagatgatgcagaggccaccgctccgtccggaggagtactccttgaaggaaaccacacctcaccttggtggtgcagctgctggtgacaagctcacaaccacatatgacctggttgagcagatgcagtacctttatgtaagagtggtaaaagcaaaggaacttccgaacaaggacatcactgggagttgtgatccttatgttgaggtgaaactaggaaattataagggccaaactgggcatttcgagaagaagaacaacccggagtggaatcaggtctttgcctttgcaaaggagcgcatccagtcatcagttgtggagattctggtcaaggacaaggatcttgtcaaggatgacttcattggacgtgttatatttgatttgaatgaggtcccaaagagagtgccacctgatagcccattggctccacaatggtatcggttggaagaccgcaatgggcacaaggtgaagggggagttgatgctggctgtttggatgggtactcaagctgatgaagcgttccctgaagcatggcattctgatgcagcctccgtccctggtgatggccttgcaagcattaggtcgaaagtgtatctaactccaaagctttggtatctccgtgtaaatgtcattgaagcccaggatcttataccaaatgacaagactaggttccctgaagtttatgtcaaagcaatgctaggcaaccaagtccaaagaaccagggcattggcaagccggactttgaatccattgtggaatgaggacttgatgtttgttgcagctgagccatttgaagagcacctagttttgagtgtagaggacagggtggccccaggaaaggatgaagtaattggaaggacaatcattgcactgcagcatgtaccccggaggctggatcacaggttgctaaccagccagtggtataaccttgagaagcatgtgattattgatggtgagcagaagaaagagaccaagttttcaagccggatccacttgagaatatgtcttgaaggtggatatcatgtcttggatgagtcaacacattacagtagtgatttaaggccaactgcaaagcccctgtggaaacctagcattggcattcttgaactgggtatattgacagcacagggcctgttgccaatgaagaccaaggatgggcgtggcacaactgatgcatattgtgttgcaaagtacggacaaaaatgggtgcgtaccaggactataatcgacagtttcactcccaaatggaatgaacagtacacctgggaggtgtatgatccatgcactgtggtcacaattggtgtattcgacaattgccacctgaatggcggggaaaaggccaatggtgcgagggacaccagaattgggaaggtccgcatccgcctctcgacactcgaaactgatcgggtgtatacccactcataccctcttattgttctgacacctggtggtgttaagaagatgggtgaggtgcagctcgctgtccgtttcacgtgttcatcactgctgaacatgatgcatctgtactcacagcccttgctgcccaagatgcactatgtgcacccgctgtctgtgatacaggtggacaacctgaggcgccaagccacaagcattgtctccacaaggctgggccgtgcagagccaccgctgcggaaggaaatcgtggaatacatgcttgacgtggactcgcacatgtggagcatgagaaagagcaaggcaaatttcttccgtatcacgggtgtcctgagccccctgtttgccgtggcgaggtggttcgatcagatctgtcactggaagaacccgctgaccaccgtactgatccatgtggcggccgaggcagccaccgcacatggacacccgcctctcccacgcagagaccgcccacccggacgagcttgacgaggagttcgacaccttccccacctcccgcccaccggacttggtgcggatgcggtatgacaagctgcgcagcgtcgccgggaggatccagaccgtggtcggcgaccttgccacgcaaggcgagcggctgcagtcgctgctgagctggagggacccaagggcgaccgcgctgttcgtggtcttctgcttcgtcgccgccatcgtcctgtatgtcactccgttccgcgtcgtggtcttcctcgcaggcctgtacgtgctgaggcaccccaggttccgccacaagatgccatctgtcccgctcaacttcttcaggcgtctgccggcgaggaccgacagcatgctgtaggcgcggcaggtgcatggccccatcgctggcgggtggtttcgcctctcagttgcagctcacagatggttgttgctctctcttaagtaagtgtatcaaaaaaaaaaaggggctgctagctatcttcgtttactttttgagcttctctgtgttgcatggttggttatgtattcatatggttgtgaacctttcctgtaacaactggacgcatgatgcgtgactgtgtctaggtatgcatgcatgtgtgtgatgcttgaaaactccgagctttagtgtttattgctttacctacttgttcagcggcagtgctgtcagctaacaaggctctctactgctgcatgtgcatcgtgtttggtttgcagctcaatttaccgacttgccagttgtaattgggaaatactgatctgaattttgcctagccgagagcccgagagttctcttctacgcagactggaactatttgggtgccaatctgagcagaggcgagctgttgtacttgtgaacttaatagtgatgtcatggttgaatttccttccaaacggagctgatgcttgtcttcaaaacgctcatggttagggatgtaataaatggcacggatattatctatttgtatttatatccgttcat

SEQ ID NO: 37876 - DNA, 874 bp, Zea Mays
gatagcgagcagggggtgagggagcgaacagagtggttgtcccctcattcgagatgtaaagtcggccctctccttacctcaatgtactgctcctctgataatcaatgtagttgctgctgtcagttctggaaacgtgccgttgaatgatgttcagttgctgtgggttaacctaattatggatactttgggtgcccttgcattggcgacagaaccacctacaaaccatcttatggagagacccccagtagggagaagggagccattgattataaatatcatgtggagaaacttaattatcatggctttgtttcaagtttcatttctcctcactctcaacttcaagggaataagcctcctgcagttgaaaaatgatgatccagcacatgcagataaagtgaaaaataccttcatattcaacacatttgttttctgccaggtgttcaacgaattcaattcgtgtaaaccagatgagctgaatgtattcaagggcatttcagagaaccatctgtttattggcatcatagctataacagttgtactccagtttggtccactgtctcatcatccatcgaatcacggccgaggcacacaatctaaaaggcaaaagaattatagaggcagagctggacatagtcttcagttgaatttaaggttcctcttcccttgtttggaagaggttatgatcattaggatggtcatcagaatctcaaagatcaagaattgccataaaggtgctgatgagttctttgatgatatatgtaatttcaattacatgaactataagaaagtgcaaattgaataagtagagatgatataatattacatatttatatcatcaaaataatattaatattacgatgatattttatcacaa

SEQ ID NO: 37877 - DNA, 2444 bp, Zea Mays
cgtcgcccggccacgctactccgccgcgacctccgccccgccgccgccgcgtctccgccgccccagtccgccggctccgcgatagaacatcaagtacgtaaaaagtgctcacctctactggagagtgctctgctgcctggtggaagtgattcgactctgcatgaatggaaggctgttccagatatttggaggacagcagcagaaaaatatgctgacctcgtagctgtggtagatccttaccatgaaccgccaacggaatggacgtatacacagcttgagcaagaaatattggatttttctcaaggtctaagggccattggtgttgctccggatgaaaagctagcactttttgctgataactcatgtcgttggctagttgcagatcaaggaatcatggcaaccggtgctataaatgttgttaggggaacaagatcatctgatgaagaattgtttcaaatatacactcattcagaaagcattgcacttgttgtggacagtcctcaattctttaaccggcttgcagagtctttcatgtcaaggattaatacaagattcattgttcttctttggggtgacaaatcatgcatagatagccaagctattaaggatataccactttatggatacaaggatatcatcgaacttggtcgagaaagccgcaatgcactgtttctttccgacgagcaaggtcagcaagatgtctttgaatctattagtcctgaagatgtggccacactaatatatactagtggaacaagtggcacaccaaaaggcgtaatgcttacccaccgaaatctcttgcatcagataaataatctgtgggagattgtaccagcagaacctggtgataggttcctaagcatgcttccaacatggcatgcatatgagcgtgcttgtgagtacttcatcttctcgtatggtatccagcaagtttacactactgttaagtacctgaagattctagtatacaagaaaattcattcagcaatcgggatttcaaaggctggtattagtggcggtggaagtcttccgatgcatgttgataagttttttgaggccattggcattaaagtacaaaacggctatggccttactgagacttctcctgttgttgctgctagacgaccattctgtaatgttcttgggacagttggtcacccaataaagcatactgaaatcaagatttttgacattgagactggtgaggtccttccagatggttcaaaggggattgtgaaaattaaaggaccacaagtaatgaagggatactataagaacccatcggctacaaatgaagcttttgatcaagagggttggttcagcactggagatgtaggttggatagtacctcatcatgccatggggccaagtcgccagtgtggagggatgattgttcttgaagggcgtgcaaaggatacaatagtcctatctacaggtgaaaatgttgaacctgctgagatcgaggaagcagccagcaggagtaccttgattaatcagatagttgtgatcgggcaggatcaacggcgtcttggtgccataattgttcccaacaatgatgaagttctggcagaagcaaaaaggaagtccatccttggtgaggatggcgagctagcgaaagataaggtcatgaacatgctatatgatgaattgagaacctggacagcgcactgctccttccgtgtcgggccaattctggttgtcgacgaaccattcacgattgacaatggtctgatgacacccaccatgaaaataaggagggacaaagtgacagacaagtacaggagggagatcgaagccttgttcaagtgacacgcggagcgcgtgcgcacccatcagagttcccttttccgagtacaagacggcaaccgtacggcgtacatacagacacctgcaagctgcaatgcgtccatgtaccatgtatacgtacgtacttgcgtacggtcggaagatgactgggttggaactggaagagatgatatggcggagcggccggtgggagaacaccatgagacttgttactagactcgaatgttcgtaggttgcatgagcaaaatgacatgtgttccacaattgcatcattcaataagcgattcactgagccagataaggtcttgttcggttagttctcaatccatatatatggattgagtgagtttaaatcccaaacaagtcaaacttcttcttaatttttttcaatctcatccaatccatatgtaatgacaataaccgaacaaggcatgaatcaataaaattctcccaaaccaccgcaggtaccatgcaattggtaaaaatatcatgcttctatcttatagatatctgaaaccaactttacagttttcttaataccataagaatatttgtctgatagaaacatggaaaaaatacagacagctatgtacaactcttgttacattgaaatcatcgagacgttcgataagaggagg

SEQ ID NO: 37878 - DNA, 2045 bp, Zea Mays
gttagttattcatcttcaggttgattctgtacctaactgatatatgtctgtgtgttttcagaaacccctcatatgcaaaagcttaatactgtcaaggctgctacagtggtcataggttagaataaatccatggtaaacttgaacccctacaaactaaagaaaatgccagaatagagaaagtttaagcctagagataagtgagtcaaatccataaaattggcaagtcaaatcatcagtatgaaatgtaccaaggcatattgggtgtagaactatcaaaggtacctaatatgttttgtgtaagtataaaagaaattctggtagaggataacaagaaacatcaagcattgaggccaaggatgaactaatatgatgggcatctattttaagaagctcgattttcagacatcaactatcagttctaggatacagaagactctgaaaggccgcaagaaggtatcaacgacatatctgataactaaatatatgcaccaactgtaggaaaatagtaaaggaaggccctaaatgcccaaaattggccacaatatttcaccgtcaggtctacctactctgttatagtactgtccacactcaacagccgatctttgactgctttagttgcccctcctgttagtttaacaattctgttgagtgttgactccttccatgaattggtcacctagaaaaggtagtaaacatgtgaatgagtgggttgaagaggatgataattacctcaattatatttctgctttcataacttagtttactactttgtattaggtcaactttcagcctctgttaacaacacaattgaccaagagcggggatgagtagaagaggatgatcctggtgtgtatattactgttcgagcattgcatggtagcatcagagaactacgtaacgacgaggctgagcgacaattccagtgtcccaatgtgtgacccgagttcaactcctctttcgtcgacctcgagatcccaggtactatgacacacagctaccttctcgcaacgtgatgtgggatgaattttgacctgtaggttgaataagtgaagtggatgagtcagaaagtggaggagacagtgtgcaggagcagcctgtttatgtggccgtagtggatctcgcatcctgtttgtgagcttggtattcctcctgaaaacatcactgcaaaccaattgttatttggcacattgggggagtacgccggatttgatcccacagagcccacttcacgcagtgggggtaaagcaaaagcagtgcagcaaataaaacaggctcggcaacctggcggagcagactgtgtgccgccagagctagcggagggaggcgggtcattcgatttgccatgcttaggattggagaatcactagagtaatagtatatacatggtggggagtgaaaccaacagaggaagaatccgttcttgatcaaaattagtcggctgcttggttcgtcgtctgcgtgttcgatcggaggttggcgacgccttggcgtggccgctttccgcaagaaagcaaggaaattgtgctgaccgccgctaatgcgctggatatttctgggagtggaaacgaaagtgtactctgaatttcaagttcctgtcaaaagtaagatcctctgacgaagaagatggtatcatttgtcaagtgtatgttgggacttgatgctgttgtttgggacattattgggtcgtcattgttggagaaagttgtgtatctacttacagaattggatgttaatataacatgggaagatattcttcaagataaacacaacaaaggtatatttgacatggagcttgaggatttggctgaggatgaacataaccttggccgcacaagtgtggagacttgaattcatatatacttagttaggctcaatgttagcataaacagttgatgaacaagttttcccattagtattttagtttgaatttagagtacaattatgtatgagttatttgacaatgcttatttatgagatattgaatgatatttatctatattgtattaattatagtgttattaaatatatgtgtttgtatttttctc

SEQ ID NO: 37879 - DNA, 1764 bp, Zea Mays
ggactttggcagccattcaatgacccaccagacgctcatcgcttgcacccacgctgtcgttgccgccgctgccttttcccctgcctcccactccctccacgcctccttgcctctccttttcacccgttcctcgtctccctcctgcggtcctgccccccctcccctgcagccgctccctccatggcgtccttcgtcgtgcaccaccacggttcgccgggagggcaaggtcaagatgtccgccctggccctgaggagtagcctcaggccgtgcgaggccgccgaggaggtcggggccgggcaggcgtggtgcagaggcgcggacatgggcatcgccgcctttgccgatgagttctccgtggaggacttgctggacctcgaggacctctgcgaagttgacaaggactgcgccgagctgggcgacacggtgccggcggcggagtctgtgcaggaagaggacaaggtgtccagtgactcccacgggtcgtcggtgctgtcctacgagctcatgacgctcccggttccgcacccgatgattgacctcccgttgccggcccatgacgccgaggagctggagtgggtgtcccgtatcatggacgactcgctcgccgagctcccgccgccaccgaagctacccgcggcgccgttgggagctgcgcggcggccgctggaaggcgcagtggcaggccctatgcggagcccgaccacgaccatatgcgcgctgtcgacggaggcgctagtgccggtgatgagggcgaagcgcagcaagcgctcgcgtggctccgtgtggtcgctgtccggcggagcgcccctgtcggagtcgacatcgtcgtcttccacggccaccacgtcgtcctgctcctcgtccgcctctttctcgccgctgttactccttccggcggacccgtccctcgtcctgtcctcgcacctcctcgacgagacgccgcggcccaagaagaagtccaagcacgggaagcatggcaagagcggcaagcccaagaagcgcggccgcaagccgaagcaccaccccaagccgccccagttctcgggcggcgccgcctacgcgccggcccagggcgaccggcgctgcagccattgcggcgtgcagaagacgccgcagtggcgcgcgggccccgagggcgccaagacgctgtgcaacgcgtgcggggtccgttacaagtccgggcggctgctcccggagtaccgtccggcttgcagccccaccttcgtgagcagcatacactccaactcccaccgcaaggtgctggagatgcgccgcaagaaggatggcgaccttggccagctcccgctcccagtcccggccgcgcttctgcttgggccggccgtcgagtcgttctagccggcgctgtacattttttcgtccgcgggtggagctgtttaacctgctgtaccgtacttggtttttttttctttctcttccacttctatatttagtagttgtgctgtactatttagctagagctctgaattgtagaagctttattaggtcgagttaggtagtagagattaagatttccatggttgattaggattgttagggtatgtatggccatagtacttgtggtagtagttaagaacttggtgaggtgtttggcctgacctacgaggaatgatgttgtcatgtcgaggcgctgctggcaccagtgacaagaaagttaggcgtgccttggcgcggaacatggaactgtctgccttgttgtaatcgagagtgtcaggcgagtaagaaagtgattgtttgcattgcca

SEQ ID NO: 37880 - DNA, 1187 bp, Zea Mays
cacacatacacctgaaacctagtacctattttacatttaacctcttccatataaaactgttggatatatattgaatgctttggattgtttgattgcacgctggcaccaaatgagtgattgcacgggatatatcaccacttatgtaatgtaacagtgcaagtttgcatccaaattctttatgataatgttgacaatatttggtgataggtgtatttatgccctacatatttgctgtcatgatacaggttcatcttgcatcgactgagccagacatttccgaatatgccgattttcgcattagtggattggaacccagcagggcttgctatactgtgcacttacaaatacggaagcatatcaatgggcctagagtcatacagatatgcttgcaacgtgaaatggctcggggtgagaggaggtgatctgcatcttatccccgaggacgcgtttcaagagctgaagccacgtgatctgcagattgccaaaagcttgatgtcgtcaaagttcctgcaggagagtcacagagctgagctggcgctgatggtggagaggggcaagcgtgcagacatcgaagccctctactcccacgggttcgatttcttggggaagtacatcgcgagaaagatcgtgcagggcgattacatctgacgattggccgctggaatgttagcatggttgcacggaacaatgagctgcatggactgtagtacagtagctatgtccaactgcctgtagactgaaacgatgtggcggtgcccggtgtatggtccggcactccggccgatgcagcctgtggatggcaggaccgggaatggatgcagggtgtagggtgtcagtatactacgcaccttgccggcgatcacctccgccatgcctaacctttgccctggcttcatcttcgccgttgcagcctgcttgaggtttgagaggtttcactgcaagtgcagccgtgcaggtacacctgagcgaagatcttgggcactcagcactctggtgtgccccatcggggcaatgtgcgtgagcttcctcaagaacccccgcccaggcggcgaagaaggcaggcacgactggatactgtcttctggccggggtcacgatctgtcatgcaggcacaggcaccggcaccctagggatagcgaccagcagcagctcagagcgtgggggcatggtgatcccagccgcctccg

SEQ ID NO: 37881 - DNA, 1524 bp, Zea Mays
cactcgtccccttcctccccttccgtctcgcaacaggcgaggcgagagaactcgtcgtcgaagcgaaatatagccagcgcaccaatcccaattcccaacccgacgcaacgcaacgcaacgcacctcatcccggttgcttgcgccaacgtaggggatcgcccggccccgccccgctccgcttcgcgcccctccttcctgcctgccgtaaccgcgccgtgcaactgtgcaagtaggttgttgagtctagataccagatgatggacctgtccacgacttcagtgctggcagctaaagcttacaaatacaaagcagaatcacttgttaaggagtaccttcttgcagattcgtatgtttcatacactgctgtacttggtgggatcctgatgtgcaagatggcttatgacataacaagcataatcagctcattgtactacaagggttatggttcacttacaaaaacccaaaagcttgagtggaacaacaggggcatgtccactatccatgcgatattcatcacagtggtgtcagtgtacctggttttcttctccaacctattctctgatgagctggatggactagtaacttatcggagttcaaatctatccaatttcactttgggggtttctgttgggtatttcatcactgaccttgctatgatattatgggcttatccttctcttggtggaatggagtatgtccttcaccatatgctgtcgcttatttctatagtctatgctatgtattctggggaaggacagttgtacacatacatggttctcatctctgaaacaaccacacctggaatcaacctccgatggttccttgataccgctggactgaaaaaatccaaggcctatcttgtcaatggtgttacgatgtttattgcatggctggtggcacggatcattttgttcgtctacttgttttaccacatttacttccactatgatcaggtcaagcagatgcatacgtttagctgcattctgatatttgctgtgcctacaatactgctcgtcatgaacacaatgtggtttgccaagatcttgagaggccttaaaaagacgctagccaagaggcagtgaaaagaagaatggtaaaacaagctcaaggacatcgatagccaaaatccatcccctcgtacagtcactttacagttacatgcacttcccgagtaaagccgtcagtgcagctcgtagcacaagctaaagcccttgcacatgatcctgaaatacgctaaacacagctcatttttttccctggatgctctgccttgtacatacggccgtctgtattgggtgcttacaccttgagggatcgtttggtgaccaggaaaatagatgggaaagaaatccctttgttacggcctcgttcgtttcaactggtttggctttggcccgtttccggcctcattccgggtggaaatggaatttggttgtttctctatgagctgttcgatggctgagtctgacgattgcgctgttgcgtttgtcttttctatttcttccgatcttaaatatacgagga

SEQ ID NO: 37882 - DNA, 2525 bp, Zea Mays
ttgttgttgttgttgattggcgcaattccaaagcgggtaatcaactgtaggacagttcatgaagcaattgttagtgcctaatggatttctgatatcagaggagctttgtcagtgggggttttgacagattaccttcagctttggcctttgggatttgatatctggcatcgagctgcagccggaggttgacgacaagcatatcttcagtattgccccaaatggtgtgtactcagccaaatcagcatatgaaggtctgtttctgggatctgagacatttggacactataaaagaatatggaaatcttgggcattgccaaaatatcgtttcttcctttggttggttgcccataagagatgttggacaactgatagattggcaaagcgaggcctgaatcatccagagaaatgtcttctatgtgatcaagaggaagaaaatatggaccacctccttgtgcaatgttccttctcacgggaattctggtaccttttactcaggaaattcggtcttcactctcttgcaccatagctgactgtaaactctttcctgggatggtgggaagtggtgggaggagcagtccttggtctcacaaaaaaggccttaactcatcattttgggagcttggactttatggaatcatcgaaataaatgcatttttgatggctgcaatacaagtatgtccttatgtctcagagctgctgatgaggaaagaagatgggaagtagctggggcaaaaggcctcgctcatttggctgcacccttggtcaatatcctcacacatactgatgaaataaaactcaaagcaaaaaggattgccgcggtggaaaagaagaagcggtgtttaggaatgaagattctatctaccaaggaagcaagtggaggccttcaacggtgtgcagattattttggtatgccaacagctcccagtgaatctaacaaggagccaaggcctgaagagtgtgtaaatgaactgggcattaaacaaccagtacagcatgttgcttccgaggagcaggaaggagttcaagatgatgccaaggcagatgcaaatgttatgaatgtttcttttggtaagggaaaatcagaagattcttttggtacaattaatggtaccaacagtggagataaaatagaatctcctagtggtttagcagaaagaacattgactcagcctaccactaagggttgcagtaagcagcgtggccgtagttctaatggtagaggaaacaggactaaaaaaatagaagaggggaatgcgtctggactaattgctgtggctcccgagtcagaagatgatgatgatgatgccgcatttatagatggaaaccaagcagagggtggtgcactgtgggatatttttcgacgggaagatgtgagcaaactgcatgattatctaatgaagcatgcacatgagtttagacattgcaactttgagccagtgaagcaggttactcatcctatacatgatcagtgtttttatctaacaattgagcacaagagaaagcttaaggaagaatatggagtcgagccttggacatttgaacagaagctaggtgaggcagtatttatcccggcaggatgtccccaccaggttagaaatttgaagtcttgcataaaggttgcactagattttgtttctccggaaaatgtccgagagtgcatcaggttaacagaaggtttccgtctgctgccgaagtggcataaggtgaatgaagataaactggaggttaagaagatagctcttcatgcattcaatcaagctattaaagatatcactgatgaatcatctaatagcaatgaaagggctcacaaaatattgatgtgctggtgaacaaaggtgtagggttttctccaagatgtcggatttgacactgaagaagattgagtattggaagaggtccgattgaacatttggcactgacattcaccaacttgttcaaatagaggaaaagaatatggaaatggagaaagagcgcatgtatgcatgtgtaggtcagggagtggctcggatcagccttgagtcaatttccactgcgttttcttcggttatggatgagcacgaggagtaaaagaaacagaagaaggctgagtgtgattctcatatgcttattttcttgtcctgtgtaatggatgtgtgtatgtgaaccatatgcgaacttaaacgtctttgtttgtaccggtcaggccattctgagtgagggttccgtctcttctttttaggactccactgcgaggtgtcggtgtgtgagaaatggtgcaaacgtgtgtatgaaactctacgaggcatactcttatctagtattgtgtctagtgaagaatgggacacatccgatgctactgtaaactcacttgttgcactcactttttgagttggatttttctttcaaacttttttgtatgctctcttgagtttatctaacactagatttcataagtgtgcaccattgtccataactagactcacttaggtaaagctatccattccatgtcctctttataatgtgacataaataaggattttatcact

SEQ ID NO: 37883 - DNA, 2577 bp, Zea Mays
gggaagggagcccgtcgtctctcgtctcggctggccgccgccggaggttgagacacaagaggcgccgggagcattctccattcttgaccttcgcctccactagtccactccctcgttgatcaagtagggaggagtgcagtggatatgtggcggcggcagcagactctcctccgccggctgccaccgctgagggtggtggcgcaggctccggcatcctggccggcctgccggctgggacgcttctgcgggtctgtgccggagaagaggaagggaaaggcggcgcctttgcaggcgcggggcatggtggacaggttccggatgcgcgccaagggtggcgacggcggcaatggatgcgtcagcctcaggcgctctaggtccaaccgccagggcatgcctgacggtggtagtggagggaagggcggtgatgtaattcttgagtgttcaaggtctatctgggatttcagtggcttgcagcatcacatgattgcacaagtacctgtaggcacagtgattcatcttgtcgaaggcgagcaaccttctctgacagtaaataaaccaaccagagctctggatccctgggatatacctagtgctgaagaacactcttcagatttggaccagattgttaatatagtggcagaaggttttgatggtggcttgtcccatcggcatattgcccctaagcataacactgatggaaatgacactgtaaagggaagcagcagtcactcagaggatccaaaatactttcatacatgctccaagcttcagttctcaaactctaatcgtgatgtaagaatctattcatgtcaggaggggacagatgaaaaagatcaaactgaaagtgaggatgaagaattttgggaggatgaagacgagtttgacatggatgaggaggaagaagaggatgagaaggaagaacaagatgtgcaatattgtgttgctgagatgacgaaacctgggcagcggttaatcatagcacgaggaggcaaaggtggactggggaatgcttttgtcatgaaggagatgcggccatccaaagcaaacagacaagagaagatagcccgtttgagtactgggcagccaggaactgagagcatccttatcctggaactgaagagcattgcagatgttggtctggttggattgcccaatgctgggaagagcacattgctcagtgctctatctagggcgcaaccagagatagctgactacgaattcaccacgctgaggcccaacattggcagcctgacctacgaggactacttctcagttaaagtggctgatatacctggcctgatcaaaggagcacatgagaaccgtggcctgggccatgctttcctgaggcacatagagcgcaccaaagttattgcctatgtgcttgaccttgcagccacacttaatggcaggaagggtatcccgccttgggagcagctgcacgatttggtcacagagctggagcattaccaaaaaggaatgactcggcggccatcactgattgtggcaaacaagatagatgaagagggagctgaagagatgtacgaggagctgaagaggagagtgcagggtgttccaatatttccagtttgcgccatcttgcaggagggggtgccagatctgagagtgggtctaaggaaccttatggatgactcagatccgcagggcgttgattttgaggaaaacgactgttaaatgagaggactaggcaagaccaccctcgctcagctcatctacaacgaccctcaggtcaaggagcacttccatctactaaagtgggtatgtgtgtcagatgatttcagtgtccgtattcttgccaacaagatatgtaatacatcagaggcagtccttgaggatgcactaaagaagcttcaggaacatcttaagggaaagaggatcgacgataatggaatccgtctcacgccactccttccatgccgttgttgccttgggctgaagcttgttgaatccaaaggtgttcatttcttccacaaggtccttgaaggtgtcaacaatcccgcgaagcctgttgcccatcctaatatggaatgcagcacggttgtgggtagggaagagttttaccctggccataatgccaagcttggtgatgtgcccattcttcttggctcgacggtggagcgcctcatactcgaagtcatcgaagacctcgttcgcctcagaagcaggaggaagttcacagaggccatgaagcgccaggatcttagagatgctgtacttgtccttctcgtcgtttgtgagcaggaggacaacatagtccatgtctctgttctcaaccgccctaacagcatcgcagcaggggctatgccgggacacaacatagatggggtagccgagacggatgaaccggtcgcattcctctaggatcttgtccttctgttctttgctcactgatggcttaccactcacgaggaggctgggactgggagaagaaaccactacaaggactaggagagcggctacttgcttagacggaaacatcgatctcttattatcgcagtgcagatctccgcagctagtgatcgaggatatgaatatcaaagactggcagtcctatgttga

SEQ ID NO: 37884 - DNA, 1472 bp, Zea Mays
ctcttctttccctctgtataccgcgagcgcccgcagctagctgctagccgcgcgcccgccgctacctgcccgcctccagcgcgcccgccgcgcgtgccccgccgccacccctcgcggtgatctgtgtgggcgacgtccacagctacatcacgaagctggagagcctctggtccaacctctaggccgcactccccgccgacgccttggccaccgcgctggtcatcttcctcggcgactacaacgaccgcggcccgcacacccgcagggtcctcaacttcctcctcgcgctcccgacgcgctacccagcgcagcgccatgtcttcctctgcggcaaccacgacctcgccttcacggcgttcgttggggcgccgccgccgccgcccaacggctccccgttcttcggccacctgcgcagcgccatctctctttcctccctatctcgctgctccctcccctgccgccctgcttatttacgcccatttcttaagagaggatttgatggcctgtcagaataaaagagctcgaggaaattgcggcggccggaaatcctggtgatggtgccacacaaacacgagaatctgcttcgtcctcggcggaattgccgtcggggtcgggcgattcttcggaggacaagtgcctctgtttcgttgagctggctaggtccatggggattagtcaggacactcatgagtcgatggcaacagatgcagccaattacctttgccaccagcttcagcatcttcttgggcctatctcttctgcgacgagccaaagtggcccctgggaggagaggtcggtgatggttaggttgactcagaagctgcagaaatctaagagaaataagtggtggcggcagaggagaaggaagcatgttgcagagctttttcagaaggagcgtgcggattatgatagagttgaccaggaagctgatgaatggagggctaagcaaatagccaaggacattgcaaagcggagggtggaaagcatgcagcagattgctagaaagaaaacaaatgaggaaagaaagcgcctagaatctgagtctgtcattgagaaggagagaaggggtgattatattggaaagactttataggtaatttttctgtggcatttatcactcgagttgcattgtatggactgtccatatcccataatctaaaatacctatggtatccataccacaagctgtgctacaaggagctgcaccatccgaaatgcgacgtctgccttcagtttgtaaggcttcctctgaaatctgaacgacctgcagactgacaaaactacatatgcgttaacttttctgtacttcgtcattgcaagaagctcattcttttcctttgtctgtttctgcagattccaacgaacaggagtggcctgatagagtacagatcccacccgttctagggccagaagtattgcccttcgcatgagcacgacaggacgccacgttgctgcagctgtgagaaaatgga

SEQ ID NO: 37885 - DNA, 348 bp, Zea Mays
ctcctactagtcggtgcgtgtgtgcatagagaactgagtctcgatgacgaaatatctccataatagcacggtatggatcatgaccttatggcaccctctatgtggtgttggcgagggcatgatgtggcgaccttgtcgtcctccatgactatcgtcccgtggagcagaacaatgctttatctccggctcatttggctccgatacaaaatataatgttagctggaactcttatccaacgatgattgaagcttcgacgaggatgaacggatcaccaagaactctcacgaacacgatgaatactctccatttcttagtgttgtacagccagacttattttctccttatatt

SEQ ID NO: 37886 - DNA, 1096 bp, Zea Mays
caaagcaaccagagggagcgcgagccggccactcccctccgtctctctcgaccatggcgaggctcccgctggccgcctgcgccgtcgccgccgccttctacctgtgcctccaccttgcgtcgtcgtcctcttccgctcctcgtcttgcgcctgccccgagcgacggcggccgccgtgcaggcaggaccgcctaccacttccagccggccaagaactggcagaatgggccgatgtactacaacggcatgtaccatctcttctaccagtacaacccgcacggcgcgctctggggcgttggcaacctctcctggggccactccgtttccggcgacctcgtgaactgggccgccctggacacggcgctggacccgacgtcgcccttcgacgccaacggctgctggtcgggctccgccaccatcctccccggcggcaccccggccatcctctacacgggcatcgacgccaacggggagcaggtgcagaacgtggcgttccccagggacccggcggacccgctccttcgccggtgggacaagcccggctacaaccccgtcatcccgctccccgccgacgtcccgggcgacaagttccgggacccttcgacggcgtggctcggccgcgacgggctgtggcgcgtcgcggtgtccgccgaggtccgcggcgtggcgtccacgctcgtgtaccggagcgcggacttcctccgctgggagcgcgcccccgccgccgcgccgctgcacgcctcgcgcgccgcgggtatggtggagtgcccggacctgttcccggtgaaggaggagggtgacgacggcgacggccaagggctcgacgcgtcggcgagcggcgccgggctgcggcacgtgctgaagctcagcgtgatggacacgctccaggactactacatggtggggcggtacgacgacgcggcggacgcgttcgtgccggcggagcccgagcgcggggacgacgtgcgcggctggcggcggctggactacggccacgtgtacgcgtccaagaccttcttcgacgcgcgcgggagccggcgcgtgctgtgggcgtgggccaacgagtccgacagccaggccgacgacatcgccaaggg

SEQ ID NO: 37887 - DNA, 1381 bp, Zea Mays
cttcgcatgtgaactgcccactgccgcactgcgacaccgctccacccaccccaacctaggcagtaggcagtaggcatcaagcgtcctgcgtggctgcgtccaagtccaagcgccgtccggccaccagcgcaggtaccgagccaccgaggtaggagccagccaccgggcagatcccaggctgccagccaccggcgtccagcactccggctgccagctaccggccacccgcagcgcaggccacaccaatgggtagcaaccgcatggcgccatggctgccgacgaacaccagcagcgagacggccagaccccagagtccaacccaaggatggtttaggctactgaagggcaatgcactgattcttagactattgaagaatttacaggatgatgtgcaggagcagagcgtgggcagtaaatgcaaagaaaaaacacagttgcagaaattgctagcaatagactatacaagatagagccaaattgagcaaaaaaaaagaccattcccatttggatcaccattccctaaccacagcaaaatgaaggtggaaaattgagtagttgagtgccgtgtatgcacatgagcagggctaatactttataagaaatgtgctggttcttgatactcctccaaccagttgtagaagaattctggtttggctgaagtagttttacatccgaaagatggactttgtacagatatattctctgtcaacaatatgtatatccaggcggagatgaacttggagggaagcagatttacacaatttctgcaagtcgacccatcgtgttgaactaaaccatctctaatttcctacagcttcaactccaacaacaggatggccccacacacttaatgaaaacatctctaatttctagcaaattcgactccgaggacaataaaggtaccacaatggacttcttaagaagaataggaatcgtgtacataagcttttttgctctaataaaataagagtggttgttgcaacaatggcattcagaatgggtcttgataagagtgacgttgaaccgatatgaccatttgactagcatacaaagttcaaatgtgacagcctatagctttaagcaatgttacactgcttatcacctggactgattcaagcatttgttcttttaaaggtggttcattgtatcttgccagaaatcgtagaagaatacatacatgtatattccatgcagattccccccaccctcccattttcttctcttttctagacatcttactatgctctttctaggaaactggtcgtgctgattcaacaaaagtcaaagtcttttgcacaaatgaatcttatcgtcttgtcctttttttcttgtaatttacatttccaacctgctctaagtttcctacataatgacttcaatc

SEQ ID NO: 37888 - DNA, 3792 bp, Zea Mays
aaatcgctcggcgcctactactagcccgaaacctaggtggtgggaactcgggatacgaggtcctcttctccgccgcttgtcctcggcaagcacaaacgcggtaagccaccaaccgcctttcgatcgccgggctccatccctaagccatctcgccgcctcgtgagtcgtgagccgtgagccaaccgacctgccatcatcaattagtgacttcctgaacctgcttcgtgcgtcctaccactccaaagttccaacaatcaagagatttaaacaaagccttccataacttgttgccaataaggatttggaggccactgggctttggaaattcaaagtagactgcttggatcataacgagagagcacaaagggcctgggttttgtaaacagttggctttcactagagtcgatccattccatactgagcttttgcatatcatcaattcatcacacaatggatggtgtgcgatgcatggagtccccagctgctggtgatgccccgcatagttctttccgaacccttgggccaacactcctggtttcaatggggtatcttgacttcggaaaatggttggtggcagtggaagctgggtctcggtttggctatgatcttgtcctgctcgtgctgctttttaatctatcagctattctgtgtcagtacctctcgagctgtatcggcattgtcaccaaaaagaatcttgcggagatttgccaccaggagtatgatcagaaaatatgtgttgttcttggtcttcaagcaggactgtccttgctaacttctgaatttaccatgattgcaggcatcgtagttgggttcaaccttgtatttgaaagcaacaatcccatcacagtcgtatgttttacaagtgttgtagttaatctgctaccatatacactctcccttctggacaagaggaaggctggaatgtttaatgcctacgcatctggctttacactagtttgttttgtgcttggtttattagtgagccatcccaaaacccctgtcaataccaacgtaatgttccccaagttgagtggtgaaagtgcttactcactgatggtactacttggcacaaatataatagtacacaacttttatactcattcatcagttgttcaggttcagagaagatttcagggtcatacccttggtactctgtttcatgatcaccttttttctgtactatttgcattttctggtatctttcttgtgaattatattctgatgagttcagcagttgatgagtccaaaaacacaatggccattaacttccaagatgctagacagctaatgaatcaggtgttcacaagtcctgtggcgccaattgtattattagtggtccttctcttttcaggccacatcgtgtcaatgacatgtattattggtagtgatgtaatttcagaggatctcttcggcataaagctgcctctttttgtgcaccatctgttacctaaggtttttgccatgattactactatataccatgcgaaggttgtgggttttgaagggttatatcagttactcatggtctgcccaattatccaagctatgctccttccttcgtctgttatacctgttttccgcatttcctcgtcgagatcattgatgggaagataccggatatctcgatgtgttgaaatattgtgcttcctagcatttcttctaacactgtttacaaatatcatttttgtggcggaagttctttttggtgatagcacttggacaaatgacctgaaagggaacactgaaaaccctattctacttccatatatcgtcgtagtcctgatatcatgtggatctattggttttgcactgttccttgctgttactccactaaaatcagcatgtaatgaagctgagagagcgttgtctgtgcactcataacagagagaaacgttggatgccactcgtcacagcaaaaccgacttctctgagaatagggcacatgaagcatatgaagaacagaggtccttagccatccttgttccacaggattcactgaaaggtgatagaaataattttcgtagcatatccgtcatctcaaattagcttttgatcacaagggcagtttctgacgctactctacatgcaaatcatatgtctagtaatccagaagttcatccttagcattgactggacagagcctatgtcaactgaaggttgtgcccttaaaattgactggacagagagcctatgtcaactgaaaaaggttgtgcaaatagactcggatgcctgcacggacaacgctctgtttgtggagaagtctgaatatttcttttatcaatcactatttctcttccatttaaattcacaattaacaggatggttcttatcatgactgtacctctgtttgtgggagtggaagtgttggcttatctacctattactcaaagaaacaccactgtctcacctgacacctccggtgattgctgcaaacagaatgctttgttggttgttgaatgaagcaaattaatgtggacagtggtactgcaaatcaggtggttcctctataggatacaccatgtgtggagtctgcaacaaggttctagtctcaacttgcacatatggtggctcttgcgagttgtgacatgatcgtctgacatcaaagcgtgaaagacgttaataaatctgttcaggagaagcagtcatctagcgtggcaagcttggaattgacaatgagtgaggtggacactggtagatctagtagcagggtcaaaggatgatttcttttaccaagtatgcttgcattcgtgaggcaaatcaatgatacattatttagagcgtgattggttgcctgctcggcccagcctgagcgtatccagtcattcaggcccatggcggcatgctaaagaggtgcaataggctattgtttggttactttgtttcatctcatgatggcccattagagcttgcctttggttgcaaggctgtacagacacttgagcatggcaagcctcccaactagagaacagaagacaccagtcatgacaacgatgttctttctcctcactaagtatgcaccttttcctcttgttgcctgccgcagacccactagtagcacctgcagctgcctcctagctcttcggagcctccccaaacagccttgaaacatcatcaaccttcatggcatctgtttgtagtgagctctcagcaaagtaagatgtggtacccattgcaaacttgccagttgcaagaccattgccaaagatcacttccatctgcttgtaattttctatttggcatgtttaagtactcagcattcttagcccttcagggtgtgcctatattgcaagctcacaaatgttagtgtaaggctggaattaggttagtgggcacttaggaaaggttacaaaatcacagatacaattaacatacatcttgatatggccacctatagtgcacttcatctagactgatcatgtgtcattcatcatcatcatcacaaaggggctatttgtttcggtttttcgctagattttagccgtcatagtcgacttctagataccagacacagaaaaccgaacgcttcgcatctcagtgcgcttcaatgaaaatcatttttttttgtaaaaatcgcctaaatctgttggaactttgttccatatgctcttggcaagttggtggtgcgataaggcattgggaagcaagagtgcagcatggcaaagcgacctagattggtgatgctgggaatggttaggtttagcggtgcaggtgcagggcggcgactagtcactagagcgtgagctcttgcgtgctcagaggagatttcatacattatttgctccgtacaacaaa

SEQ ID NO: 37889 - DNA, 2069 bp, Zea Mays
caccaaactcagacccacacactgaaattcccctaaaatcactacggaccacttcaccggcggctcgccgtactccgccgccgtaaaccgatgaccctttcattaggcttgttgcggtcaggcctcctcaaccggcgcatcaaccaaccggcgaatcaagtccttcgcctccacctcgcattctcctccgcctcgccgtccccgtccgacccctccgccgccgccgccggcccccagaccaccatcagggaagggaaagtggaaatatttttggacgagtccaactcagtcttctacaacaagacccaggttaacaatagagatatttccattgctgtattgagatcatttattttgaaaagacatgaagaatatgctgcccgatcaagaaaaggaccaggagacactacattgagtgcgcaagctaagtataaagagccgaaagttcttgaggcattagctgcatcagggctaagagccattaggtatgctgttgaggtagatggaattggtgaagttactgctgttgacaataatgaagccgctgtagaagcctgcaagaaaaatatacagcacaatggcagtcttgcatcttcgaaggtggtaccacatcacgctgatgcacgtgtctacatgctcacacacccaaaagaatttgatgtggttgaccttgatccttatgggtcaccagctgcattccttgattcagcggttcaatgtgtagcagatgggggcatcttgatgtgctcagctacagacatggcagtgcttgctggtggaaatgcagaagtttgtttttctaagtatggttcttatccattaagaggtaaacactgccatgaaatggcgctgaggattcttcttgcctgcattgagtcacatgcaatccgtcacaagcgctacatagttcctataatatcagtacacatggatttctacattagggtttttgtgcgaatcttcacctcggctagcacagtaaaaagctcaccactcaaattggcacatgtttaccaatgcactgggtgcaattcattttacctgcaaaatattggaagaattcattcaaaggataaggaaaacatagctgtaccaaattttcgccttactctgcctgaagtatgttctgaatgtggccatcaatttgttatggggggacctctttggagttatccaatacatgacaaggtatgggctgcttcaatattatcagatattcatgctatgagagaagcatatccagcttatccaaaaatttcggctatactatcttcagtctcagaggaattgctggaggcacctttatttgtgagtcttcacaatctgtgtgcaatactgaagtgcactactccaaccatggttatgttacaatgtgctatcagaaatgctgggtatcaagtatcaggaagtcatgtggacccgctagctcttaaaacagatgccccgatgtcagtgatctgggacatcatgcgatgctgggtcaagcttcacccagttaaacatcgacctggaaatcatcctggcaatgtgatactttcccaagagcctaaatttcaggcaaaattttccagagtactgggggcctcggtcacccggaagcgcgcaagattcatgccaaatcctgagaagtattggggtcctgggacgaaggctggcaggaatccgagaacatttcagatggataaccgtaactgacgcgatctccgcgccagagcccagaagacggataatttagtttattgctttgtcaattgatatagtttgtgcgattgcaatatttgaatgatgtttgtgagtttgttccttaagttcacccttcctaaaattttaggttgagtccaccggtgaccggcagcatggctccaacactagacaggacatacgttaggtatttttggtcgaagatcgttatggacagtcttcattatcatcaaagatacatctatgattttttgaagagaaaaacgacttctacaaattcaacatgtgggaggtaacaaataggagcctctctaaagatcgttagacatacaaccaatattttggttgaaaaccgctatgactatgaa

SEQ ID NO: 37890 - DNA, 2401 bp, Zea Mays
ggcggacaggagcgcagtccttcaacacgccacaagcctttcctcctcttcgtcacccaccgccgacggctagccatgtccgccgagcccacctctccgcctctatcgacggcgcaggtccgcgggagcctcatcccgccgcttccagacgacttggctgtccactgcatcgctctcttgccgcgcgccgcgcacccatccctggccctcgtctcccgcgctttccacgccctcctgtgccgccacccggagccgctcctcgccgcgcgccgcaccctccgctgctccgaaccccacgtcctcctctccctccgcccaccctcctccgcgtcccctatcttcttcctcctgctcccgcaccccgggtggcccccgctcccgcttccctcccctcccgtccccgtctcgtcctccgcgtcggccgccaccgacggcgcccggctcttcctcgtcggcggatccgtatccgcggtcccctctgcgtccgtgcagatcctggacccccgggccagatcctggtccgccggcccgcgcctgtcctctacgcgggagttcgccgcggccgtcgcgcactccggggcgctgttcgtcgccggcggctgcatcccctcgtcccctttctgggccgaggctctcgacctctccactccgaacgccaagtggagagccgtcgccagcccggcccacctccgcgagaagtggatgcacggctgcgcgtcgctcgacgggaaggtcgttgtggtggcggaccgtggcggcttgtcctacgatccttcggcgccacctgcggaggcgtgggcaccggtgtcgccggtgcttgacatgggatggaagggccgagctgcagtggttgagggaatcctctactcttacgattacctgggacaggtcaaggggtatgatccgtacactgattcttggagcacagtggaggggttggagggggagctacctaagttcttgtgcggcgccacacttgccgatgttggaggattgctctacttggtttgggaaggaaagtggaaagggaaattaaaaggtaagatggaaatgaggagcatggtagtgattgaatgggccagcattcagattacaagggtccaagagggacggctaagaggaaaggttgtctctagggacactgttctgttcccggatatgccaagaggttcaacgatcacacattgcattgcattggagttgtgatgcagcagatgcagatgtaaagcaggttccaacgatgattcaggcggtttgttccacttatattggctttcaaggcttgctggctaacggttgatatcatggggccattgcaacagaaaaatacttcagttgtgttgattagatatgccatcagttagtccagtcggtgctgattatgctgatacattcatgacacggttatattcagccagtgtaccatttattagtagttgtatagcaggtactctgttagtcttgcccctgttcccaaacaaactcttttagcggtcacacttgttagatattatttcggggtgtttgaatgtactagacctaatagttagtagctaaaattagttgaagagattcaaacaccctagctaatagttcaactatttgttagctaataattcaactattagttatttttagtaaattagttaatatttagctagctatttgttagctagatacttgcactagcaaatttttagccagctaactattagctctaatgcattcaaacaccctattagtgtatctgtacgaagtctcttgagttgtggcaccgataggttgcattctgaggcatcattagagtatacccacctatttttgtgccaaaatgccatgccatggatcacatctcagtactagccatgtcaaagaaacgttctttcatcctcaggcatcaaatgatggaattttagtatgtcactgaattgcaggaacaatattcccgaagtatcgcaatgccttcatcgcaactccttgagtgatcccatcattctaaagatatatggagcagacaatgctaagcctcgtggtcacggtgtgtttcgattcgactggctacaggtgttcggacggctacaaatgcaatacataaagataaaatactaaaatagttatagccgcagtcggattaagccacagtcaggattaaaaccgtagtaaacagccatggttgagcgcttgggaaggacatcatccgcttggaatcttcaggtctttgaagtagcgaagtttgacggcaaagaaactacctggactagccactgtaaggtgtagatggatattacttgttttgtttctatattttctctccggattcggatataaatataaatattatcgagttttggcggttcgagtgactattgatattttatatatttactagtcagttgctcgt

SEQ ID NO: 37891 - DNA, 2230 bp, Zea Mays
gcgccaacgccaagtcgaggcacgcggccagtggtgccctcgtcctcgaatcgtcaatgagcaccggcgccgcgcccctcctccactctacccgcacagcgcccctcgcccccacaccccaacccaaccatccgctccttgtcgccttccgacgctgagtttgctggtgtcgatttacgccggcggatgctcgatctggtagctgcatgtgccgacctactcgtcgaatccgttatctaacgtaatggatgggcaaggcacaaagcacaggattttgatggtgtccgactttttctttccaaactttggtggggtggaaagccatatctactacctgtcacaatgtctacttaagcttggccataagatctggagtacgatatgtcacaaatggtttaaaggtctattatgtaccatggaggccattcctgatgcagaatacacttcctacactatccttgacgtttccaattgtaaggacaattattattcgagagaagatttctgtcgtgcatggacatcaagctttttcaacactgtgtcatgaagcattaatgcatgctaggacaatgggtttactcttgcagatattgatcaggcaatatgtgtctcacatacaagcaaagagaacactgtcttgaggtctgggatatctccagagaaggttttcatggttcctaatgcagttgacactgcaatgtttactccctctcccaagcgcttaaactgtgatgaaatagttattgttgtggtcagtaggttagtataccgaaaaggcgccgaccttcttgttgaagtcattccagaagtgtgtcggctatttccaaaggttcactttattgttggtggtgatggtccaaaacgtgtgcgccttgaagaaatgagggagaagttctcccttcaggatagagttgagatgttaggagctgtacctcatgctcaggtgcgatcggttctgatatctggacatatatttttgaacagttcactcacagaggcattttgcatagccattctagaagcagctagctgtggactgttgacagtgagcactagagtcggtggtgtccctgaggttcttccagatgacatgatagtacttgcagaaccagctcctggagatatggtaagagctgtcaagaaagccatcgacatgctacctggaatagacccccagattatgcatcttcggatgaaagaactttatagttgggacgatgttgccaaaagaactgagattgtttatgatcgtgcaatggaatctccaacaacaaatttactagatcgccttccccggtatcttacttgtggatcttgggctggaaaactgttttgcctagttatgatcatcaattacctactatggcgccttttagaatttctacagcctgctgtaggtattgaagaagtcccagatataggcccactacatgctcatttaggttcaaggaatgatgaggctcaagagaagtgaaacttaaacctttgtcagttttgaaactgttggggacttgaggtggcagtcatggtatcttctgcttgtcagcattcgttctgatccacatgccagtgtatgcctttatgatatggcccccgcacagcattttctcttgaagcttcctgtctccgtagtcgcagctgaaagagagtggaacgccttgatttgtaggatttcttgtcatgctggttaaagatatggtccgagtctctgtcattgccagcttctttttcttcttctgcgtaatgcgtagtgagtggatggcctgcgttttaggcacgtcatcaaaaccaattatctgctggaaagttggtactctcttgccaccatattgcagtgatttagcaactagaagtcttgattggcatgttgacacacaaattcctactatgtttgatgtcttgtatcatgtcggagcaccaattcctgctgtgtttgtgatgtaataaggccaattccaaccagcgacgtgagaccaatcgtccaatctgcatggatccagtcgatgatacttttttgaattgtttgataagttcgtcaaatcctcaaaaacaagtacacaagctttgtctatgaaatacccttatattcttttggatatatcggagtttatctacctatcataatgaactctgacttctccgtctcttcctgtagctacctcagggctaaattaatggattcatgttggttcagacatcttaacagttccgaatatttacaaaaggttat

SEQ ID NO: 37892 - DNA, 2157 bp, Zea Mays
acaacccgatcgcccacgcaaacctctcgacagaccacagctcgatcaaaccgcgaatgaaaaaaccacaaaaaatctcccaattctcgcaaccccaagccggccagcccccacgatctcgaatcccgatgctctcagcatctatcaactcccgagcggtcgtcaccagcgcatgagctttctccgctcgctggcgaactccttctcctcgctgctcttctcgtcggggggcgagacggcgcccatggacgcggcggggtcggcgccgtcgccggcggcggtggtgagggagcgcgtggcggtgaagctccggggctacttcgacctcgccaaggaggagatggacaaggccgtgcgcgccgaggagtgggggctccccgacgacgccaccgcgcactaccgcaacgcgatgcgcgtcatgctcgaggcccaggccgcgcgcgtccctgatgccgtctcctccagcgagagggggcaggtcagggtgtaccaggagaagatcgccaagtggcaggcgcaggtcgaggagcggctcagagtgcttggtcagagaagtgctgaaggtgccactgctgcagtagtgcctaagaaggtaatagtttgtggacttctagctgcatgtgggtgtgttatctggaattccgtgttatcttgtatcggacttttgtttcatagcttaaatatttgttaccttctgaattttgatgccttcatctaggttctttcactgtttggcatgtacgcttatataatgtaatgtgacgtacctagattgttttgagtgcaattaaaacaggtctgtactatatgatttttttctcattgcctaactaaccctatattcggtgataggttgtcatggtgcaatggtctacttgttaggctatgttgaggtgggggtgaggcgtcctcttgtgctcctggggagctactaataaacctcaagagttggatgatgctgttcttcgaagactggtgaaaagaatatatgtgccactacctgatccaaacgtacggaggctacttctgaaaaatcagctcaaaggacaagcattcaaattgtcgagtaagtgctccagggtttctctgtataactacttgattgtggtggttgtatatgtagcacagtctttttatgtttggcacggtagccaacctggaactgatccctggcagaccatgatttcgaaagattagttgtggagaccgaagggtattctggaagtgacctgagagccgtgtgcgaagaagctgcaatgatgccaataagagagctcgggccacagagtattcttgctattaaagcaaatcagttgcgacctttgaagtacgaggatttcaagaacgcgatggcggtgatcaggccaagcttgcagaagagcaaatgggacgagcttgagaaatggaacgaggaatttggttcgagctgacggcggctcgcactgcctgtgcctgatgatgatcaagcggtcctatttccatctgtatatatgatttatgtctcccacgctgtggctcacaacacaaggggtcacaccatgcgcccattgatgcgtcctcgttgggctaggcagcacaacatcgacagaagcagaatgtaaaggtatacttctggcaacggcctatacagccattgagggctagtttgaaacaccgttcaagggattttcatttttcaaagggaaattagctcattttcccttgtaaaaatgaaatttttttaggaaaatggtgttcccaaactagccctaagtattgctgttgcccaagttaaacaaaaaaacgtgtctattattgggctctgtttgtttaccctctaaattatattatccagcttaaataagttaagagataaataaacaacacaacatagattattaggtggattatataatttagatacctagattacgataattcataagcaggtcattggatgcttatagaaataagttaagacataaataaacaacacacaatacagattattaggtcggaggctcggagctgcttgggccgaagggcgaaatctgtgtcgtcgttgtctagaaagacaaacacaaaaagctaaaggcttatctgctgatatgcgttgtacaacatacatagataatgcctgctaggctgtctgtatacagctgttgtatattttgtttg

SEQ ID NO: 37893 - DNA, 281 bp, Zea Mays
agatacttaccaagtggtcgtcaattaacaacactaacatagtgtttatccgaggcaagcaccggtgcatttgccacctccttgttgttttaaaacttttatcacttatatgctgcattaggtgataggagttgagtgattaaacaattgatgcattgtcattccttggaattcgattactattccttgatacctgttttataaagagaactaatgaggcttagccctgcttagaaactaaaagttgtttcttttaaaaagaatgttgtgcaacactggat

SEQ ID NO: 37894 - DNA, 3522 bp, Zea Mays
ctcacagtttgattgttcttttagaatgactttttcccaaagatagtggacattttcagaatgtgcgaggatttagagaacatagatgatcttcacatgattttcaaattggtcaagggaataatattgttgaacagtccatcgatctttgacaagattttctctgatgagtttattcttgacataataggtgcccttgaatatgatccagaggttccaagagtgcaaaatcaccgtgcttttctgaaagatcatgtagttttcaaagaggccatacgtattgaaaatgtttctgttgtttcaaagattcatcaaacatacagaatcggctatcttaaggatgttatactaccacgaatactggatgatgccactctagcaagtctgaacacaatgatacactcaaataatgcttcggttatttccctgctaaaggatgacacactctttattagacgactatttgccaggatgaggtcatcagatatttcaatggaatcaaaacgagaattggttctgttcttgcatgaattttgcacacttagtaagagtctaccacttgttcagcaactgcgactgtttcgggatctttcaggtgaaggagtttttgaaataatttctgatgtgttgcagagtcaagatagaaaaatcatttcagctgggacagatatccttatactttttcttaatcaggaccctaacctattgaggtcatatattgtccaacaagaaggaaattctcttctaggacttctggttaaaggcatggtaactgacttcagtgaggaaatgcactgccagtttctagaaattctacgcatattgatggattcttttactacgtctggagcacatagagacgtagttattgagattttctacgaaagacatcttgactatttggttgatgtaatagcatcctcttgtcccccgaggagcttgtctcgatcatcatctaactcggtacatgttggtggaaatgctgaaggacactgtatcaagcctgagattttgttaaatgtttgtgaactgctgtgcttttgtgttgttcatcatccctacagaattaagtgtaattttcttatgaacaatgctatcgagaaaatccttacattgactcaacgaagggagaagtttttggttgtagcagctgttagatttatgcgtactattatatccagaaatgatgaccatctcattcgccatgttgtgaagttcaacttgctgaaaccaataattgatgtctttgttgacaatggggagagatataacatgctacattcaggagtactcgaattgttggaatacatacggaaggaaaatataaaaactctcattatctatgctattgagtctttctgggatgaacttgccatctttgaacactttggaagtattcaggccttcaaactcaagtatcaacagtacctggagagcgctgaaccaaggttgaatgctagtgtgcctgacatgagaaagaaggcagaacaaagaggtcttgagaaggaagaggaagactacttcaatgaggacagtgatgaagaagattcaggctccggccggcgggctaaacatgcacagaaccaaaataacaagcctaagtccaaggtccccaatggaagtgaagctgatgacactgatggcgcctctaggcctaaatctgctggacttgtggactatgacgatgatgacgatgaggacttcaatccaccaccaaaggagccttctaggcctgcagaggatgatgtgcccttaaacatatccccgttgaagcggaagccagtgaatgcagtggatgggaaacattcagacggagagggtcgcaggaggcaaaaaatagaaactagaattagttgtgctaaaattgctgctgttactagtacagctattaagcacacagatctacaaaacaagtatgcttcccacttgcttacgtcagccacaccaagtactgaagccaatggtatttttagtgaacatggtactaactatgaggagcaacaacatcctatggagaacacagaaacttcacgacaaactggtggtgattgtataaaagatgtgggcagtatgtctcccgagaaggccgtaaatactaccaatacaagcgattcggagccttattcagtaagatgactactacacagctggttggtccatgtacccatcctgtgctgtggtcaacaggaaggaatcagaatgtgtttggctccaagcgctgaatgcatcgatatcatgctggaaacatgattggaggtgacatagattgcagctacctttacatctcaagtaaaattccagttacccctttttgcgcctgtaaagttaattttccgcaaggacagatctgacaaacatgataataggaatgactgtagattcgaacattggatgggccttgctcctgctgctgcgctcgctattgtatcggtttatgagccaacgtagtagtgaatatgtgccttcaactttatttttctccacaattattgatactgttgtaaaacaagtaggaaggcatagtttatgttgaatagcgtttttgcaagactttgtgctaactcacctatatgattgtaatttgttggttaatagttttggtcggacatgttacgttggataattaatctggtcttgtgatagaataatttatgcagaattttttctttgttaagccaaatatgttgtgcacatttgacacaaactactacggtagaatttcagaagtgaataatgttcgatgtattgagatctgggttatggagtttatgttgaatagcgtttttgcaagactttgtgctaactcacctatatgattgtaatttgttggttcatagttttggtcggacatgttaccttggataattaatctagtcttgtgatagaataatttatggataattttttctttgttaagccaaatatgttgtgcacatttgacacaaactactaaggtagaatttcagaagtgaataatgttcgatgtattgagatctgggttatggatgacaggtgtacttgcgagaattgcaatggtatcctactgctccagaacaggtaaacatggtcactccatccgcaaagaagaatcatgtgttcaaccagtgtcaattcaacagaataaagaagaatcatgtgttcaaccagtgtcaattcaacagaataatctgttcagcagtttgctttatccgtgctcattgtactacgaacctccgccgtctacttgaatatcaagcctccacgggcagcaaagaatggcgcaaattattgagactcgacagcaatgagcttgatcagtatgttcagggacggtccggaggtgtccttgagggggtcgccgatgacggcagctttctgagcgtgcgacccaaccgaggctatatctaacaaactgcactatgtaaacagtctacattgtaaaataatattttacacggttatatacactctatttaagcatgatcttagtgtggttgtttaaacatggtcttagtgtggttggatgcaccacttgcccttgtt

SEQ ID NO: 37895 - DNA, 3656 bp, Zea Mays
tccccatgcccactccttgctcagttgctcttgctcttgctcttgtattcttgcttatactgtgggccatgctcgggaactagggctgaagattgatgcagtgccattgtgccaataagcaagaaaggcccactaaagggcaattgacgctgggcggcgacggcggggggagactgagcggccgaggagccggtgtggcatcggtgcatcgcagcggcctgaggtcgcgagcagcacagcagggtgcgccaggcgccgacgcggtacggggcaccgcgcgacgcgtgagcgcgtggccggtctcagcaccaagacgcatcaaagccggcgctaggcagggcactatcgcgctgctgcgcagctgtgcctgcgctggtccctggaggattagtgacagcactcaccaatttgtgttttgcagaattgggagaaatcaaataacttcacaacagatcaggaagctttagagcttggcaatggagatgagagcccgggaatctgtaagcatgtcgaaggatctaactggggaaatcacaccttttgccactgccctacatgatgtgttcctccactcccattgctcatcatgcttcaccaagttacttccacaaaccccttgtgtcatgtcttgcatgacatgctgttctcttcgatactgctgttcagagtgcttacgtgcggattcagtggtgcatgtttcctctggtgaatgttgcttttttgtggatcacctcaagagagcctccccttcctatgttactgaaggaacgagtgatttgcgtgctgccctccgccttctgtgtgtgcttgagatacatggtcttgtttcgcctgattcaatcaatcactacagtagaattggtggactttcagcaagtggtattgaggaagctttgaaggaaggtgaggttattgctgagaggatactggaggggagcttattgatgtcatctgctagaaaatcgagggcacagacttgtgttattttttcagacaggcttaaacttgagaagatggcattatgggcagtgattatcaatagcgtcgaggtgcaacttagtgaagggttagctttgggagttgcagtgtatggcccgagtttctcatggttcaaccatagttgctttcccagtgcttcttaccggtttgtactggctccaaggaatgaagactgtgcttcacagaaatcaaaatccagtgtagtccctgctagcaaaggagttgcagctgatgtgtggcatgcttggcaatacgaagatcattctactcatgcactgtgcaaatatggcccaagagttgttgttcgttgcataaaaccaattaacaagggagatgaagtgtgcataacatacattgatcttctccagaccagggtactatttcttgaattttgctgaacccatattttgagtcaccctgacacatgaagtcagtatacccataatattatagatctccatatattatcaacatcaacatagccttttagtctcaaacaagtcggggtaggctagagttgaaacccaacaagaagtcactaaaaagagaaagagagagaaaggggaggggggaaagcttttgagagaactaaaaggaaaaagacctaatcacggttcaagcacgtggatagcttctttccaagcacttctatccaaacacaactcctttcggatatttcattcattcaattcccttttgattgcctcctctcatgtcaagtttggccgctctctaccgctcttcatatactatgtttccaagaatctaatcatggtttacttgtgcagttcattgtagtgttcgctgcctgagttactgttatacacagtatttaatatttacatgattgacatatcatattttgccttagaattttgggctgtaatttagaacaaaaatatcaaaggagtaaaggacctaacactcgcactcagttttggtatttttgtttcttttgagcagctgttgttgatacatgacagtgccctgattagtagtgtattggtaatttgcttgtgaaaaaagattatcttgactcacatggtcacagtcacacttactgtattctgcaagttacacactagtgcagtagtgcctagttcatagctacgccacttgataaaattgtcaacttatcttgaaaactttggtttctctgctttttagcagaggaatgcaaaatgttgagttgttgaccaaccctgtccgttttgatgtagctttctatacaatagtattaatgtttttcactagcgattagtcaatgtgtactggttatcttagcaaaatttagttgatattgtcgaagttccagattgaggccaccatccatagatggaaaatagacttttgtggtatttgtaccggatgtatttcaaattaaatattttattcgcttatgttgggatgctcataagagttcttttcaggaagcaagacattcggatttgtggtcaaagtataaatttatttgttcttgcaggcgatgtattgcatcaccagagccatacactgatcttattctgaattgtgatgtgagggacttggataaagcagaagcagagggtactgttacacctccagcaattgagaatttgggtgatgtcctacaacaggcaatatctgagtacacgtcaaatgatgaccctgaagcttgctgtgatatgattgaaaccatgctttccaacaggttggtgagtggtttgaagcaagaggatatttcagggagaaaacatatactacagcctcttcaccatatctgtcttactgcttacatgacacttgcctctgcttaccggtttcgcgccttaagtttagaagaagctgtccgttcagatggagaaaatactgatgaattttttagaatggctaaagcagcagcagcgtattccctggtacttgcagggagtacacaccatttgttcttatcagaatgttctcttatgatccccctgtctcattttttgttaaacactggacagtctctgttatatcttgttgagtctatcaagggaaagacaaggcaaaatatatccgaggccaggctcagcttttcttcatgtccagcaagttctacagacaatgattctccaccgtaccatgtgttcagatcaacctgtgaagcgtttggcaagcaaatgttatccctgtcactgcggtgctggtcatttctagtgcgaggtttaccctgcctggaaaagataaagagccccatggaatttagtatgcccggaacaacaatatttcagtctgtcctttctgaggaagaccatgccaacctttccgcgcacgagccagtaggtttcacggagagacaagcggggtgcatccttagtttggctctatgttgtatcacctactgcaaatatcttgctaccatatgctacggcccacatcattatctggcagaccatgcaaaatatctacttgaaggtatcgatcctgcacaatgaatcttctttcttggcataggtgtgttgtgaaatcttatgctcttatgagttaatgtaaaacgtgtcgtgattatcaaggctgttgagcttattttctatatgattgtatgctgagctcgttatttattattttgtatggaagcaccatttttctaaaaaaatttggtcactgggaagttgtatcactgatcttgcacctttcct

SEQ ID NO: 37896 - DNA, 317 bp, Zea Mays
gctcttcaaaaatgcagacgacgctcatcttctggccgagtgcccatctccctccgccatgccctgggttgcgtgctccaccgtgccggtcgctgctttccccaacctccacggcgctcccttcctgcctcagctcggaccgtgcctagccgagcgggtcctcccacacgcgctcctctgtctcccatggcgcgcgcgtgccccctggtcggctgctgctccctggctcgccgtggctccctgctgcagctcgcccccagctcgccgcgcggctcacatggcgtgctcctctctgccaagcggctcttccccacggc

SEQ ID NO: 37897 - DNA, 1062 bp, Zea Mays
atggcagaggagaagacgacaccggaaagcggagccacgaatccgttcctgtctgcacctcctcattttcacctccacccacccgactcggcggcctgcgctcgtccgcccgttcctcgccggcgccgtctcttccgcagaccggtccgtgggtcgagggagccgcttcttcctccagcttatggcagacagaagtgatggaccgattgggaggctcccagaacatcttattatagaaatactcattcgtttaccggtctatgagtgggtgcaattagcatgtgtcaacaagcattgggcaagcatatttcaaggagaatgcgtgtggcaaactgctattgcaaggaactggccatctgctggtctccggaaacgctggcctgggccaattcctagaggttctgctaggaggagatttcaagcactgtatgtcagtgagaacttagtaccatctggtggggagattgatgagcttgttggtcacacttatctctacttaaaagaacagcttgagcgtcctgtcatgcctccttccagcatacttcatggcaccatcattgaccaattcattgcttgcggcaatacaggagaaaaggcccatgatcttgcttcaaaaatatggcttgcagtcattgacagcttggaagaaaaccagcaaactttcttactgttaaaacgtgtggcacaagaaggagaaatcatatagggtactatggagggtgtttgacaagctgttcaccgacttccgcgactgtttcagcggggctgagtaccatgatgttctatcgactgctaagtctaggtttcagccggtgccttccacatggcttggccattagcgcactgcagttgctcttgttgtgcgcactctacagtgtcgtagataaagcagtgatacttacagcagtcatttcgagtacatgtagcatcttgacagcttcaagagcattaaaatgttgtttgagatggaatactcagtgttcttgcaagtccttgaaagtaattcgatacactctgtcatttgcacagttacttcagtgtatatatactgcagtttcagca

SEQ ID NO: 37898 - DNA, 2844 bp, Zea Mays
ccccactcccgatgcgtccgccccaacgccgatagtcctcgcccctcccctccccgttgcgcccacccatgccccctccgcgcccgcgcctcccctcaaccaccgcaccgagatcgccgccgatctgagctcccctccccgttgcgcccacccatggtcgctgcttcgacttgctgttgctgctgctcctgcacgacgaccaatgaagggaacaacgtggtctgcgcgggcatggtgggcgcgtggaaggagaagtcgttgaaggcgccgccgaccgcagctcggctgtcgtcttgctgtcgtcttgctgagactgagacgcgatcaggtcggcggcctgcttccagtcgaacctctgcgccgggatggcgccggtggtgggcgacgcgaagaagttcgaggaagagtggagcgggacgggcgagtccagcagctcggcggggctgagcccgggcgggatggagaagtaggaggagggcgacatcggcggcggcgagatgggcaggctgggcggctgcacggacttgaacttgggcacgcctacgccgccgcccctggtggcgccgcggtggaacagccccctcggtgatggtggccaaccccaagatctatgtggccaaggccgtcgatgcctttgtggagttggcggaggcgagcaggttaatttttaggtaccagatcatctgatttctcagaagcaaaatgttgtttggagctcagtgacaccatcttgtaatgcctgtgattttacgggaaatggaggatcattctgtccatcccatgtctaagtctaaccatggctccttgtcaggaaatggttatgagatgaaacattcaggccataaagtttgcgattgggattcatcatcgaagtctgatcggtctcaccaagaagcatcagcagcaagtgaaagcagtccaaatgaacacacatcgactcaatcagacaatgatgaagatcatgggaaagataatcaggacacaatgaagccagtattgtccttggggaaggaaggctctgcctttttggccccaaaattacattacagcccatcttttgcttgtattccttatactgttgatgcttattatagtggggttggggtcttgacaggatatgctccacatgccattgtccatccccagcaaaatgatacaacgaacactccgggtatgttacctgtggaacctgcagaagaaccaatatatgttaatgcaaaacaataccatgcaatccttaggaggaggcaaacacgtgctaaattggaggcccaaaacaagatggtgaaaaatcggaaggctgcaaaggagggcgagcctttttgggatagcccttggggccgtggaagaccgggatggcatattgaatgcagcgcaatgagtgctcactatttaggacatgtattcgatattcatggtggggggaaagatttgatttttcctcatcatgagaatgagcttgcacaaagccaagctgcttatcctgagagtgaggtgaagtgctggatgcataatggctttgttaacaaggatgataaaaaaatggcaaaatcagataataacttttcacgattagagatatcactgctctttaccatccattggctttaagatttttcttgatgcgcactcattatagatcagatgtgaaccattctgatcaagcacttgagattgcatctgatcgtgtctattacatttatcagttagtgcttctgcatctcatcacagatcctgaatacttcctttgtcaaagctttcacttgtctgaaggaagacgtcggccttctgcttctccatcaccatcgttatcatgcaacctgctggaatgccacagcgggacaggagcatggggatgagcaggcgcaagatgatagcaagtggcgccggatcccgacgttcgacgactggaacctgcgggacgacatgcccgtcacccaatacttgcaagcagggacttcttcatcattgtgccgccgacagagaaggacgacgacgaggatctgttcaaggtgcccctgtgttccctgccaagccctacaactacaagaaggtgaaacaaaataggacgctgcattagtttctctcgccaattaattacactcagggggaaaaagttttctttcaccagctctgaagatagtatcagttaacattgtttcatatctccatttccatatacattatacccagtcggcactagcgagcgatgagaaagatactgaacaattctatgatccaagcatggaattataatcattgaaactctgttgctactgttacttggttcataggctgatatatacatccaagctcgcccgcaccgccacctccacagtttatcatggtgcttttgaccctgcttgacagaaccagcagtgatgtatatataggtcattttgcctaatttgcatgaatatgacaatgtttagttgtaaggttgtataaatggtcgattggggctgttggtttatgattgtgatgaaaactaagaactcatgaatttgttttagttctaggagctaactcaggcttacgaggtcctcagtgatcttgaaaatcaagagatctatgatggtagtgttcttaatcacttttatgctttttcttagtgatgaaatgaagtttttaatctttgcacatgtctttcccagacagagacaacataatcctacacctgtttcattattggagtaatgcggtgctacatgtatggttctcttcttaaagctgtaagactaaggatcaccttttcctcttcgaacaagagcccaggaactgcgacgaggcgtgcgaggccgacctcggcgccacgcccgactgcccactgacgttgctgctcat

SEQ ID NO: 37899 - DNA, 1436 bp, Zea Mays
ctcatttctcttttatttccgctctcctccattctctgtttgctactttgcaagtctcgaacaaaacctgaagcaactcgaagcgaagccgcgatactgcgagaagcggaagcggggagggcgaggaggagcagcaatggaggcgctgctggagctcgagaagatgcagagggtgctgtccctcatgagttcacgcggcctctcccacaccgactccagctgcggcggcgctgccgctgaccgcttcctcgcccaattcctcctcttcatggtgcaaccgtttgattctcttaccctggagaataagttccttttgatctctgagctattaagaaaggctactcctaatactttggaagaagtgcagcatctcacccatctggaagctaataaagatatatgttctggaggttcactccagccaattaagaagtttaagatgcatgccgagaaatcaaccgttcaagctatgccgatggttggttttgatgcgatggcaagagctaagtctacgcttgaagattttgtatgtattctttgtagttggtactcgtaaaaatccttaatggaaacactgccatgaattaatcctggagtgacccaggtcttctgggctgccttttagtttttcttcttttatttttctcaagagaaacctgtttaccttttcttttctcacatcaataaaatcttagcacattaggggattcctttactgtttttgctaaaaaaacactgtcatactgccttttgttgagattttgcaatgcaagtgctacaaaacaattgaaccgcttatagaggcattaagcccgtataaaaaatagcaaggtatctttgaatgtattttgttgttccattattagtcttatagagaaactgggtcacatgctgttctaaattttgatttttcctgttcaaacatgtcttttttggggggttatgagtctatcttgagcacttcctgataattatgtttccctaaagtcccttttttccttcttgagaaaacagtgtaggtcgtactttatgtttcatggtttggatgttaacaagccacaagccattttcaagtatctacctgttctttctttcacagagagttacatatatcagatgcttcaaatgaagactgtttacatgtagtcccagatgacaacacttcaaaagtgttgggaaagaaagaagaatctctcaatgagacatccttgtctcaaatgattgaaccccttgaagggcttcttcagtgccaaggattaatgacagaccgattgcgaactgaactcaaatcaggcattcagtattggtctctagagaggaagctctgccaagcattactaagaaatgagaaggtgccccgtaatgcccaagttctctttgatgttgctctggagaccaaggttgggaatggggagaacaccaaattttggactgat

SEQ ID NO: 37900 - DNA, 2383 bp, Zea Mays
cagtttaataaatatttattattatgtgctatcagtttaataaatatttattttatgactatgcccgcgggtgccataaacctgcgggtagcggatttaggtaatatatactatccgtcacaagtagcaggtgcgtgtttaacattaatctcaccggtacgagtctgtaatctatgtatccgcgggttttaacccgttgccatcgcaaccggcggcaaaagggacgccgagcagtcgacgggaatacgagcagaattcccaataccaaggaccaactgaattcccgacgcgggcttggtgggctgggccagcgaattgacggtgggcctgctcgcgagcgctgtctctgacgtcaccaatccctatcctatttttttttcttctcaacaagaaagcaaattccctgtccgaatcctcattttccacgaaccaaaatcactatttcttatatattctattccctctcctctctgcaccgcccgccgcgccgagcacgcctctccctccctcgatccagatccaccccatacctccgcggcgccaccccttcccgctccttctagccggcgtcggcgcgggccggagatctgttttctccggtaggaaaaatcctattgcgatctaaatatgggttcgaaatcggtagacgaggtgctcgacgccgccgccgccggagtccattactccgcactccgtctggacggccaggcttccgcaacgacgtctggcctggagaacggccaccaggagccctttgtcattggtgttgctgggggtgcatcgtcaggcaagagtaccgtgtgcaagatgatcattgatcagctccgtgaccagcgtgtcgtggttgttacgcaggagtccttttattatggattgacggatgaagaattagtacatgtccataattataactttgatcatccagacgcatttcatacagagctacttctctcttgtatgcaaaacttgaaatgtggcaaagctgttgacatccctaactacaacttcaagacatacaaaagtgtcccaaatgcaaggaaggttaatccttcggatgttattattttggaaggaattctagtttttcatgattcacgcctcagggatttgatgaacatgaagattttcgttgatacagacgctgacgtacggttaacaaggaggatccatcgtgataccattgacaagggtagagatctcaaagctgtgttagaacagttctcaaaatttgttaagcctgcttttgaagacttcatcctcccaacgaagaagtatgctgatgttatcatcccacgcggaggagacaatgatgtggcaattgacctaatcgttcagcatattcggactaaacttggacaacatgatcttcgtaaaatacaccctaatctgtatgtaattcagactacttatcagatacgaggcatgcacacaataataagggatgctgccacagcaacacatgatttcatattttatgctgatcggttgattcgattggaaaagcaggtcatcactccgactgggtctgtttacactggtgtggagttctccaaaaggttgtgtggtatctcagtgatcaggagtggcgaaagtatggagaatgcactacgtgcatgctgtaaaggtataaagattgggaagattcttattcatcgggaaggtgacaatggacaacagctcatctatcaaaatttaccaaaagatattgcaaataggcatgttctgctgttggaccccatattgggaacaggaaactcagcagttcaagccatctcccttctattaaagaagggtgtacaggaagcaaatatcatatttcttaatcttatttcagcgccccaaggagtgcatgtggtgtgcaagagattccctagaatgaagatcgttacttcggagattgagtccggtctaaatgatgatttccgtgtcgtacctgggatgggcgaatttggagacagatacttcggaacagatgaatatcagtcatcgacgccatttttctgtgacgataaaaatcgtgtcaggctcttgtgagaagacaacataagccatggacgcggcatattctccaattttttagaaacttatatctgcatttcgaactctagaatgcacatataatgatgctttctttaccatacagacagcacagaacacctcttggtataattggacccattccatttttgtctgtttggaaagcagtgtcatgttcagtagcctctagaaggaacattttttttctttcatgtaataaattagggtaaaaaggatgttttggatcggaacttaattcacataaaaagtgtgaagcttaaatacgaactcctgtcgacttttgattttttttttgaagtatcaataagtgtgtaatctttttctt

SEQ ID NO: 37901 - DNA, 1757 bp, Zea Mays
agaggatttctattgtagaaatgcagttaggcccattaggttttgcccttttttttcagactcggattggtccgccctccttgtgctccgccggcaatggcgtccaccgccgtcaagctcatcggcaagttcctccgctccctctcccacctcaccgtcctgtatcgtcccctctctaccccggactgaccctctgccttcaccttgccctccacccccctccctccccttctgcggccgtggcgagcaccccaccagacatcgcagtcaacttcacagatggcatgttcaagggcatctaccacggcaagcagtgccacgccgccgacatcccggccgtactcgcgcgcgcgtgggctgcaggcgtcgatcgcatcattgtcaccggaggctccctgaaagagtccagagaggcattgcagatcgccgagaccgacgggagactgttctgcactgtgggagtgcacccaacaagatgcggggaattcgaggagagtggagatcccgagggtcattttcaggcactgctggctctagcgaaggagggtttagataaaggtcgttgctgttggtgaatgtggtttggattatgacagacttcagttctgtccggcagatatgcaaaagaagtacttcgagaaacaatttgagttggctgaagcagtaaaactgcccatgtttcttcacatgcgtgctgctggtgaagacttctgtgaaatcatgacacggaatttgcacagattccctggtggggttacacattccttcactgactcagcagaagatcgggacatgctactttcttttgagaagatgtttataggtgttaatggttgctctctgaaaactaacgaaaatcttgaggttctacgaggcattcctgtcgagaggttgatgatagaaacagattctccatattgtgacataagaaatactcatgctggaagccagtatgtaaaatctgtctggccatctaagaagaaagaaaagtatgagccagattcaacagtaaaaggtcgcaatgagccttgtttagttaggcaagttcttgaggtagtggctggaagcaaaggaatttctgacatagaaggcctgagtagaactctgtaccacaacacatgcaggctcttctttcctcaagatcttgacgcttctgctaatgcgcagcttgagagtggtactgccgtccaggattgctgatgtcagagtgatttttttattataaatgtttccttttgactggtactgccgtccagttgcggcggcgtagggcgggggtaggacagggcgcccacgcggtggcggaggccgacatggtggcgctgcaggttctggaaccggaggctgagaagcggggcaggggcgtaatggcggctgcggtggccatggccggagcgcagagatttatagaatatgacgaatattgaataaattattcactatccaggcgtaggggtgggcattttaaaaccgaacctgaacccgaaccaaacccgaatagaccgaattgtcggtctattcgggttttcgggttcgggttcggttcctatatgtgctatatttcgggatatgtgttcgggttcggttcctaacctttaaaacccaaatagacctaataacccgaaatataaaaaagctcttaatatgtgatggtattattatatgtatgatttataaacttagtagcttgaaataatgatatcatcttaacgatagtatatatatctttgtatgctattttttatagtcacttgtag

SEQ ID NO: 37902 - DNA, 581 bp, Zea Mays
ctgcagattgccccacccgcacgaccccctgtacggccgggtttgaagctgaccaaacagagtggatacagtcatgctcaaagttggcaagctgtgtcaacaagcaggcccccatctgctactcgcttcatgggcatgcagtaaagccttggtatttagccgttgcagcttgggaaggatgcacctgcagcacgagctgcacgtagagttagtgctcaacgaaagatgatcgaggttgagtctgttgcagctgctgataaacaagagattcgagatgtagtgaagaagtgattccgtgctgagtacatggaaaaaaggcctgaggcccgggacaaacataacacaaactgagggagattgtgtgcatgagtgtaactttgaggccttgtcgaaattaatggttaaggacttggtgtttcctgttaacgtgcatcttggccagcacttcactaaaccaccaccacgttattctgagggtgcattgattaaaaagctagaagaacttggaattgggaggccatctacttatgcatctataatgaaagtgttactggtaacatgacattttacttctgaactat

SEQ ID NO: 37903 - DNA, 3503 bp, Zea Mays
aagcccctctgcctctctctctctcacctcctgtcccctctcctctccgtgtccggtggagcttctccacctccggccaagatctggaaccagcgagggtgcccggcggttctcatcccggaccccgactctttcctcatctctgcaacctctggatcctccatctgcccccctgcaggatctggaagctgcacccgtcggggggagaagcaagcagcacatccagcccgctcgagctcgctcatctgacctcaccactgagcttccgcaggatcttcacatccccattccattgacaacgtgaaagagaacatgtgacggggctgccaagctacatgacaacgacgccgattgccgaatgccgagacaccgcgcacgctcttgcagataaagatgatcggttgatcgacgtggtatttgtaccactttgctgtccgtgaaagcccgctatataggtggtgacatcaagtgatcaagattttatggtgcgcaagaggttgggttatagttcccgtggccatcgaattccaactatgccacgtgttccaaactcagctcgggggaaacgttctaccagaagaaagaaagatgagaatgatgatatgtgtgcaatggatttgctcgcaactgtggcaggaaagttactagcagatcaggacaattcatctagcgttcctaataccagtgcagcgaaagctaaaaaaaggaaatcagttaaggaagaacactttgatgaaattccgcctctaaaaaatgtggctatggagaaagatgtgggttctggtagcgttagtgccttccctaggcaagctaaaaactgcctggcagaaaactcatcgacaagaaatggagctgatacagtattagagtcactaacagtgaaatcaaatatgctagcaaaaattcctgagtgtggatcttatggaatacaccatgcaggctcctcaagttcagcagagcctgaacaagtgcatcaagctgaacctaaagtgagcagaagacaagcagatggacatcctgtggcttatggtatatttaactccgtggatgtggatggcaaacctccggctttggttagttctgacagtagctcgtgtgttcctctgagcagccatgacaaggaacatcaaacctcttccttgtatcggggtgtagtgcagtatactgcagatagagaagatgatgaaaattcttctgggtgcacgcatccaagcaccatagaaagtaagggttgcaaaccacaatatctaggtaaccataggataaggaaattgcttgcctcgaaggtaaggaaggcagcacgtaataagatttgtggagggattccatcaaaaaagatctgtggagggttgtcaaaaaaaggtagcaagctaaacttatgtgggaaaaagatgtccaccacacaccaaaaggtgcaaagaatgattttcaaaaagaaaaagctaacgcaccgtacatcttttgctaaggagatgctaactgaagctagtgggacatcatttgctatggaaggtcaaaataaatcatgtgaagctgagaattaccatgttaagctaagaatcaagtcattcaacatcccagaattgttcattaaggtcccagaaaatgcaaccattggatcactgaagagagctgttatggatgttgtcaatagtataatggaaggtggcctacgcgttggtgttcttcttcaaggaaaagatatccaagacgacaacaagacactttgtcaggctgggatatgccacgataaaaagctaaataacatagacttcacgctggagtgcgagcgtgagcgcgagcctccctctggagtcattatacaagaacagatggatttcctcaccacagatatggtggagccattagctagatggcttcacaggacacgacggcgagctcccaggccatcgtccctgtttcgcctgcgccttcagacgtgggcgctctagccattgtgcccctttgtaagtccaaggggtctgaagtcgggcagaggcgcatgaggaggcccttcactgtcggcgaggttgaggcgctggtgggagcggtcgagcagcttgggactggaaggtggagagctgttaaaacgcttgcattcgacagtatagatcaccggacctacgtcgacctcaagctgatccacccaaggccgaggaagctattagatggttttatccatcagcatctgcaggcaatgctcgtgctcaatacaacctaggcctttgcttgcagaacgggaagggtgtcaagcggaatcagaaggaagctgtaagatgtgatacctctgctatgtcggtgtcacacaccacttaaaattttccttacagtagaagtatttctgttttctatacgcattcagtggttgaaaaaaaactaggataattggtacactatcctattcatacaatctatgcatttaccacacctcttactagatatattaggaatagacaactgatgttcagttgacgaactactcgttaccctctgatctgatgatgctattgagtaccagactcttttgaagctctttaactcagctaagagaaagtagcttttaatttgaaaaaaagtaatcttggttgggtttcctctatcaatgtaattatgatcatgtcacctggaccaatcaaaatacactaaccagcagatactggactaccagcaagttcccatactctttttagtacttgagttgtgctgaatatgaaagagacttattaatgcaggcaaaatggtatttgcgagctgcagagggagggaatgtacgggccatgtataacatttccctgtgttacagctacggtgaagggcttgcacaggatccagtgcgtgctaagaggtggcttcaactagctgctgattgtggtcacaagaaagctctttatgagtgtggtattaagctttgtgcggcaggagacaaggtcaagtgtctcatgtatctagagctggcgacacggcgtggagaagctgctgctgctcacatgagggatgtaatacttgaatcgctctcggttgtgaatgcgcagcgtgccatgtcggatgctgataaatggaagcctaggacactccatcctagacctagaaggtgaggaaatgacgacgccaaagtgcagaagaaccatatcatcaagatgtccacaccctagtcatctgtggccagaattgaagcacagaaggtcgaagcaaacatgtatgcttcctcggcacccacagccacaggaatgtcagtagccatcctgtggctctctgtataaagccatccattggcagatgtaataccaggagaacttgtagtacagaaagttctgtagcaaatactacttcctcccttccaaattgctaccttaattctcgaatatttgtcaccactagttcatttttgaactaaaatgtgacaaatagaaataacggagcgagtataaaatactttggcttttctagatatgtattttttatacacttaaatacaaagtaaaaggaatgtatctataaatgca

SEQ ID NO: 37904 - DNA, 2916 bp, Zea Mays
attgtctttgtgaataatctaaactatcaaacaactatatatggattataatatatttagattataatctagattatataatctataagctgaaacaaacggacctaaggctatacagctgagagatcgatggggggaggcggggacgcgcagcctttttgccctgccttcgcgagtcgcgccaaccccccccctccccccccccccccccaaaaaaaaacccccagaaccctagcagaggtctcgagcacgagcccgcgatggcgtcggacagcgaggcggcagcgcattctacctttaacgagcacgacagtggaggacggtggtgcgcacgagagcaagcaggaacacctcaatggcgcggtggggcacccccacggttgggcaggaggaagagataatcgggccgggcccagcgccggcgaagcagcggcggaagcgccctctccagttcgagcaggcgttcctcgacgccctcccctccgccgccatgtacgagaagagctatatgcatcgggatgtcgtcacgcacgtcgctgtatctcctgctgacttcttcatcactgggagcgcagatgggcatctgaagttttggaagaagaaacctgttggggttgaatttgctaaacattttcggtctcatctcagtcccatcgaaggtgagtgttgatggattgctttgctgcacgatatcaaacgatcggtctgtgaagatatatgatgttgtaaactatgacatgatgttcatgatacgtctctcatttgttcctggggctattgagtgggttcatcgagaaggagatgttaaaccaaaacttgccgttagtgaccgaaatacacctttcgttcacatatttgatacccattctggttcaaatgacccaatcatgtccaaagagattcatggtggccctgtcaaagttatgaaatataaccacattcatgatgttgttatatctgctgatgccaaaggactgttggaatattggtctccatctaccctcatgtttccagaaaatgaggtgaggtttcgcctgaaatcagatacaaatctatttgaaattgcgaaatgcaagactactgtgtctgctattgaggtaagcaatgatggcactcaatttgctgtcacatcccctgatcgcaggatacgtgtattttggttcaaaactggaaaattaagacgtgtatatgacgagtccctagatgtggcgcaagatcttcaaagaagtgatgttccattgtatcaccttgatgctattgattttggacgacgaatggctgtggagaaggaaatagagaaaacagaaaatgttccacaacctaatgctgtctttgatgagagttgcaattttcttatttatgctacccttttgggtgtaaagattgtgaatttgcacacaaataaggtttcccgtatcctggggaaggtagagaacaatgagaggtttctgagaattgcactataccaaggagacaaaggcaacaagaaggttagaaaaattccttcagtagctgccaatgtcaatgatagcaaggaaccattatcagacccaacgctgctgtgttgtgctttcaagaagcatcggatatatctctttagtcgtagggaaccagaagagcctgaagatgcaactaagggtagagatgttttcaatgaaaaaccaccgccagaagagcttttgtctgcatcagacctaggaaaaactgctacaacatcattgcctgataatttggtgctacatacttctatgggtgacattcacttgagactatatccagaagagtgtccaaaaactgttgaaaacttcactacccattgtcggaatggttattatgacaatcttatatttcatcgtgtgattaaaggattcatgattcagactggagatcctttgggggatggtactggtggacaatcaatctggggcacagaatttgaagatgaatttcacaagagcttgaggcatgataggccttttacactttccatggccaatgcgggacctaacaccaatggttctcaattcttcttcaccactgtagcaactccatggctagataacaaacacacagtgtttggtagagttgtgaaagggatggatgttgtccagcaaattgagaaggtcaagactgacaagaatgacaaaccatatcaagatgtaaaaatcttgaatgttacagttcccaagacataagcgcgtgatcagttgggttcggaaattgtgcctgcactccttggttggacatattgctaaacctgtagaagctggagtcttacgagatcagctgtaatgctatgggtgaattgagcacaccttgggctgctcttgacgtcggggtattggaaccttgcaattttcaggatcgatggtaccacaggaattttaggtttacttgctttgattgcagaattatagggcagaaggttgtagttttgtaacgttgagttaattttaagtttagctgctttgattctagaatcctggggccaccgggcctgcggcgtagacactcactggttttgggcgctgacctggccttcccccaatttctgcgtcagcaaatgtacggcctgggaagaatctttgatgggtcgtcgctgtctgcagggtgcagctggcagaatggcctttgattacactacactaagaaatttctacttggggatgtggatctcatcacttcgataacttatctgaagtactacgtcgtttcgccaagtaactgcgtgtacgtcacttagcacattcatgtacaccgtattatatatccatgtaccctgaaagaatggtttgataaaaaggaagaagacaacggagatgaaaaaaaagtaaactaagagtctttgccatcacttcgctgtcatctcattcattagtgtcacgttaacttttctttgacggactcatttaaaac

SEQ ID NO: 37905 - DNA, 448 bp, Zea Mays
ggcgtccattagctaggtgtggatgcggaagcggaaagaaactaacccctctataccaggaaagaggattttgggaatgctcacatgtcctgcaaccgagatggtggatggttcaagggtgctttactttgagcaggcattttggagatctccagaaaagccttttagacaaagattctacatggtaaagccctgtccgaaggagatgaaatgcgatgttgagttgagttcatatgcaattagggatgctgaagagtacaagaatttctgtgaccgtcaaaaggatcagaggccacaggcagaagaagtaattgcagtatgtcatttcgaacacaatcttacttttcagactgtttgtttctgaagtttcccccttcatttacttatgcctgttaatggctaaactctggagggacagctgcaaatgaaatgaaggaaatatttacaa

SEQ ID NO: 37906 - DNA, 257 bp, Zea Mays
ctgtacacaatataaaaaacatggtcaggacgaaggttgaatcagttccgaagctacgcgcagggaagcttcggctcaacagcagaaaacggaaccgacctaaagaggaaaagaccgatcaatccatgatagtttgtgtcatgtttatagttatttgttggggggcatgaatgtaatttcaatcgggctgcgtcccatgcctataaatagatgaacagtaactctgtactgttcacgctgattggtattcattcgcg

SEQ ID NO: 37907 - DNA, 3120 bp, Zea Mays
gacaaggatgtcactctctttttctgcattgagctatggtgattcagtagaagatgtatgtctttggtggaaaccataatggtcgttactttggcgacattcaggaggagttcttcagcgccttcaaggaggagatggagatcaagcgacaactcgagaaggtgcaggtggcatagagggatcattgttgcccattgaagaaccactactagaataagaaagtccaccaattttttcagcaccattatttccagcttcattgtaactgctagacaaaataaggccccctggtgctttgccatcatctctgcttggatatgaggcactgacaggttccctagatgattctagatttgaagattatcttcacagactgaaccaagattgtgagcacattgtattgctaagacaattttgtcgtacaactttctttcagatgtcaagaggtggatcttgtttctacagtgagttggtgatctggagacgatcgagtgtagagtgttgaaggcacatctccaatattcctacacaaaaacacaatgcacatcaactaacagaagtgcaataccctctcatttattagcctcatcaaactgaattgaaagacaacaaactgaactgaaagtcaacatacatgccaggtaactgtattgcaaaagaatatggtacttatgcacctaaggagaaagggaagaagcatactttttttggctctggtatgtgtagctcccattttagattttaccaagtatcaaatgtacatttcttattgtttgatgactaacatcatgcagaggtattaattttaaaaaatgacgctgaaccttaaaatatattcaaaccattcatttacatcatgcaaaggtatgatattaattccatggatcgatgagttaaatggctattttaagctaaagcttgttttcctttacaagaggtggttttatctaaaagaatatctttggagtggttcttttacattctatgaaaccatcctttttatttgttgccacatgtcagacgtcatatttaaatgtgcatacacaaatatactaattgttttagctgacctagagtttatctaaaagactcggataggctgaatgtatgagttgtttcttgctgtaaatatggattggtaacgaatagagaaattaggtttgctttgtagtattacaaaaatatatgaatccttgagaagagttctttctagaattgataaaatgaattggaatgtggagctgtggattgatgaatctatcaaacctattctacaattgtagcctgcaaatagtaaatacgtacctctgtgtgttcttaagtcttaacttaatatcctaattcttggcaggcttcatgtgttgtatctttctataaatatgaacaaagaataaggttgatggaatttagttgattattaaatgatttgtaagtgctcaaaatggatgacattaacttaattgcagagcaacattgtatagtcgattaaccgtgtttgtaacatatttattctctcatctttgtgttggagtgcttgcaacatattttgtacttgcatcttcttttggtagttaagagtgtaaccagacaactcatccattttcttccatttgcacccaaactttcattgtcttattgttgtcaagcgcataatgtgatcatgttttgcttggggtggcatgaaactatagtgacaatatcagtgtggccatccagtttctgtacaattcttgactacaggtcccagttcaagttagtttgccaaatttctatggcttgtgcagctagcatcttagtgctctttgcaaaaaaagagtattattaagggtttagtctttgagctttctacatagaaggggctacttgaaatcaccataaattttcattgctttcattctctcttttggtatttcagtttggttatggtttaactcttcttttgctatttgtgtcgaccatttatgtcacaataacttcactcaatactctgtacataactgactggtcatgatatcatatttcgataaagtatttatgacaatctaagacacacaaatggtctgtggaaaacctttggatggcaagcttgtatcgtatgccttccaaattttatagtagtaccattttttatttttgtttggatacctcttctaacagagatcttggtaatttgaacttatatggtcatctggtgcctgagcttggaaaattggagcatcttcagtatttgttatgatcaccgtaggcaggttttctccacacagatgggtttgagcaaccaggacattgttgcactttttggtggtcacaccctagttggtggaatcagggaagatgccacaagaacaggtttgggtttgagggagcttagacgtccaaccctttgatctttgacaactcttcaaggagcttctgagtggagagaaggaaggccttttgcagctaccaagggacaaagctctcctctcttatccatccttctgcccacttattgacaaatatgtagcagtatatatatctttgatccttgtcatttgttcggggtcagtttatgttaacctgggtggctgtaataaatatttgtcggccttgtgttttgttatcttcttttctcttgaatggttcatttgaagatggggtgaactaaactgaatatgtagtctgtatgtttttatggttcatttttcttttttatttatctatcatatctatcggagaagctttgtcatatgaagcagagtatggtaggttggtggggcattgcagtgcagtggcagcgacactctgattaactatgccaacggattgatcattgcatttcctctgggtaactcagcaggcaaggggcctcgaaatgcaatggttgtcaacaaagaaattgtgacagattggagtcgatgatatatatgtcgtcactttcatgtaatcgttatacactaacattctgtcgaataaagactagagtcgataataatttgccgtcgcaatgcatgggtactatactatttgtttaataagataaataaaaaaggaaaccctaatggtacttagatgtatagttttgtgagattaataatatgccatgtgtgaattgatccctggtataattttgtgtctcac

SEQ ID NO: 37908 - DNA, 403 bp, Zea Mays
cgcgaattcggcttcgattcaactcactgtgtgtgtgatggtcacacctcgccgtggaccaccatgctatttatagccacggcgacccgacagacgatctccggccacggatagcattgctagcgcatgcataccacgtcggtaggaggcacaatgaggcagatcgtggaatgagtgacaccgcggcgaaagttaccgagtcaaggtggccgccggtgaagaactccggctggactcgggagatggcgccacgtacgagttatccatccccggcgttatccgttcctcaccgggcacgaatcaggacggcggcggcacgaatcgcggcggggatcatcggcggcgagttgagttggcgtcctgatccgtttcaggttactgtacctgtaatatcccaaaaaaa

SEQ ID NO: 37909 - DNA, 1454 bp, Zea Mays
cgcaaagccatcctttgccacccgtgcgtcaatttccgcgccccaaacaaccaagcctgcatttgctttaaaaccagcgtcgtctcatgcacaattccatcctcctcctccgagagctacagctgccgatcgaggcaggcagccaggcaccatcaaaccaacccgacgcaaggaaccgcaaccaccgcctcgccgatgtcggcgacgacggcgcccgtgcgccaccggacgtgccgcatgtactggtgctaccagtgcggccgcgcgctccgcatcatctcctacccgtccaccgacgtcttctgcccgcgctgcttcggccgcttcctccacgagatcgacctgccggcgcgccccgcgttcccgccgccgcactttctgccgcacccgttccacccgcagcgccagcacgacggccacccgcgccgctgggtcatatacggcggggagccggcgacgacggtaccaggccgcgcgttccgccagcctgctgcgccggcgcagggacctgccacgcatcctgctcctgcgccggcgccggttcgacggcgcgtgccctccccgccgccgccgccgccggtactgcggcggccgaccacggccccggccgtcgacctcgggaactacttcacggggccgaacctgaacaacctcatcgaggagctgacgcagaacgaccggccggggccggcgccggcgccgccgtcggccatcgactcgctcccgacggtgcggatcaccggggcacacctgtcggacggctcgcagtgccccgtgtgcaaggaggacttcgagctcggggaggccgcgcggcagctgccgtgcaagcacgtctaccactccgactgcatcgtgccgtggctccgcctgcacaactcctgcccggtctgccggtaccagctgccgggagccgggtccacgtccaacggcggcagccaggccgcacctcgcggcggaagcgacggcgacaggaacagcaggaacggggagagggggagagagcccccgacgttggtgcggtgggggccgttctcgtggctgttcccaccgcacgggatggacgaccccgacgacgcgtgggagcacgggcggcgcggcaggcacgacgcggccgacgccggcgcattctacgcttggtggcgctctctgtttctcatatagacgacatgtgtttccagagaagaacgcgcatcctacccagtaactgcatcaatgtcaacggtggaagcctgatgtgaagatgtagacctgctcttgtaggaatgaaatggcacccactgtaaagacgagtaaattacacgtcgttaaaggaggcaagctccatgtaaatcgaatgcctggatgacatatcatgttaacagtaatttctgaaacgcacatttctatgggatgtttctgaaacgcagaattgtaaaccagattcctgtttctcgtatcaaaccattcaatttaga

SEQ ID NO: 37910 - DNA, 1389 bp, Zea Mays
ctgggctcttcaaaaatgcagccgacgctcatcttctggccgagtgcccatctccctccgccgtgccctgggtagcgtgctccaccgcaccggtcgctgctttccccaacctccacggcgctcccttcctgcctcagctcggaccgcgcctagccgagcggctcctcccacatgcgctcctctgtctcccatggcgcacgcgtgccccctggtcggctgctgctccctgcgctcgccgtggctccctgctgtagctcgcccccagctcgccgcacggctcccatggcgtgctcctctctgccaagccgtcgaatcccgtcttcctctgctcgcgcgggccgcgcccctgcttcccctccctagctgagctcgccggttccctttccccaagctccacggctggccgtgcccagcgtcctcctctcagctccccacgcgcaccggcttgctccctgctcggttccgtgaccgcaccgtgtgcccatctcctgtgcgcgcgtgctccctccctgttcctccaaaccagttgagctcctccccatggccgtactgagctccttccctacgccagttggatctctctggtgctcgcccagtctggcgcggcaaacggggaaagaaacagccgagttcctctgcgcgcagccacgtcttctcgctcggcctgctccggatccgaagctggtcaccctgtgtgctcggctttgccttgtcgcaaaaccccgacgccgtcgagcctcgctgcccatcgcgaagttccctgctgtcagcctccgcacctgtcctaggccgtcgtagccagtttgcctccgtcccgtggtggtgttgtgctgccgttaagtcccgatatcgatccggtggtcgtcgaagtgaagctctgaacggattcggccacatccagcactacccatgtcgttgttgttcgccttcgtgctgtgagcgacaacatcgtcatttccttcatgtgctcatcctcgatctccgcctcaccatcacccttgatcacagcactgtgtcgacgacttgcgatcctcactctcgcgctcacgcttcgtcgaatgccactccagtactcgtcagaagaagagcttcaacagttgattactgaagaaaagaagaaccctgggtgacatctacttagtactcgacgaaaagtctgaagtagaatttatcgtcgtgtccatggaagtggagcgacctaatattggtacgttaattaatcgcgtgatgctgaagacgagccaagtcgaccccaagcgcgggctaatccgcatggtgatgctgatggacgaacctgcctgaacaaatgtcaagacaaaaggatggtcgtcaagtggtcgccacctaacaaacactaacatagtgtttattccaggcaagccccggtac

SEQ ID NO: 37911 - DNA, 4092 bp, Zea Mays
ctccaatcaagacaaccccatatctctagtggcaatccagtagcgcgccgcctctggccgtccgccgtcgtcgccctctccctcgtcctcgcccgtcgcacgtgttgtgtgatccaggtgactctgcttccctcccttcccatcgccatctctctctccgcactatggccctcgatttgattcgggtctgagcacttcatcccattccccgccccagatcacgcccaccgctgtcctgttcgccttccgccgtgccatcccatatccaccgtgctccccaccctccctactcctccccgttgggtgctgacctttttccctctcttacggaaatcatgcttcatctggtgatgttcttaatatggagcaacggataagcttatccgtgtgtcagtttctctaatatctaagtagggtttcccaccgtcccccgttacgtctagtatgccattagttttaggctgtgtctgatccattaatggcactgcaaccaagacgtgccatcgtccagtcgcaccatcacaagagccgacaaagggtaccatactcttttttgacagtgaatcaactgacactgtttgcacccagagatagagagatagaacaaatacacaacaattttgtaaaaaaaaagtcagtcctatgtgtggggatttcagaaattacaagcaaatcatttttttttctttaacaagttgcagcaagaaacttctttcgaggagcgaaacatgcacctcgacattggtggcggcatttattttgttcttgatttgcctttcccaatagctacgatgcacactactattcaactccgcacaccatttctgctcagtgagcataattcacacaccaataatcttgctcctagcagcggccaaaggcagatccatggaggttatgactggggcactaccgagcctcatccccaagcttgctaatctagtcgctggtgagtacaatctgcaaaagggtgtcaaaggggatatcatgttcctccaagaagagcttgagagcatgagggatgcactcgaggagatctccaaggttccagcagaccagcttcccaacagagataagatttgggctaggaacgtgagagagctctcctacgacatagagcccaagattcgccataaaatggctactgaaattaggacgatcaaaaggcgcatcgttgaggtgcacgaacgacatatcaggtatgaaattaatcttggtcctgataagcttggcaatgctgctgtagatccccgaatatttggtcagtacacagagctgaaagagcttgttggcatcgacgagacaagagatgagttaatcgatattatgatggaagggaatgtagtccccatgaagcaagtgtctcaaactcctgacttgaagaaattattcaagagtttgctctatgatcttggcaagtacatcaatgaagaatcgttggatgagagacagctcatcaatgtactcagagaattccttcaagagagaaggtatttaattgttattgatgacatatgggacatctcagtctggaaaatgattagatgtgctttaccagacaatgatatcgggtacattattgttacaaccacacgcatttccgatgttgctgaaaaagttggtggtgcttataagctaaaacctctttcattgaacaactctcgagaattaatgtataagataatatttgggaacgaaaatagagaaaacactaaagacaaagaaatatgtttagatgaggagcttgcagaagtatcaaataaaatactaaagaaatgtgccggtgtgcccctagctattattacgatggctagtgtactagcttgtaaagcaagaaatgaaatggagtggtatgaggtgtacaactctattggtgttggcattgagaacaatctagatgtggggaatatgagaaagattttgtcattcagctattacgatatggcatcccatctcaagacatgtttattatacttaagtatgtttccagaagattataaaattgagaaagatcgtttgatatggatgtggatagctgaaggctttgtccaatatgtgaaacaagggaagagcctatttgagcatggagagagttacttcaatgaactcataaacagaggtatgatccaacccatatataaccaagctggcatgatatatgaatgtcgtgtgcatgatatggtgcttggtcttatatgttccttgtcaaatggagaaaattttgttacaacattaaatggtttgggtcacggatctccatcaaatatgattaggagattatcagttcaaaatggcaatgagagtcaagctatgactctgcaaaccagaaacttgcagcaagtaaggtcggttgttgcctttccggatgccaccgctagtgtagttacggtcttgaggagcttccgagttctacgtgtactagatttacaagattgtgacctttcacaatgttgcagcctgaagtaccttgggaatctatttcacttgaggtatctaggactatgtaacacaagtattacacagctccctgaagaaattgtaaacttgcaacttctacaaatactggatgtatggaacaataaaatgtattgcctaccctcaactattgtgcagctgagatatttgatgtgcctttacattgatggttttactagagtgccaaacgggattgggagcctaacaagccttgaagaactcacatttctaggcatttatgactccactgtggacattatagaagagctgggccagctaacggagctacgggtactgcatatcgttctttttggtgaatggaacgacaagctggtggagtgcctgcacaagctgaaaaagttgaaatatctatatatcaaggaccgcagtggtcaacttaacattggtggtttggatgcctgggtagcccctccaaatctccaaatattgaatacgcgatcgggttgctggttcaccacactgtcagcatcagcatggatgaatccatctcttcttcaggacctctccttatctaccaccgtgagggagttgcagcaggatgacattataattcttgggagtttgccagctctccgctatctaaatctgatgattgttggtgaggatttgggagttcacaatgaaatccatggggaatgcattgttggtgctggtttgttcccatccctagtatactgccagctctggggaaatgtggcgcctatagtgtttcagcgaggagccatgccacggctcagaacccttgactttcggttatctgttcaagaggtgagaggaatcaacggcagggatggtggtatcgacttgggcctcaggaacctgccatcactccagaaggtttgggttcatttggaccctgagggcgctaacaaggcagaggtgaaggaactggaggctgagttgacgcgtgccatcaaaattcatccaaatcatcctcagctgtatggaattcaggatgaagatgcagatgatgaatgatgcactggagaaaagattaccaattatgcagaagctagtgcactttcaactttcatggcactggtctcaaggattgtctgattcagatggattacttctgtttctgtctcagattcagaatgtgatgtccaccccaatcatccaacccttaaggaacatggtgtcatggtgatgaagatgtaaggagccaacttgtgatcatccgctggaaaatggaagagcaatctggtggcctgatggactagcaaacctggaaaattaaagcgtagtgtggcaatgtggcagcctggggaaacctgcaactggcgatctggaggtctggagagaacaaaacgccagtgacagttggggcttaggcttggcaagcctaatattgcaatagcacatatgaataacggttgtttgttgcgactggaagtcctgtttggtttttttacatagtgtttgctgttttcactcatgcctttttcttttgtgttttgtgtactgtcttgggtgttcctagggttgccaaaccgtttttgtgacaccccagtgtcacctagggtttctctcaaaatgccaaaccaagaaccatcattttatgtgaatcaaattaagcatgagcatcaaattgac

SEQ ID NO: 37912 - DNA, 1819 bp, Zea Mays
atacgccttttctgctgccgctgcatcttccactcgcgtcaagaaacgaaacccagctgcaccagcaacttctgccagcagacccaacgaccgaagctttttttttctttcttttcatcgccgccgctcggggttcaaggttcagcgcgtccccgaatggtacgtgactctcgctcgccgacggcctgatgggagtgatctcctctgcttttctcaactcttagattagaccctgctttgctctacttgagtttagctattggtttaagtggatcaatcgtgctggtcgttccttccatgagaatctgcttcagttcctcatgagcaagactagttggatgctgcgacgagatgtttggttgccttttgccgctagtccctcccttctcgtgattcctgaagctcaaccatgcatgtcattcaggctccgttatattatatatagataattgatcttattacttgctgggttatcctagagactgggttctagatactcgtgtgtatcatcagtttaagttgcacttcacttgttttctgatgaaaacagaggaacctctcatcattgtggttgtaagcacctgctctgacagaccacaacagaacggcgtaattttgttttcttcagagttgattaccaaatcgtggcaaagccaaagcccgtctgttcttgctctcgatgatttgggacgctgccatacatatgagtcggatcggaagcggcggcaccgtgatttcgtcgtccctgtaaaaaaagaaccattttttctcctctctctctgaaaactgaacgttgttggtgtggcgcagacgggcacgtacgaggcctccgaccgtcctcctcctcccaactccgccggctaccggaccgacaaagtccggcgaaagcggctgacggcgcagaagaggaaagagatcaaggaggcgttcgacctcttcgacatcgacggctccggtcggtgacgtgctagtgatgtagcgtttatatatacaaacacatgcgcatgtgttcgcccatggcggccgctgtgactttcacctttcacctgcttgcatcctccaggcaccatcgatgcaagggagctgaacgtcgcgatgagagcccttggattcgagatgacaccggaggtacgtacgcgtgacgtgtgccaatggcgacgacaaccaaatcgggcagatgatcgcggaggtggacaaggacggcagcggcaccatcgacttcgacgagttcgtgcacatgatgacggacaagatgggcgagcgggacgcccgggacgagctccacaaggcgttccgcatcatcgaccaggacgccaacggaaagatctcggacatggacatccagcggctggccatcgagaccggcgagcacttcacgctggacgaggtccgggagatgatagaggccgccgacgaggacggcgacggcgagatcgacctggaggagttcatgaagatgatgaagcggacagactttggctctgggttctagtagtcacagacaagccaatcccaacatacattgatacataccatcggtgaaaaatacatatcacctagctactacgctacatatgactggagtattgggatttatttgagaaataatggcgtacacacaccacacatcattgtgcactaactactctagtacgtcctagctacgggttgtgtatttatttacacgtaatgaaacacatactactatttgtactgtcgtttttcagtaaaaaccagtaaaaatcgatatttttattggtggctattttggaatagccagtggaaaaatgcagttttcttaacaaaatgcaagtgaaaa

SEQ ID NO: 37913 - DNA, 4392 bp, Zea Mays
tgggcatcgagctgccgacggtggaggtgcggttcgagaggctgacggtgcaggccaagtgccacgtgggcagccgcgcgctgccgacgctgctgaacacggcgcgcaacatcgcggagggcgccctgggcctgtgcggcgtgcggctggggcggcaggccaggctcaccatcctcggggacgtgtccggcgccgtccgcccctcgcggatgacgctgctgctgggcccgccgtcgtcggggaagaccacgctgctgctcgccctcgccggcaagctggaccccgcgctcacgcgcgccggcgaggtcacctacaacggcttccgcctcgacgagttcgtgccgcagaagacggcggcgtacatcagccagacggacgtgcacgtcggcgagatgacggtcaaggagacgctcgacttctccgccaggtgccagggcgtcggcaccaaatacgatctcatgaccgagttggcgaggagggagaaggaggccggcatccgcccggagcctgaagtcgacctcttcatgaaggccacttcaatggaaggtgtggggagcagtctccaaacggattatactctcaggatactggggctggacatctgcgcggacaccatcgtcggcgaccagatgcagcgggggatctccggtggccagaagaagcgtgtcaccacaggagagatgattgttggcccgaccaaggtgctattcatggacgagatatcaactgggctggacagctccacgacattccaaatcgtcaaatgtctccagcagattgtccacttgggcgaggccaccatcctcatgtccctcctccagcctgcccccgagaccttcgacctattcgatgacatcatcctactgtcagaaggccagattgtttaccagggaccccgcgaacacgtccttgagttcttcgaatcttgcggattcagctgccccgagcgcaagggtactgcagactttcttcaggaggtaacatcaaggaaggatcaggagcagtactgggctgacaagcagaggccttacagatacatttcggtgccagaatttgcacagcggtttcaacggttccatgtcgggctgcagcttgagaaccacctctcacttccgtttgacaagagccgtagccatcaggctgcccttgtattctcaaagcattctgtgtcaacaacagaactcctcaaggcatcttttgacaaggagtggctcctcatcaagcgcaattcattcgtgtacatcttcaagaccttacagcttatcattgtagccctcgttgcttcaacggtgtttctgagaactcacatgcatacgaggaatctagatgatggctttgtctacattggagcactgctctttactctgattgtgaacatgttcaatggttttgctgagctctccttggccataacaaggttgccggtgttcttcaagcaccgggacctgctcttctatcctgcttgggtcttcacactaccgaacgtcattcttaggatcccattctccattattgaatctatagtctgggttcttgtcacatattataccatagggttttctccagaggctgacaggtttttcaagcacttgctgctcgtgttcttgatccagcagatggcaggtgggcttttcagagcaatcgctggactttgcaggtccatgatcattgctcacactggtggagcactatctcttcttctcttctttgttcttggaggctttctcctgccaaaagctttcatccctaaatggtggatttggggatactggatttcacctttaatgtatggatacaatgctctagcagtcaatgaattctattctcctcggtggatgaataagtttgtactggatcaaaatggtgttccaaaaagactggggatagctatgcttgaaggtgccaacatctttgttgacaaaaattggtactggattggagcagcagggctcttgggtttcaccatctttttcaatgttcttttcacattgtcactcatgtacctgaaccctcttggcaagccacaagctattatatcagaagaaactgcaaaagaagcggaagggaatgggcatgcaaaagggacaataagaaatggaagcacgaaatcgaaggacggtagccatgataaggaaatgaaggagatgagattgaatgcgcgtttgagcagcagttcatctaatggggtttcacgagtcatgtccattggcagcaatgaagccgctctgtcaagaggcatggttcttccattcaaccctcttgccatgtcttttgataatgtgaattactatgtcgacatgcctgcggaaatgaaacagcaaggagtgcaggatgaccgactccaattgttgcgtgaggttacgggatcattcaggcctggagtgctgacagcacttatgggtgtcagtggagctggaaagactactcttatggatgttttagctggaagaaagactgggggttatattgaaggagatatcagaattgcaggctatcccaagaaccaagcaacatttgcaaggatttctggatactgcgagcaaaatgatatccattctcctcaggtcacagttcgggagtctttgatatactctgcctttttgcgccttcctgaaaagattggagataaagaaataactgatgatataaagattcaatttgtggatgaagttatggaactagtggaactcaacaatctgagcgacgctatagttgggctaccaggaatcacagggctttcaacagagcaaagaaaaaggttgacaatagccgtggagcttgttgccaatccatcaatcatatttatggatgaaccaacatcaggacttgatgcaagagctgcggcaattgtcatgagaaccgtgcgaaacacagttgacaccggacggacagttgtttgcacaatccatcagccaagcattgacatctttgaggcttttgatgagttgctattgttaaaaagaggaggccaggtgatctactctgggaaattgggtcgcaactcccagaaaatggttgagtattttgaggcaattcctggagtgcctaaaattaaagataagtacaatcctgcaacgtggatgctggaggtcagttcagttgcagctgaagtgcgactaaagatggattttgctgagtactataaaacatcagatctcaacatgcaaaacaaggtactggtgaaccagctgagtcaaccagaaccaggaacatcagatctttatttccctacagagtactcacaatccacagtaggacagttcaaagcctgcctctggaagcaatggctgacctattggcgcagcccggattacaaccttgttagattttccttcactttgttagttgccttgctgctcggctccattttctggaggataggcaccaacatgggagattcaaccactctcaggatggttattggatcaatgtacactgctgtgatgtttgtcggcatcaacaattgttcaactgtgcagccaattgtttcaattgagaggacggtcttctacagagagagggctgctgggatgtactctgcaatgccatatgccattgctcaggttgtcatagagataccatatgtgtttgtccaaacaacgtattacaccctcatcgtatacgccatgatgagtttccaatggacagctgccaagttcttctggttcttcttcatttcctacttctccttcctctacttcacctactatggcatgatgactgtctcaatctccccaaaccatgaggttgcatccatcttcgccgcagctttctattctctgttcaacctcttctcaggctttttcattccaagaccgagaattcctagatggtggatctggtactactggatttgcccattggcatggacagtgtatgggctcatcgtgacacaatacggagacctgcaagaccccatcacagtccctggcgaaagcaaccagacgattagctactatataacacatcattttggataccatagggattttatgccagtcgttgcgccagttctcgtgctctttgcagtattcttcgctttcatgtacgcagtctgcatcaagaagttgaactttcagcaacgataggaacaagatatggcagaaaagctcttgagagtattttttctttttttggaaaatacttccttttctcctttcatttttgagtccctttaatatattgcaatgtatatagggtgtagcttcggtattccacacatcgtcaaatgtggcgaggtcttatacagatttctagccgtttaactgtggaacattgtaatttgtaagagcacatctatgagaaagttttgttcatgcccaattcatttcacatggaatctttcgtgaaaccaactattcaattggaaacgagtataaggttatgtaaaag

SEQ ID NO: 37914 - DNA, 448 bp, Zea Mays
ctcccacacttggccgcccctccctcctttccccttgggctggccgtcctctcctcccatggcagcccctctccacgtcttcctccctctagatctcccccctgcgcagcaaggatcaagaagaggaggagcatgttgaattgaaggggaagagaggatcaaggagatgttcttccccatctcttcttgcagaatttcttggtgaaaccctaggtatggatgagatccttgttcctccctgtaattatgtgcttttggaggttgtggatcatgggaattaaaggattagaggttggattagatgtggggttaggttttgatctcgaatttagttttctgcagattggcagattcgacagtttctgttcatgccagttttccgtggtcttagtggcctcaaaaaaataaaatgtctatatatgagtcgtagataatttgtagatctttc

SEQ ID NO: 37915 - DNA, 1913 bp, Zea Mays
caccccggcgttttcggcttgccaacagagcgcctgcactgcgcgctacatccccgaagcaacaacgccgcggtggatctggctccggccatggcaagcgtgaggcgcgggccaccggcatcagtcgggaaggagaaccagcggcccaagaaccttggccacgggaaggcgacgactgcgacgacgaccgccgagctgacgaagcccacggagccggagccagcgcccgtggggtagcgctaacgccacctccaccgccgctgaggctgtcgtcgctatagctccgcatggaggacgaggcggcggctgcgcaggcgcagacgcaggcgccgcccgtgttcgtcgtcaggcccaggagcagggagctgctcccgccgccgtcctccaactacgaggcgtgggatctctccgacagcgagtccgcaccggcctcctcctgggccacgctccccaacaggtacaccgtggcaccacgcagcgttggagcgcaaggtcaagcgagatcgcggcagccggggcgagcggcgtcggcgtcacgagccacgacgggccgagggatgcctgcgcgctatggccggggctattggcggtggccggcgatggattcggggtctagcggtgacccgattcgaggtgacgtcctagggactgccgccaacgctttgatttcttcctttcagcccaacccggcccaaagccgggagatcacggcactccgtccaaccctcgacgccaccgatccccctttccaccgcctctcatcctcgtcgccggtgaagatgattccgcagagccagagcagctccctgcagcaccttcaacacgtcgagaaggtgccctgtgatgaagatagcagataaaggagttgatcttgttagaataaccgtccagggtaggaaggaagttgatgcctgcctctgagatcaagaatactctggttcagaagaagatgaagagcctcatcagtagaggaagatgcagaaaaataaatgctatagaataacattaaaacacgagccacgggtgaaaccctcagggccctcgcactgatgcagtcagcgcgcactgccacgagttcatgatcgttatgaaggtaaccaacccactgcctgccctcatatcgtcaggctgtgggttcctgttgttaccagttatgcgccacaatcctcactaatcccatgctggagagacttttggaaaatcaacatctgttttagaatgctgtgtgcagaattttgctgtccaatgttactttgtttccatcaaattaactgtaaatatatgtatatgctctcaattggtttttatttgaagcagtatacatgccactaataattcatgataactcactgcttaattatgttttggttggagtaggaaattcaaatgattttgtgtgaggaaatcaaaagtgcttgtgaatatcgtccatttgaaaaatgtgattacagcgcaaggattgctaatgagatatgttgcaagaagctggagtatgtaattgagaagttggataccatgcaacagaaccttgaacagagcactgatgatgtttagcgagctggctacatattagtaagtgtacctttttttgcaataaagtgtaaactacttagcgaataagaggatactttatgatgacagtatccactcaatcaagtgattgtgtcaatactttgccgtagcgttagcatgattttagagcttaggataagaaataaagtttcaaattttttgctctcccttgttatctcaatcacttttgccacgattcttaacgtgtattcacttcattgccttttagatttatggtatcattagcacgggcaccttactagtagttcataatccacagcatcgagaaacaaatcaggtttcacactgcatgatacatggtgagggagtaatgcatgaac

SEQ ID NO: 37916 - DNA, 3207 bp, Zea Mays
ggcgcgtatacgagcgaaggaaacggaagtttaagttattcccaaattgaacggcccaaagggaaaccccaccacaaccggtctcgagtctcgacagatcggcgtcttcgatgccgccggcgcaggcgccctccagcggcggcgccgcgtggcgccagctgctcctgctcctgacagtcctcccgctcacgctcgctgcgctggctttcgtgctccagtggcgcggcggcggcggcgtcgatgaccctaccactcgctggccctcccacgccttccccggcatggccgagcccaccccaccgtccctcccctcgtccgactgcgcagacgtgctcgtgggatcctccgccccctccttcccctacatccgcggctggtcattcacctccgactcgggcgctgctatgggttctgtagaggaacatctccaacccaaggtgtgcgtgcagacgagcacctccgcggggcttgagcagatcctgccctggctcttctatcacaaggtcgtcggcgtcgcgcagttcctgctcttcgtggagggcaaggcggcgaaacccaatgtcgcgggagtcctcgagtcaattcctggggtaaaagtggtgtacagaactaaggatcttgaggagcggcaggcacggaggtcagcttcgttttctcagtcccctgtttccgataacagtttttcttgtgtgtcatttccacataaaccccatataaaaaaataactgcatcttgtttcaactttcaaagtgagaaccaaaagcatagggttgctggtgtagccagacaaaactaagtcagaccgcatccaaccattgacaattatggataaagggagaaattttccatgcctagttgcctactattaacccacttctaggacatgtcgaagattgtttaatagggaatatacgcggaatttagacaggtttgagccctcgatgcgagataataccctacatcatgtttgaggtggttctgttgttgtattgtatgttctaatctgatgattctatgatctgatgctctcaggcggttccctgtccctcttttaatattctaaggagtgacggaagttacatgataggcaccgagtcggctatcaagttcatgatggaaccgagtcggtacaaagtcatacgtgaattgaattctatgtcttcgagtttatctcttattctgttgagatcttactatatctgcgcttctagaatcctcctggtggttgtaggctcccctggtcctattgccgagtccttcggcttgtggccgagcccatgagctcttttgctcaggctcttctttacgaagcttggatagatgccctagtatatattattgataggacatagcatgtcataatgtctggcttggcatgttctttgatagagtttttatcactcatctctgtcaccttcctgatgtattttattgcttgggctcaagtcgaatctggaatgagacttggctttcaggatttttctacaaaccttgcaactatgaactctttgtgaagcaatccctcaacatggagatggctattgtaatggctcgggatggtggcatggattggatcatacatttagacactgatgagttactttatcctggcggagctgctgagtattctgttagacgtttgttagctgaggtccctcgtgatgtcgacatggttatttttccaaactatgaaagcagtgttgagcatgataatataaaagatccattcagcgaagtatctatgttcaagaggaattatgatcatcttcctaaagatacttactttggcatgtataaggaagcgacacgaggaaatccaaattattttctcacctatggtaatggaaaatctgctgcacgaattcaagaccatctccgtcctaatggcgcgcacaggtggcataattatgcaaagagcccaaatgagatcaagttggaggaggctgcagttctgcattatacatacactaaattttcagatttgacatctagacgtgatcgctgtggatgcaagcctacaaaagaagatgttaagagatgtttcatgttagattttgacagagcagcttttataattgcatcaactgctagtgaagaagaaatgcttcgctgagaatctgagaatcattaggattacgtgcggaggaagataaatgtgtccataaggcttaggatctagaaggtggcggattcctactattgcaacgactcaaccgattatgtgtttatgttgattttgaatggtttttacccaagcgaattttatagaagctagttgaaaagctgagctttcgacagtccgtagcagcttttggtggccagaagctacaaaaagctgaaacaaacaggggcaatgtattgcttcaagatgaaccagactgggaatagatacattggctgaaagcttaaaccgcagcctgccctgaatctggaataatcagactacactgtactatttcatggaaagatctaatatttacaaacacttttccagctgcctcttggtgccagttgcatgcattaaaattgtgtcggtccatttttttttctccacagagaaatggattttagtgttcggttcgctaatcttttttcttgtaatgtttcttgtttctttttggctaggtacaatgaacgagtcgtgtggaccgataagcagctgaacttaaagcttctgaggaaaggagtgctgactcgcatatacaccccaatgacaattgttcagagtctgcgcgaatccggtgtcttcacttccgccattacagctggccaacctgctgtgaatgccaaactctcacccaaggaaaccaatgcgcagagccaaaatgttaccgcacctgggaacatgacaagagtggtcagatctactgattcaaaggcatctggcagaaagatactgcaagccgttgatcttgccttcagcgatactaatgtaactgctgttccaccgttgtcgccgcccagtttggacgaacacaggcatcatagtgaataataatgtcatacgtatcatatatatattttttgctcggcgtataagttcctaagaaaaggaggaaaagaaagttactgacatcttcgttaagagaagtgctaacatcagcttggatggtcaatttttatgcaatcgagctttatttgtttcatttttaaactaaaattaattaatatctcgaacgaattttgaagaaacatttggattgtggt

SEQ ID NO: 37917 - DNA, 1441 bp, Zea Mays
gccgcaatccgcaactctgcacttggggttgggctcaaccgaatcgcccccgcgccaggccgttctcgtcgacgccgccgaccaataaggagcctcgcacgccacgccaccaccgccgccgcaacccacgcgatggcgccaccggactccatctccacgtgctcctcccttcccctcgccgctgcgcccatgtccgaaccgacccccttccccttcgctgcgtcgccgcttccaaacccgctcgtagccaccgcctccttcctacagcaccacctctcccgtttggcttcccacctgaacgtcccgcgccccgccctcgctgccgcggctgcgcgcacgccgggcccccagggcgcctccctatctctctctctcgcgcccgatgaggtcgcgcgcgctcttaccggcactcccgtcttcactgtctgcaactccagcaacgagttcgtgcttgtctccgaccctgccaccggcctccgctccctcggcctcctctgcttccgttcggaggacgccgacgccctcctgtcgcatgtgaggacgcggcaaccggtgctaggcaagggggcaaaagtggtgcctattacacttgatcaggtctatatgttaaaggctgaagatgaaatcgggcttaactgcttttgatggtgttcctgtttttcagtcagatctgctggttgtgaagaagcagaagaagcgctactgtccagtatattttcaaaaggaagacatagaaagagaacttacaagggcttccaaaggttcaagagggtcagccttatctaagaaaattatggttggaagtttggaggatgtcctgaagaaaatggagataaatgaaagagattctggctgggatgatttgatctttataccccctgggaagagcctcaaccaacatatcaatgaggtatcagcatgattttgttccacggtgatagctcagagtttgaacagactattcactttaaatgctatgatggtcagccaaacgaaatatcaaattgctgcctgagcttttcctttggatagctattttcatggtcagctttgtcagggaaaattaactaaagtgatagaatatggctgtgaaacaattttcttgttgcttcgattcacaaaattaacacaggttacacaagaagatttgatgaagagtaagttgcgacattggtaaatcaccttgcaatatagtttcatgaaaggggttatacaatagaaaaagagacgaatgtttatggccctattcggatgcatagtatataccatgattttttaaatattttggttttcgaatgctaaggtgtttggacgtcacaaccttgtagttttgaaaaccatgcttttgctaaaactatagtcgtcttgtttttttagaagcttagcttcgtgcttaaactgttgtgtttgtaacctccgtttttggtatgagtgatatatt

SEQ ID NO: 37918 - DNA, 1465 bp, Zea Mays
ttcaaacattgcctaccggaatgacaccaacaatatgcagtttaccttggtggctatgacaaggaggacaaggcagcaagggcttacgatttggcagctctcaagtattggggcactacgacaacaacaaatttccctataagcaactacgaaaaagagctagaagaaatgaaacatatgactagacaggagtacattgcatacctaagaagaaatagcagtggattttctcgtggggcatcaaagtatcgtggagtaactagacatcatcagcatgggagatggcaagcaaggatagggagagttgcaggaaacaaggatctttacttgggcacattcagcaccgaggaggaggcggcggaggcctacgacatcgccgcgatcaagttccgcggtctcaacgccgtcaccaacttcgacatgagccgctacgacgtgaagagcatcctcgagagcagcacactgcctgtcggcggtgcggccaggcgcctcaaggacgccgtggaccacgtggaggccggcgccaccatctggcgcgccgacatggacggcgccgtgatctcccagctggccgaagccgggatgggcggctacgcctcgtacggccaccacggctggccgaccatcgcgttccagcagccgtcgccgctctccgtccactacccgtacggccagccgtcccgcgggtggtgcaaacccgagcaggacgcggccgccgccgcggcgcacagcctgcaggacctccagcagctgcacctcggcagcgcggcccacaacttcttccaggcgtcgtcgagctccacagtctacaacggcggcgccggcgccagtggtgggtaccagggcctcggtggtggcagctctttcctcatgccgtcgagcactgtcgtggcggcggccgaccaggggcacagcagcacggccaaccaggggagcacgtgcagctacggggacgaccaccaggaggggaagctcatcggttacgacgccgccatggtggcgaccgcagctggtggagacccgtacgctgcggcgaggaacgggtaccagttctcgcagggctcgggatccacggtgagcatcgcgagggcgaacgggtacgctaacaactggagctctcctttcaacaacggcatggggtgacgacgacggtacggtccaacgaacggagagggcagaagctagtggctagtgatagggggttagctagctagaagatcccaagtctaggttagagttatttggtcatcgttgtcgtgtttcgacgtgctcaggttctggttcgattctgcacaattaacccgtgcatgcacgcgtgtgcctttctggaagctggtaatggcaggtcagggtaagtaaagttagtgttgtaagttatcctgatgtgctgttaattttgggtagtttcagaaggtctagccaatctcttcggaggactcaattgtcatcttgcttgcactcgtgc

SEQ ID NO: 37919 - DNA, 587 bp, Zea Mays
atatatttgggtacgtacggggagaagggaatccagggattccccggagcgagcacggtcctggagcgcagcggtgcgtgcacgcaaatcagcgtctgagagcgcggagacctcgagctccatggagttgatacgcgccacggtgtctgcgtacttcttccgcgtggcctccccgtcgtcgcggccgcccccgccgaatacggtgcccagcaggccccccacgcgcgacacgtgagagccacctcgccgcccctgcgtgcctcggccgcgctggctgggccggaaccgaacccggcagccgccgcagcccccagccagaggcggtgaggagaggcccgtggcagacaaagtgtggggaaagcgcaacgcaggggtaacggctacggtggccgccgaggcgtgaggagtcatggccatgggcgtgcgcttgatgtctttctccggcgcctcgtgtggtgatggtggcggcgcgcacggcgacaagccgccgcgtgctctgggtggtgggcaacgactgtggcgtggctgtggagtgtggatggaggcgtaggagacgacggataaggaactaggtgggccgacgaccg

SEQ ID NO: 37920 - DNA, 3120 bp, Zea Mays
gcactcgttggaaacttggaatgccctatcagatcgcatcgcacccaaaaatcaagagcctgctggattcaaacggctgattcaaacgaccagagtccggacactcacactcccctgctgcgcctgccgcctgcgtttcggccaccgcactacttccccaatccccttgatatcgcccacccgcgctcgccgccgccgctgggcggcgatggaaaccctaatggtagaccgcgtccacagtagcctccgcctcttcatgtaccgcaacgccatattcctctgcgagcgcctctgcgcacagttcccctccgagaccaatgtgcaattgctagcaacctgctacctacacaacaatcagccatatgctgcatatcacgttttgaaagggaagaagctgccggagtcccggtacttgtttgctacatcatgctttcgaatgaacctcttgcgtgaagcagaagaaattctatgtccagtcaatgagccaaacatggaggttccaagtggagcaacaggacactacctccttggagtgatctacaggtgcacaggcagaatttcagctgcagctgaacaatttacacaagcgttgactctagatcctcttttatgggcggcatatgaggaattgtgtatattaggtattgccgaagataccgatgagtgttttagtgaatcgactgctctacgtctccagcaggaacacacatccacgtccactttggtgaagtcgaactttgccaatgaaaatcgagttctatcatccagtgtctctgcaagttttggggatattattcctaagcaaatcaaacagcttcatgctaacaacataacagaagtatctggttatcctcatacttctatcatgccaccaccactatttaggaatgtacatgcttaccagaatacaataagtggcgatgctcccactaagcagaaagctaatggagtaagccagccactcagaaggaaatacatggatgaagcaaggctaaagaaggtttctggaaggttgtttaatagcgatgcaatgcctcgaagaagtcaaagacttaaagatacaacaacaaattcaaatacatctcaaattggaggaaatggaacagatcatttgtcaggtaaattgcgagtaaactcgtccacacaatcaaaattgtgttcaacagccatacgttctgtgcaagttaggaaaggaaaaccacgggctacagaaaattttgatgaaggaagtagatatgaagtcattgatgaaatgtggacagacaatatgtcaggaacttcatcttctgtaagtacagctgatggaagatcctttgagcaagatagagctgaacgaattctgttgcaagactccaaagtggcacttggtattagggagctattgggacttttccgaacactgggggaaggttttaggctttcttgcttgtttaagtgccaggaagcactggaagtctacagaaaactccctgagtcgcagtttaacactggatgggttctatgccaggttggtaaggcatattttgaattagttgattatttggaagctgatcattattttgagctggcacaccgactatcgccttgtacgcttgatggaatggacatctattctactgttctttatcatctgaatgaggaaatgagactaagctaccttgctcaagagcttatttccattgatcgactatctcctcaagcatggtgtgcagtgggcaattgctttgccttgagaaaagatcatgagactgctttgaagaattttcaacgttcggtacagcttgactcaagatttgcatatgctcacactctatgtggtcatgagtattctgcactggaggattatgagaatagtatcaaattctacagatgtgcactgcaggtagatgaaaggcactacaatgcttggtatggccttggggtggtgtatcttcgccaggaaaagtttgagtttgctgagcatcatttcagaagggcatttcagataaatcctcgctcttctgttctcatgtgctatcttgggatggccttgcattctcttaaggttgatatcattgatcgacaacaatagactactccctctgattccaaatatagaggaatgaagaggcactggaaatgatggagaaagctatagcagctgataagaagaatccactgcccaagtatcagaagtccttaatccttctaggactaatgaagtatgaagaagctctggatgagttggagcggctaaaggagattgcaccccatgagagtagtatgtatgcactgatgggaaagatttacaagcaactcaatattcttgacaaagctgttttctgcttcggcattgccctggatttgaaaccacctgctgctgatcttgctataattaagtccgcaatggagaaagtacatctccctgatgaactgatggaggatgacctataagttcactcaagcatcgtgagaaatgaacatttacttcgggttcatgatgacccgcctgtgcttcgtgttcctggcctagtggcctgcttgggcttctcaagtggaactcggaagtcggagctgtaccattagccatccagtttggaatgaaaagaaaaaaaaattaaccatccagttttgtagatttagttttagcctgtaatcagagaacacatgcgcagaagctgcggtagtttaggactctgtacaagtgttggcgaaatgacgcctgtaccattatcaaataacggaaataattaaaggatgaggatccagctgattcaagcagattgtttgtcgcatctacaaaccttttaaaggtgtcacattcaaaggttgaaaacatttcagcccaagtaaatcgatttgaagaagagcggaggaaaagaggatgcttccgcgagtcagcctcctactaactactggcttggaggtgggggataaagctaggctcttcatgcaagcaaagtgtaaccatccgttttcttgctagtagcctgtatcattgctgcatatcctggcatcattaagaaaccatccaaaggagagtgtcagtgatgagcaatttctggaaaagttttactttgcattatgcgatgtgatatatatattttatttacatggtatgttgcatgggcttgagataat

SEQ ID NO: 37921 - DNA, 2107 bp, Zea Mays
tggtgactgcgcagcgacgtccgagggagggagcgaccgctggtgtgcggaacacactgtcggcatggccgccgccctccgcctgcaacgccagagtctcgccgccagcccctttctcttctccgcccatggcctccgcaccgcaagctcgaggtcatcctcactacgctcgatccgggtgacttctctacatgtccgcggcaattgggttatggcttctgctgttgggtacaacgtcaccatgagcgcaggcgtggacacctacaccaagtcttgggaggcccctactgccacgggtgtcagtttttatccagattataataatctgtacactgttggatgtggtgtctacgtctacgtgttcggtgataatatgacagatatcattggttcttgcacgagtatttgcacagataacagagagatcatggagagcgcaaacactggttctggtgcctgtgaagggttaggctgctgcagcattccaatacgtggcggccaaggcttcactctcaaactaggtcgcctcaatagtaccattccacagttcggtgaagcgctctccaatgtcaagattatcttttcgcaaaactatgacttcgttacagatgatgtttacgcaagttgggtggtgaatacaagcaatgttcacggcatgctacttaacattgcaatcacggaccaaccaagctgcgcgagtgcccagtcccaagagaacaaggatacctacgcatgcagtagtgaaagcatctgcgacgacgatctatcaccatcagggtttaacttaccgtatcgtgtgaccaatttgtcacttgatgatgggcttctgatggttacaaacatgctgaatgacacaagctccaacaatatggagagggtagtcctcgttaactatgacggttacaaccagaacggcttctattcaaccgacttctattcaaccgatgaggacgttgtggatgatattgatgagtgccttattccaaataaatgcaatggaatatgccacaatgttgatggcggtttcaattgtacaagttgccctcatgggaaagagtatgatccaaaaaagaaaaaatgtgtcatgtcagctaagcagcgtattctaatttttgggattgtaattgggcttgtttgtggtcttggatccataagttttgcacttggtgcaattatactcaccggtaagtggaaaaaaggcatccaaaggagaattcgaagagagtacttcaagaaaaatcaaggtcatggtgggcatggcactgtttacaaagggattttgtctgatcagcgtgtcgtggctataaaaaaatctaaaatagtggagcaaatagagatagatcagttcatcaatgaggttgctattttatctcaaatcattcaccgcaatgtggtgaagctttttggttgttgcctagaagatgaggtacccttgctagtctatgagttcatatcgaatggcactctgtatgacattcttcatgaaaatattgcaacaaaatgcttgttgtcatgggatgatcgaattaggattgcaacggaagcatcaggagcacttgcttatctacactcagctgctgcaataccaattttccatagagatgtgaagtcttctaatatactcttggacgacaacttcactgtaaaggtttcagattttggtgcttcaagatctttatcccttgatgaaacacatgtggtgacaattgtccaaggaacattcggttatttagatccagagtattattatactggttctctaactgagaagagtgacgtgtatagttttggagtgatacttgtggaacttttgacaagaaagaaaccaatttttatcaatgaattgggtgccaaacaaaacttatctcattacttcattgaaggatacaggaagggactctcgtggaaataatagattctcaagttgtggaagaggcagaccaagaagagattaatgatatctcctcacttatagaagcgtgcttaagatccaaaggagggcatagaccaagcatgaaagaagtagatatgagattgcaatgtctaagaacaaagaggctacagaataaaacacatcttttgattgaaaagggtggagaaatggaac

SEQ ID NO: 37922 - DNA, 335 bp, Zea Mays
tttggtagttgcctgaacgacgcggcctttcgttgtagtcctcaatcgaacatctagcgagtgtgaccgatgagctaaggttgatggcgaacgcaggagcaggggcaggtccgacatttgttaggaaaggagctcgacacccggtctcatgacgagctgctgggtgaaagacgacgaccaaggctgaggcgaagcttgacaacgagatcgaacaggggatgatgatcgacggtattggcgtgtcagcacgacgattctcatacgacgaagaagacagagtagccactcctgaattaggcttttgtcgagcgtctgacgagtgtcgcacgagcctt

SEQ ID NO: 37923 - DNA, 1883 bp, Zea Mays
tatcctccaaacctaaccctagcaacacatttcgctccccacagcggcggcggccacagccacacgttctcgcgcgggatctaattccaaacagcactgcccttgcttctaccgttccccaagtgcgctccctctctcgccatccatctcgtgcacgactgggcaaccgttgccgctgtcgaggtgcccaggtcttcatcggtccctcgtcagttcttctccggcccttcgccgccgacaagctcccccaggtacgcccaccattctcttccgtccatgctttgcgatggtgagcacccactacccaaaccctaactggatctgtcaagtgtttacatgtattttgcctactaacttcgttttttttaattatcggtgtacgtctatgccgtttactgcattcaactctgctcgtttgtttgattcagttgagcagtgacatcgtgagcttatatgctagtgtagcttattggtgtttcaagcaatgtatgtcaaatatctagattagcaatttataaaccacgtaaaaccgtgacagtatcataatggcataagaggttcttttattttgtttgaacattctagtcagagtaagttatgtatctgttttctacatgctgaaggttatactcaaaccacttgtgaaatggctctcaccctatatctttctttagtgaatcaatgttggtattttagtagtagacttcagtcgtcagccatacttagcttttttctgctagtactgtactaatgttttgttcctccaagagaccgggaagtaaaatttaattggttcatatctttggtttatcattgtgtttttttggctattgcagtacttatgttaccaaagcaaggctagtaaatcataccggaaagaatggtgatggcgtcttggtcttgggtctgctagatgcatgcctactgccttatcgcaaagctagcttacctggtcatacgaatttgtagtcggttctgatctaattgcaagtgcatctagtaacttggattttttcgcaaaaaaatatcgggtgttcacgcctggcccctgcgcttgcagctactaaagagacaggagcaaagagttaacaggagatgaatgcccctgaccgttatgagcgtttcgtcgtgccagagggcaccaagaaagtgtcctatgagagggatacaaagattgtgaatgctgcatcattcactgtcgaacgcgaggatcacactgtaggcaatatcctccgcatgcagttgcacagagacccaaatgttctctttgccgggtataagctccctcacccactccagtacaagatcattgttaggatccacacaacgagccagtcctccccgacgcaggcctacacccaggctatcaatgatctagacaaagagcttgagtaccttaagcaagcttttgagacaccaacagaccatcattgaaccttttctactttatgatacaaagatgtgaactatggactacttgatgaactactagatgttcaacacaggaatgcctttggcaaaatttgcatattcactctcccgtcaaactgatacccttaagttcatttgaatctctttttatttcctagaagtatctcgctactttagtcctactaggaaaagttctttgggatctctctttgtaaatgttagtttcgactcttgtttttttccaggttgcatggcatttctttgtgcaattttgtatcgctaaacaacgaaaagttttagttagcattaaccagtggtacatagcaaggcagactgtgtggttctatgggtgtaatgtatttaagaatgttttgtataaagtattgtttctgtaggaaaaagtgcttgatttgacatgaatgtggcagtaattttgatagatttgttgggag

SEQ ID NO: 37924 - DNA, 2129 bp, Zea Mays
ccaccttattaccaagcccagtcattcttttctgctacagtaccgtgcctggcgattccgcgtccacgcacctctcagttagggtttcggactcgaggccaagttcatctccggacgagcataccgtgagccccaacgctccaggtggtcagcttcacttccgagcgcccctctcccgacagccgtctcctcctcaccgctgcttcatcacctagccgtcgccacccatcgcctacagcgacagccgtcttccgtcacagcggagcgcccctcagatccaagggacgctgcacgagcgcaagagcaggttgttgagaaggggaatataatcatggatatcatgcagactagtgactcttcacatcatggaattgtagaaaatagcccgtacagaattccatatgacagacatgcagaaggtggtcaacttggtgcttcatggtattttagtagaaaagaaatagaggagaattccctttcgaggagagacggcattgatctgaagaaagagtcttatcttcgcaagtcatattgcacatttctgcaggatttggggatgagacttaaagtacctcaagtgacaattgctactgctatagtgttctgtcatcggttctttcttcgtcaatcgcatgccaaaaatgacagacggacaattgcaacagtatgcatgttcttggcgggaaaagttgaagaaacacccagacctctgaaggatgtcatacttctttcatatgagatcatccacaaaaaggatcctgctgcagttcaacgaataaaacagaaggaagtatatgaacaacaaaaggaacttattttactcggggaacgtgttgtgcttgtgacacttggttttgatttgaatgtgaaccatccttacaagcccttggttgaagcaataaaaatattcaaggttgctcaaaatgcacttgctcaagttgcctggaattttgtcaatgatggtttctcaaagtcaagcttccatcagatggcgagaaggtctggtggcaagagtttgatgtaactccgtggcagctggaagaggttagcaaccagatgttggaactgtatgagcaaaaccgtgttcaaccaccaccatcacaaggcaatgatactgaaggcagttctgcaagtgttgcgaatcaacgtgttcctggtaaagttccaggagtagctgatgaacctcctgcccatgaccataaccaagcacccagaccatcgagccagcagaacatgttagaccaccgtggttatgaccaccctcacccagataagcaaaactataggatacctccaaatgatgcaagggatggcactgctaatagcaacgaaggtcccaatgtgtcgtcttcaatgatggatgcgatgaagaaggtaaacaaggataaggtgaaagcggcactggagaagcgtaggaaatcgaaaggtgatttttcaagaaaggtcgatgtgatggatgacgatgacctcattgagagggagctggaacatggcgtggagttggctgccgaggatgagaaggtcaagcaggagagaaagcagagctggcctcatcttgcacaccaccagagcaccaaccgtgagaataccgaagagggtgagctgtccatggacagtcaagaataccgttctccggagcatgacaatcggaagagaaaggatgtgcgtgagtaccggaactacgatcgtgacgaaagggaccttaaaaggctaagatcatgagagttgcacttttgtcggagtctcatgttgttcgtgccataacatgatgtggaacctctatctttctgtcacaggtgtacttgatgcttatttggtatgctgggggatttgaactgttacatatataagtttataagatggtttccccacggtcatgtatgtgtttagccatgttggcaattgagatggcgctgtgccttgagtattccacaggtttatgctggaaacaacatttaaggaagctgcgtcctacgggtatctgaaatgtatgtattttgattccaaggtttcctcaactctaatggtagcctgcgtttttttatccgtctatctgggaacacgggtactggggatgaggtcgtgcacataatgttgttgattttgataccatgtaatgtgcatgttct

SEQ ID NO: 37925 - DNA, 2501 bp, Zea Mays
ccttcatttccaccccacgccttctcttccggctttcatttcatccacgacgatgatctccttctcctctcgctccgcgccccgtcgccgctgacgtggcgcccaccgcacgggaaaaaaatatttcagatattttccccaccgctccttcccctctccccttctcctcctgcgggcctcctcgcccagcggactcctactctgctgcgctccgctccgttccgttccgctcccctcctcgcggcagcaatcgaatgtctcccgacgtagacgccgccgtggcaaccgccgtcgctcccgggggaggctgcggcggtgacggagaggcgggcgccggcacgtcgtcgtccccggcgtccgcggcgaacgggcgggcgttggtgcggtgggaccagatcctcccgcgccgctccctgcgggtcctcctcgtcgagcacgacgactccacgcgccaggtcgtcaccgcgctgctccgcaagtgcggctaccgcgtggccgcggtcgcggacgggatgaaggcgtggggggtcatgcgcgagcgcgcctacgcgttcgaccttgtcctcaccgaggtcgccatgccctccctctccggcatccagctgctctccaggatcgtcgccgccgacgagtgcaagaacatccccgtcgtcatgatgtcatcccaagattctattggcacggtgctcaagtgtatgcagaagggtgcggtggacttccttgtgaaaccagtgagaaagaatgaactgcgtaacttatggcaacatgtgtggaggcggcatgcaatgaattgccagacaaatggatcagaaaataatgcagccagcaatcatattagtgccaacgttgctaatgggtcaaagacaggagaaaacagcgacgaggaaagtgatgcccaaagctttggtagcaagagggatactgaaattcatagtgttgaggcggtacaagatattcgtagagatgaagtggctggctcatccaaaaataacgaactacaaaataagtcttatgatggagtaaacacaaaagtggatgtgtcaaaatataccaatggtgctccaagtggaagtgagaagaatgtgcggtccaaatgccttaacggtattacttctgcaaaggtggctgagcaaattatggataatgccttgaggatcacggatgcaagttcacgccgtccaacaaatcttggcaatggtttggctatgactgagccagcagctgacagaaaatgtcaatcttcggtcatggaaaataatgctgtcacagaaaataaccctggtgataagtcgaagggtgctgcaataggtcatgctgattcttgcccctccgaatttatggtgaccaacttggggaaggaacaccatcttaatggttacaaaaaccaagaattcagggaaaaagatatctttaatcactcgaattcctctgccttttcaagatatggcaataaaaggatagaaccatcaggtgagattcagtttttcccttctccctgcgtcattgggcaagggcatgttaatggcaagaacccagttttccaacccaatggggtgttgctgcctcccaatgaacataatacagtcagaggaaaaccaccagttgcatcattcaagacaaattcttcgggaatcaggagaaccaattgacatggcgagagctcacgtggatcgtgctaaccagactgcaagctgcagccaaggtatctgtaaaggaagtggatgcacatgtagtggtgaagccgatatcaacgcaaacacaatggttgccctagagagtggcaacgagagtggaatccaaaatggtgacaggtctcgccgtgaagctgcgttgatgaagtttcgcatgaaaaggaaagatagatgcttcgagaaaaaagttaggtatcatagcaggaagaagctcgcagagcaaaggccaagagttaagggacaatttgtaagccaaaagctgaactcagctacaacaacagacgcagaagctgactcgtgaccggcgtcaagtcatcactgtaacttattcttcccttcccaccaggtgtgggcaatcggacttgtaagactgaaggctggcagaagttttttcccttccatggttagcctttctgcacaatgggtgaactcttgtgtcgggtgtttggtgccgttgtggccttatttttgtaaagtgcatcaaattgacaaatgttcagaggggaatgggttgggggtttaggaaaacggtgcagctgccagatttcgcctatgtacttagatgtttgtggggggtgagaaagcagagcctgtacagcttattcacccattttgttgccattacactagtagtgacttgtactatgacaacagtagacattgttgtacagccttaccagtcagcagcgggtctttctcattttatttattagttattaatcctgtgggtaatcatgtcgataaggcgccgccctgtatgcagggacagttgttgatttgtttgatccaatccaatcatccagcgttttg

SEQ ID NO: 37926 - DNA, 376 bp, Zea Mays
tattaaaataagcctctagcattgattattattgaatattaatatggtaccgagccctgcagacaacaggaatccacccatgaacaggtagcggtcaaacgaaaccagctcaaataaatctgacccttgcacggcttcagggagctaagctaacctactgttgacctgatccggttacagacgaaacgagcaggagttggggaagtaaaccacgacagaaacgacatggaagaagtacgaagtggggcatcataggccaaaggagaaagctcgcggccacgctcttggagcggcggtgggcgccggcggagaacctggagaagatctcgaccatcgtctcgacggcccctcggtctggctccaagctcactcggag

SEQ ID NO: 37927 - DNA, 3654 bp, Zea Mays
cctaaatcagggtacacaagggccagtcactgtcttgaattgcagaagcagcagactcaggcaccaatatcttctctctccctctcaccaatatgttctaaatcagcagaagcagctgatcgatttactcaccaatatgttctctccccctctcaccctagggtatgccctgtctgccctgctgtatcctcatctgcgctgcgggagccagtaaagggcacaggaggagttcttgtggcgtactgcagcttctcctcgtcctccctaactcttgtttgttagcggctaatttcagagcttttgttggcaactgggggaaccatagtgcgggggttcctcgcccccctctttccatgggagcttagaagctgttggatctctgcaagtgaccatgagccagagttttgacatcaacgtacttcgtgaagaagcaaggagtaggtggttaaagccttctgaagtgtactatatcttgcagaatcacgagaggttccctatcacccatgaggcaccaaagaagccacccagtggttccctattcctttacaatcgtcgtgtcaatcggtatttccggagagatggtcacacatggcggaggaagaaggatggaagaacagttggggaggctcatgaacgactgaaggttggaaatgttgattctttgagctgctattacgctcatggggagcaaaatccatgtttccagagacggtgtttctggatgttggaacctgcatatgaacacattgtgctggtacaatacagagaggttgctgagggcagatattattcatcacaactatcaaatggccccccagaacctctttcatccttgggatatccaaatgccatctgtggaaaccaataccacagatccacttctggcactagtgagggcagtgagtcccatcagagctattccaatttgagttctgtaactgaagtaagttcctattccggtaacaaggagtacaacaaaaatgatggcagtttactaagcataccagaggttggacacacttgtcaacaaaatcagactggtaatggtaactcaaaaaataaatctgagcttaatatggctttaaagaagatagctgagcagttaagtttgggtgaagatgatgatgatgactatatttactcaaatcaaactcattccatgggaggtgacaaccaaataaaacaaattcgacaagaaggaacacagaaaggtttgagtaggaatatagcaccatcatgggaagatgtactgcactccagttcaggtttaccaacttcatccatataccagcaatctgatgtcaagtatcagaaaaaatcagaataccagccaccggaaatcctggacagcagtgatttgcgcatacaactttctgctactaaaaggtttcttttaggaccagaagccagcattgactcaccatctttgaactctgtgctgagaaacagagtcaacagtgtaactgataccatttcagcttatgacagtagatttgaaagctctctgaacccagattggcaaacaaaaacagcattaacatttcaaagcaattctcagggctctgaaataacggagttgtttgaccatgatcattttgaaccctactccagagaagatacaacaatttccttaggacagacaaacaagtttaacattcgtgaggtctctccagaatgggcattttcctatgagatcaccaaggtcatcattacgggagattttctgtgtgatccatcgaatttgtgttgggctgtgatgtttggtgacaatgaggtacccgttgaaatagttcagccaggtgttctccgctgtcacacaccactgcacagcaatgggaatctcagaatctgcattacttcgggaaacagagaagtttgtagtgaattcaaagactttgagttccgctcaaaaccaacctcttctagtttcacagacattgcaccatcttctagacatctgaaatccagtgaagagttattacttcttgcaaaatttgctagaatgcttttgtctgggaatggaaaccgtgaagttccagatggtgatccccaatctggacagtgtccaaaacttaagacgaacgaagagctctgggataggttgattaacgaacttaaagtagggtgtgaaaatccattaagctcggttgattggattgtggagcaactgctgaaaagtaatctacaacagtggttatcagtgaagctcagaggattcaatggaacggattttttatccaagcaagagcagggtattatacacttaatctctgccctaggctatgagtgggcattgtctccagttctcagtgctggtgttggtctaaattttcgtgattcaaatggatggactgctcttcattgggctgcttattttggaagggaaaagatggttgctgcacttcttgctgctggtgcatcggcaacagcagttactgatcccactgcacaagacccagtgggtaaaacagcagctttcctggcttctgaacgagggcatacgggacttgcaggttatctttctgaagtgtcgctaactagctatcttgcatcactcactatagaagaaagtgatgtctcaaaaggatcagctgaagttgaagcagagagagctgtggaaggcatatctcagaggaatgcccaacggcatggtggcacagaagatgagctatcaatgaaggattctttggcggcagtgaggaatgcagctcaagcagcagctcgcatccagaatgctttccgtgccttctctttcaggaagagacagcagaagactgctcgacttagggatgtgtatggaatgacccaagaggatatagatgaacttgcagctgcatcaaggttgtaccaccaagctcatgcttcaagtggtcagttttatgatagagcagctgtttcgattcagaagaaatacaaaggatggaaaggtcgcaaacattttctcaacatgagaagaaatgcagttaaaatacaggctcatgtaagaggccatcaagtgagaaagaaatacagaacaattgtaagcactgtcagtgtgctagagaaagtaatacttcggtggcgccggaaaggtcatggcctacgtggcttccgagctgagcagcaaccaatggtcgaagcaatagaggaagatgatgaggaagacgacgatttcgatgatgatgaagcagtcaaggtcttccgtcggcagaaggtcgatcaagctgtaaaagaggctgtgtcaagggtgctgtccatggtagactctaccgaagcgaggatgcaatatcgacgaatgcttgaggagtttcgccaggcaactaattggaaggatcaaatgaagtgacatcaatatttgacagtgacttagagttattagggatcaacaatttcatgtaaagagcatttcggtttcaagatctgagcaatgacataaattaagtatctacggaatgggtttcacctgctactaactaggacctgataatggtcgtcagtttatacagtgtttacgaaatggaaagtagattattgctgctatgatgtattgccactctatatttaggtgtattttcccagtggcagttcaatgaacactacattgtggtgtttgtaacttttaataccccgtttggatgtagatattagagtacaaaattgaaaattagaatcagc

SEQ ID NO: 37928 - DNA, 2599 bp, Zea Mays
aaattgtcttgtgaaatgctttccagttgaatgccaaacgtcgtttcgtaccgtgtgcaagtgcaacaaatgctgtttccatctgcctgccctctttcagcgcgtgcccccgaatgttccttccgaaagcaccgcgctcgcctacagatcacgacacctcgcaccgccgctcccacttccggcctcgccggtgcgtgcatgtgcgcgccagggacgccaattgagctcggctccagcacgcaatcggctgcagagtgagctcagagctcaccctctccctctgccgctgctccgctggcctcttgaattctgttcatggttcggggatcaagaccattaggccagactatttcaaagaaattttcagacatgagatactccaatatttcctggccattccttctactgctatgttttgtttcgatggcagatgcagagtacatgaagtacaaggatccaaagcaacctattaactctagaatcagggatcttatcggtaggatgacccttgctgaaaaaattggccaaatgacacagatagaacgccaggttgcatctgcaaatgtcatgaaacagtactttataggaagcatcttaagtggtggtggaagtgttccttctccccaggccagtcctgcaatttgggtgaacatggtcaatgaatttcagaaaggtgccttgtcaacgcgtctaggaattccattgatttatggaattgatgctgttcatggtaataacaatgtctacaacgccactttattccctcataacattggacttggagctacaagggatcctggcctcataaaaagaattggtgaagcaactgctcttgaagtgcgtgcgacaggcattcaatatacttttgctccatgtattgcagtttgcagagatccaagatggggtcggtgctatgagagctacagtgaggatcacaaggttgtgcagcagatgacagatattatccttggtttgcagggtgagatcccagtcaatcataccaagggagttccatatgtagctgggaaggataaggttgctgcttgtgctaaacactatgttggtgatggtggaactcataatggaatcaatgagaataatacaatcattgatgagcatgggctgctaagcattcacatgccaccatattatgactctatcataaagggtgttgctactgttatggtttcttattcaagcttgaatggtgtaaaaatgcatgccaatcatgacttagtcactggataccttaaatccaagctgcattttagaggtttcgtgatatctgactggctaggagtggaccgtatcacctcacctcctggcgcaaactatacttattctgtgcaagctggaattaatgctggcattgatatggtgatggtgccatacaattacactgattacattaatgatctcacttctctcgttcacaagggtgtcatcaatataagcagaattgatgatgctgtgaagcggatccttcgagtcaaatttacaatgggcctgtttgagaaccctttagctgatcttagttttgcagagcagcttggaaagaaggagcatagggaactggctagagaagctgtcaggaaatcacttgttctgttaaaaaatgggaactctcccgatcagcaattcctacctctccctaagagagctagaagtatcctggtagctggaagtcatgctagcaatttggggtaccagtgtggtggatggtcaatccaatggatgggggacagtggtaatatcacaactgggacaacaattcttgatgcgataaagtctaccgttgctgactcgacgtctgttgtctactctgagaaccccgatgacagtttcatgaagcacaatgacttctcattcgctatcgtcgttgttggcgagccaccatacgctgaaacagttggcgatagcaccgacctcactatgctagaccctggtccagacacgatcagaactgtgtgtgctgcagttaaatgtgcagtagtcatcatttctggtcgtcccattgtgattgagccgtatgttccattagtggaagcgcttgttgcagcttggcttccgggaaccgaaggtcagggtgtcgcagatgtactctttggagactacggtttcacaggcaagctcccgcacacctggttcaagtctgtcgaccaactgcccatgaatgtgggagacctacagtacgatccactctaccctttcggcttcggtttgatgataaattcatcattgccagggttctctggtgttgacaatctgggatataggaagcaaagagtgctatttgctgtgctgtgttctctactgtcattggttctaatcagttaatgaattgggcgtagatagtatttcaacacatagctgcccttttgtagttctcatatgattagagtgttactaatctagctttagcgattgttagctgccaaatgagtcactggacgtcaatcaatctattatctatctatctactagatgattccccgcgttttgccgagatgctgccattgattatattcctcctgctctgattatcactttggttaccttgtgcaaattgattgttcatgatgatccaactgaggtcccc

SEQ ID NO: 37929 - DNA, 355 bp, Zea Mays
ggtacatgtttttaccagtttaataaatatttattattatgtgctaccagcttaataaatatttattatatgattgtgcctgcgggtgccataaacccgcaggtagcttgtttgggtaacacacgctatctgtcgcgggtagcaggtacgggtacgggtttaacattaatctcgcgggtacgggtttataatctctgtatccgtgggtttaaaacccgttgccatccctactcgtctggtaccaccagccttcgcgctttcacattactactcgctagatacgcatgtatctaagtatttgtgtaatctactcttgatcaagtagccaagaagagttacaaagtttcaaaatttc

SEQ ID NO: 37930 - DNA, 2684 bp, Zea Mays
gcgcgcgagattgaccaaaaattcacccatctgtagctgctccccgaaccccgacccacaccgctgccgacgtagtcgcacggccgctccccgacccacacctcacacaatgtgcgcccccccattgccgcctcccctctagatccttaatgcaccgctaggtcccgtccacagccgctcactgccgccacctctaacgcgcctaggaccatcgccacctccacatctagcttctggagtcgagatccatggtcgactccactggaggagcccggatctggcctaccgggcacggtctcgagctttaggcatctcagcaggcagcggtgtactccgtcatcgcccaatggagcagccgaccaagcaagaactctatccatgctcgtgccgaggcgctgtctctactctctactccatccgttctgttcccgcgcctgcgcgtcgtcctctacggatccgtccactgccgcgccagcacgatgtgaaccgagacacgcctccgcctatgcgtccaagacacgcctctgcatttgcgtccgtgcactggctacgcggcatcgattacggagtggagtctacctactcgcaattctctacatatgaggacttgaggatttagagcaagacctaaagtaagttactctgaggtatatacattttggtcccctccgatctgcttcaccttcatccttaattacatcccaaacatttataagtctgatgttgcttattagagccttttaaaaaaattgaaaacacaagagagttgcatgtcctattaaaaagaggatggtcatattgtggaactgttattttgaaacgaagtggtcttattgtctgaacctgctattttgagctctgaaatatatgtgattgactatagaattatttcaagaacaaactgttattggcatttgttcttgcgagtgtccagcagtagcatgcttgtcactctggtttggaaatattaaaaatttcatctttgaccgactgataaagagtagaacaaaatatatttgcatttcccctagtcaatgaaccagttcaatttacaccaaacaatttctatacaaaggtatacccttgaagggacacactttatgattccatggtttgaatgaccaatcatttatgatgtccgtgctcgactgaatctcgttgagagtacttctgggagcctagaccttcagatggtaagtatatacatcacttttgttcaattccaccggcctctcaatcttcatgattcagagcctcttagttcttatgtaaatgttgatgttgactgcttgatatgcatgcttttatgtccattggttattgcatcacaatgttcatctaaaatttgggctgacaaacctgtttcttccttgacttattgttcatttgaccccttaaagctaccactgtctattatgattatttcagcaccaatagtttgtctgcagttttcattgaaatatttattcattcaaaagttgggaccaatgaacctgataaattcagaacatgttatggctttgaggaataaatgcagtttttataatttatcgtttatgtttatatcataatatgtcatttgtacccttgtctaagtatagaaacggttgcttgtcttatgtcaacacaaatcaaattttgtaggatttgtggttttgtataaggacgatgaaagatttaagtgtccaacatttgatctttaaactttagtcaactattatatttttagaccaagaaatcaaatgtatcttaacagattaagaaatcaccaatgcaacaactattttggattccaagcaatttcggtgttacaaatgaggctagcatctcacctgaagttctcaaaatatatttttttcctgatcatgggttgtatcattgtctgattgacattttcatgattactctaaggtatatacattttagtccactctgatctgctccaccttcatccttaattacattccaaacatttataaggcgaacgttgtttattagattcttttttaaaaaaactgaaaatatagcagagttgtatgtcctattaaaaagaggatgatcatattgcctgaactttttattttgaaacggagtggtcttattgcctgaacctgatattttgagctctgaaatatatttgattgactgtagaattatttcaagaacagactgtattgtagtaacctttttctcctggagtataattatctgtatttgaatgctccttttatatgatgatgaattgttctacagtatctttatttgcaaatgtagcaacaatatactaatttgatgtacttttttctagggtgttctggacaaagaaagcttgtaccttaaaacaggaggatacaagaagctggagtggtagtctgaaagcttttgaactgcttgaagcattagtgtagctttggtgcttttgtgactgatcagctctggagcagctagagtgatgtagttgtgggcttttgaacaatagctagagtgatatgaaacattagtgatgtagttgtgggcttttgaactgcttcacgctggagtgatgttgttgtggtgcttttgtgactgatcatttctggagcttttgtgaatgatctagctagctaactgtaaatgatctagttgtgaatgatattataattgtgatacttttgtgatatataattgtggtgcttttgtgttta

SEQ ID NO: 37931 - DNA, 261 bp, Zea Mays
gccaagcccggcagccgcgaagtcctcctccaaatcttcctcttgtcctcttcacgcacccgaaatcgagtcctcatcgcctgcatcgatcggccaatagaactagaaacccacgaaatctcgattctcgaaccgaggcttcagaaaacgcgttgatctttcagataactagccccacccccaccctccagatcccaaccaggcggcgccccctcgccctcgtcgggggtcctggatctgtcgtcaagccgccggggcgcc

SEQ ID NO: 37932 - DNA, 1327 bp, Zea Mays
gctataaagatccatcaccatccaaggcacacttacccctgctacatgagtggcatttccgatctggcctcgatcgatacatatggattattggaatgatttatgcttactaccactagcaatgtggcattgtctatttgcccagtgtgttaggaaagagtagattaaatggttgaaatcgtacatgaacgagttctatttgtttagtgtcttattattatagcacgtgatgccaatgaatttcgatgtttgcaggtctcgatgtcaagcctggttccactgttaagtgtgagcctggatatggttttatgctgcacctttcccaggctgctcttgaggaatcgaagaatagtgataatgcgctattgccttgatgtatgtcaaaattgatgatcaaaaacttgccattggaatcctctctgttgacaagaacccacacatacaatttgatctggttttcgataaagagtttgagctgtcgcacacatcaaaaactaccatcgtcttcttcactggctacaagatgaagacgaggagctgaatgttccagtagtcaaggaaaatggcaaagctggtgggaagatacagaaaagtcaagaaaaggcagttccttgaatttttcaaaaagaaagatttttacagatatttttaataatgacctcggtggaccctatgcatttcttgagccaccttttgttcaaagaccccttctatataagatacaggcaaggagaaaaaagagattaatcgtctcgaagcttccgatacactcagttctcacatgaacgagtgggatggacctccctagaaaccaaacacccctgaatcgcagtcatcatcagagaacgacaatccgtgtgctgttgcgatgtagtagtactactgaagcacagagcgaaccgcacaggctagcccgcacggagcgaaccacacgggaaaagctgatgggaagaaacagaaaagtcaagaaaaggcagttcctgcagcttcaaaatcaagtccggcttccaagaagagcaaggatgacgatgattctgatgaggacgagactgatgattctaacgaggacgagacagacgattctgatgagggattcaagtgatgaagatgataccagtgacgatgaggaggaagacacttcaactcctaagaagcatgaggcaggcaagaagagagctgctgaaagtttcgtgctgaaaactcctctatctgataagaaagcaaaagttgccacgccgtcagctcagaagacagttcaagttgcgttttctacatggccatggggaccatctgccgtcattttctttttgtgatttggtgaaaaagg

SEQ ID NO: 37933 - DNA, 1739 bp, Zea Mays
attgtattagggagttgctatgaactaaccctaatcacacacactcctaactcccatcccatcccatcccatcccagccgccacagctgctgctcgccctctccctgtctcctctctctttccagccacggtttccccttcccccatccgcgcgctagggcacgaggcaaatctgtggccctctcctagtctcctgaagtccgactcagccgtctcccagctcccgctcgctcgaactcgggttggggaggcacggagtcactgaccccttcgcgttaggcggtgcccttaccggctcttcgtctaaggtgtagtcaagctgccggccacgcccggcacccccctatccagtacaaggccttctccgagatccagtacaaggtcgtcgtctccaagatctgaccccgacgctagtgaggcttgctttgaagggaacccattcaagacagttccaggcccatttaagctcttctggcaatgcatgcgctcaaaacctggggaggaaccaaccgagccctatacctacctgcagctagatcctccgagaagggtggaagtgaatctggagcaaacaggaagtgaaccttgaacgagcatgcctagtttagcatctcgtgcctatttgtcttcacctttcgagcagactttttcctcctagggatcacatcatgtgagcacaaagctgcatatgtttggatgtttatataatctacctaataaaccgtgatccccagagctgcctgtccaggctgccaactccttgaaatttgctgatgctggtgtaagaattgtgcccctttcttctgataaatggtgcacgcccaagtccacatgccgccagacatcagagctagtgcatctgaatgcttccactatgggtctaagcagcagtatttcggtccagaaaaccttgtatgaggttttatctgtgagcgaagacgctacgtatgatgaaattcgtgcagcatacaggtctgctgctctgaacacacaccctgacaaggcacggacacctctcgagtcatgtgttctttccggtgagcaacaggaattttctagtgtgcagaaagcatgggaaatcctacgccatcctacatctagagcagactacgataagcagctgcagtcatccagacagaacatcgagatcatcgcatctgaagtccaagtcggggatatgatcattgagagcactgccgatgccgatactgtagagctgtcgtacccatgcaggtgcggtgattacttttccatcacttcgtgcgagcttagcgggatgggaatttccgtcagtggagatggagatggagaggtagagctgcaggcgtccgattctccgtcggcttccgttgttctgggctgcggctcttgttctctcaaaatacggttggttttatagatggaactccatgatatatattgtgtgcggctcagcaatgctcactttaaactttagcagccaccacatgtttctcaaacactatgcctcctggtctgccgaaatcaaaatagtgcagcttaaccttgcctgttcctatttccgggagagatgtcgagtttgtaacctgatggtggttgcgttgtgataaatgacgttttttgaccgttgttatcagctaaccaccgctgtcgaatccagctgctgggaaatccaaagttgttccggtggtggttattcggtagatgagatcttcagttaatgttgttttacaggcccgatttaatggtcccatctgcca

SEQ ID NO: 37934 - DNA, 2732 bp, Zea Mays
ctggttttaattgattgtgatatatgttgacataggttagtgcctcttatgagcaggctctgatggatgcccgaaagcagattgaacgagagatggaacgatttaaagtatgtgagaaggaaacaaaaactaaggccttctcaaaagaagggttaggtcagcaaccaaaaacagatcccaaagaaaaggccaaagctgaaacaagagactggcttaataatgtggttagtgatttggaaagccagattgataacttcgaagcagagattgaaggactttcaattaaaaagggaaaacaaagaccgcctcgattggtacatttagagaagtctattacgagacataaagctcatataaagaaattggagtcaatcttgagacttttggataatgatgagttgagtcctgagcaagtcaatgatgttaaagattttcttgatgattatgttgaacgtaatcaggaagactttgatgaattcagtgatgttgaggacctctatagcacattgcctatggagaaggttgaagcacttgaagacatggtttcacttgctccttctagtcttgtcaagcctacagtatcaacagctccttcacaaagtacatcacaagatcaaacagaggacacagcttcccaagaaagcaatagtgaatctgtgccacaaacaccacctccaaaaggtggaaattctggaccttcaataccagctgtgccaattgctgtcagtactggtagtgcagctatttctgtacttgcagaaacaattagttcccctgtgcgaccaattgttcccaccacagtggctacaatactttcttctgctattccacgaagtgctcctgagaatacatctacggttacctcaattcctgcaaacttatctatcaccttgaaggatgatgaaagcatgagttttcctccacgacgaccatctcctgctattactgaaattggaattggcaggggcatagctcgaggaacaactagtcaggcattaggtacagctcccataactattggtccagtcccaggaaatggatcggttagtgcacttcctggaataaatgacttgtccaaaagaaatatattgaacactgacgagaagattaacagtggtggtctttctcagcagttggttatgcctcttggtagtaaagttcaaccccagcaggttcccaggactaatgatgcaattagctctgaatctgctaacacaaatgaaagccctattctcggtggaagagtattttctcctccagttgtttctggggttcaatggagacctctaggtgctgctgcatttcaaaatcaaagtgaaattagtcattttcgtggaaggcctgagatttctgctgatcacagggagaagtacatacaaagactgcagcaagtacagcagcaaggtggcagccttctgaacgtttctcatataactggcataaatcagaagcaatttccaacacagcagccaaatccccttctacaacagtttaattcacagagttcctctatatcttcccaagtgaatcttggagttcaaggaacagatgctgggcatataaaaagtgaagaagaagaacaacttttggctgaagatggtgtggaatcttctgcaacaacaggagcaaataaacaaacaagtgaagatgacacaaagattccatattcgaatccttcagcacctgcagcagaaagcaatcagctgcctagggatactgatccatcacctgggcagcctttgcaacctggaatgtcatcatctggtgttggtgttatcggccgaagaagtgtatctgatcttggtgcaatcggagataaccttactggaacttctgctagttctggtcatgatcagctttataacctgcaaatgctagaagctgcattccacaagcttccacaaccaaaggactctgagcgtgctaaaacttacatcccgcggcaccctgcagttacccctgctagctatccccaagttcagccatcaattgtatctcatccctccttctgggaaagaattggtagcgacacattagctaccgacatgctattctttgcgttctattaccagcagaacacatatcaacaatacatggctgctagagaattgaagaagcaatcgtggagatttcaccggaggtacaatacctggttccagcggcatgtggagccacaggttacgactgatgagtatgagcggggatcatatgtatactttgatttccatgtcaccgaggatggctcaggatggtgccaaagaatcaagaatgacttcacattcgagtacaacttcttggaggatgagctatcagtacaaacaaactaaagtgggctgtaggtctaatcaaaccattctgtccattgtgaattttgtagttctcatgaggtgactgacttataatctggactcttgtaaaattctccagctgtaaactaatggtgaagttggagagcattccttgtaggttctgatgcaccgaacatgctgaaattagaatcgggttgtgccagtcaaatatatttgactccgctgtatattgtcgttctcatctgctttagcagcaacaattaagtcagcttagttctaaagctacagtggagttaaaacccccaacaaaagcacaaaataagtttcagggcataactgtttttcatttgttcatgtttaaggctaaggcacatgaataactgttttttattccttatttaaggctaaatttttagatatatt

SEQ ID NO: 37935 - DNA, 1682 bp, Zea Mays
gcccgcgcccgcgggcacggtgaagaaaccatgccggccgtcgccgttacggctctcccggaccaaccaaacccctccatttatgtaacgccgccgcaaccgccaagccaaggacaaggcaggcactcccggaaaaacaaatcgaggcgaggacgaggggactcgtgcggtggagcagctgatctcgctgcgcttcacacggccacggaaactgcttttcctctctgcgggcgcatctgcgactgcgattgcgttggtaaagatggcctgctgctttctgtttggaaagaaagcgaaacaaaccactgaaggcgatgaagatctacatagcgtcaaggtattctcttacagcgagttgagaaaggctacgcaggatttcagcggcgcgaataagattggcgagggcggtttcggttctgtcttcaggggagtgcttaaagatgggacagtggtggcggtgaaagttttatctgctacttcaaggcaaggcatccgcgagtttttgactgagcttacggcgatatccgacatcaagcatgagaatctggtcactctgatcggttgctgcgccgaaggatctcgcaggatccttgtctacaactacctcgagaacaacagccttgcgcagacattgctaggatccaggcacagcaacatccggttcaactggcacgcccgcgccagaatcgctgtcggcgttgcccgtgggctcgcgtttctccacgaggagatccgtccccccatcatccacagggacataaaggcgagcaacattcttctcgacaaggacctcacccccaagatctccgacttcgggctggcaaggctcctgccgcccaacgcgacccatgtcagcacccgagtggcaggaacattagggtacttggctcctgaatacgcgatccgaggccaagtgacgaagaagtccgatatctatagctatggggttcttcttttagagattgtaagtgggagatgcaacaccaacacgagattacctagcgaggaccagttcctccttgagaggacatgggcactctacgagcaaggacgtctagaggacatcgtggacatggacatcggcggcgaccgggacgtcgaggaggcgtgccggttcctgaagatcggcctgctgtgcacgcaagacgcgatggcgcgccgtcccaacatgaccaacgtcgtccggatgctctcgggggagaggaggatcagcgtagagaagatcactaggcccgccatgatctccgatttcgcggagctcaaggtcagcagcaaggagcgaaggccgggcgaggcacgctcgcccacgacggctcccaccacgaaatcgttcaccaccacggagccgttctcgtcgtcggagacgcccacgcagtcgtccatgtgaagtcgtgggcgtacgacgcatttttttttttggtttagtttgtatagtgtgtggacgtgttaggtgggcagggttacaggttttttttttgagtttcttgtttgttttgctgtgaggaaagatctcgtaggcctcttattgcatctttgatcatgtaaatatctgtaaacgaagatgatcaagataagctttgcacgacggttctcattgtcgaactactttggactgctgcaactcggtgattatttggatcagttcaccttacatcttttgggtttttgtcccacagaatacg

SEQ ID NO: 37936 - DNA, 5524 bp, Zea Mays
atggccgcggacgccaccgcctccgcctcctcctcgtccgccgcatacctcccgacctcgcgcctggacatccaggccgccgtcgccaaggccgccgagctgcgcgcgctccacgccgcgctcctccagggcggcagcagcagcggcggcgccgccgccgccgcgtccaatgccggggcctacgccagcgctagccggagccccgccgtcatccgcctgccgccggccgcgtcgccggcgccggcccccctggccacggccgccgaggactaccccgtgtttgcgccgacttatgatgaagagcacttgggtggaacgaactacattcgccaagataacaggagcctgtccgagaactggagcggcatcggtttggaccatgatcatgatggcctagaagacgaggtggcgttctcggatttcgacaaccgcaacaccttctcttcgtcgaacagcgagctccgtttctcttcgtcaaatgagcacctgcggaacagaaaggcgtgcagaaaccacccgtcgctccttccgcccgccctctctgccgacagtttgcttaggtcagtcagcaggatgacggactcgactgaatttaaggccgttacgacgtgcaatacctgcaagcccgcaacgatcagtagggacgacaccgaagctgctgatgccaggtccttgaagaacctcaacagcaccgcgccgctgtcaaactcccggacaaggcgcaatgggccacacattctctcctggctcttaccgaagtcaaagaggaagccaaaaccagatgtgtccccaaacaccgtcgaatgcgagaacatgtcgcagcttctgaaggactggggtgtgttctcactggattccctgaggaaagaggtcgttgaggccaatgagcacagggacgccgcgctccaagaggtatcagagatgaaactatcactaggagagctgactgccaagctagtgagcctggaagcatactgttcggaattgaagaaggctctaaagcaagcgacgagcgcgaagaacatgcagtctcactcaaagagatcggctaggccagttagcgggagcagagacagcttcttgcccgtcagtcacgaagttatggtggaagggttcttgcagatagtatcggaggctcgtctctccataaaacagttctgcaagatcacgctgagtgacaagcacccgaagctagtgctgtaccacctcgaagctctgatgaaccaagcgatgtaccaggacttcgagaactgcacgttccagaagaacgggtcgcccaggtgcctggacccgaagcaggagcagcaggagagcttcgcctcgttcgtcgcgctgcgcaacctgagctggaacgaggtcctgaagaagggcaccaagcaccactgcgaggacctgggccgcttctgcgaccagaagatgagctgcgtcgtgtccatcctgaactggtcgtggccgtgggccgagcagctgctgcagtgcttcttcgtggcgtccaagtgtgtctggctgctccacctactggccttctccttcgtcccgccgctgaccatcctacgggtcgaggaggaccgggcgttcgaccagacgtacatggaggacgtgctgctggacaagcagcggtcacggaatggtccgccgccgtcgtcgtcgcaggtgaaactcatggtgacgcctgggttctatgtccaggacaggctgctcaaatgcagggtgctctgcaggtacagcggctagatctctatcgctgattggattggaggtgcttcgagtgttcttctttgactgattgttagttattagtgtgatgcagtagtatctgttctgctaggttgcaaagtgctatactgggacgccagaatatcattattttgacccttggcatgcccgtcagcatctctgtaacataagagagtcatgttgtgtaagaaagatgtgtgcaagattttagctcaacaggtttcctcttaacttttcgaagggaagaaaggggacctttttttatgaacagatgcatcagccattgttcttgtttgagatgacgaggaggaacgagccctgtggacagcgagtgaactgagatggacaccaatgcacctggtatttccttattattaaagcggaacataaacgctgcctaagaagctatccacgtctgccgaattattaacgcacgtatgatcattcatggacgtcttacattgctcttaaagcggaacagaaacgctgcctaagaagctatccacgtctgccgaattattaacgcacgtatgatcattcatggacgtcttacattgctccacggccatctatttctggattgttctaggtgacgtttgcttcgtgtggacgactctcgttctcttcgtctctacgggtttgcagctgacgctctccatcctcgttcttctcgctccgttcctctttccctcctcccctccgtcttggttcttcacacctggttcttctgtctcccgttgtctctatcgtctgctccggtgaacccgcatcgttcctattccttgtgctgcttccgtcgtcggctccagtaaatcactttgttcgccagctcgagatcgtggacggcttgctaaaatcaggtttgttttcattgggtttccatttctggaagtgattaaggcgaagtaaatcttctttcctcgaaacgtatacactttggtgcatctgtggaaatctgatttgttgggtttctgatctatttggctctttgcattttttaaatcccctcctacaaatcctgctacctccccgtctttttttgtttgtttggaaaatttgtttcgtatcttccctcctcgtttttttgcttcagttcgaaatcgatttggtgggtttctgatggcaaccctcgccaccgcctcatgggtacgtgccgagccgccttatctgttcgctcaccactttacattggttcttgcgcctgcgatttcggtgtcgtaggatcatgcttgtgcggatgtgatggtcgctgtggcttcgcgtcggtgggcggtgggatttgggctgggattctcgcgccttgtctctagggtttgggtttggtgcttcctcagtgcggaattggggattataattcctttaggtttgattttatctcgggtaactgcgggataatagcctagtagggaaatcgtggggattcttaaggattattaagtttctgatttatctctgccttatttagctcgtctgttgtggtggcttttccttcttgctgatgctgattatgcttccggttatgagccacaaaacaatattgatcggcaacctgtagttttgcctcagttcatcgcttgctgtctctgttaaatgaccaagaataaagtttagtacttcacacattaggcatccagtaaaacggtatcataattccaaagtgaacagcgagacatatttctcattcttagggaagaactacaaatgagttgagatatagaagctttagctcaggattcaagcaggtacagataaaaaatggttgattagaacctccaatctaatgcaaagagaatgatacatcacagaaaacaaagttgtaatgatacttatatgtcatatcatcatgggcagggcagtaatgtaggaagcttactctaacatattcaagatcttctcgcaattttgacagattattgttgacaccatcaccatttgaacgttgttgcttctcgagtcgccttatcatcctctcaatcttccgtctctctttgtattttgaataccaacatcaagaagatggtaagtacattccatacatgcatagaaaagaaacttaaaatgaaaaggaaagtataacagaccaaagaactttatctttctatctctaaattgtaatgtccgctggacaacaagttgattctgaagctcttgttgcctcttcagttcttccagtttcttctcttgagcaaccctaatctcatccggaaggtcctgaaaattaaacatggagcagtaactaaacaacatggctagatgaaaagggggctatactccattgatgtaatcagaaaataaaatggaagcatatgtgctattcttttatacatgtaggttgctcacataaagtggccttgattttaaataacacaaccatggtaagcttatacccccctcccgctgtagaattgaattacacaaccagttgccacttatgcataggggtggtaatgggctctagattttacattataaaatttaaggatcgaatcgcgttaggaccatgctctattcctttttttaactaaaatttattaagggccctaactgaaaaataaaattttggatcgtggtccattaccacccttatgcctacttgactctttccaatataagatgaagattctgtcggaaagcaattatatttagttgatgcatagaaagagacatgaacatatccattctacactgttctaaaacaaggtcaattaggcttcctcacttcccctctgacaagaacaaattccctttcaccatttttcgaccaatcagtttgagcagcatagttaaaatttcagtatgttagtatttcaatcaatacttgatacttaatgcagtgcagtaatccagctacaccatgaactttatcccactacatgatgaaatttatctttgcagttaccataaacatgagagcattctcagtgacaaatagagcattttctattctctctatattaacaaaccatggaagacaatcctcagtaccatcttccctacttacctaccccgaacaacatcttatcacaagatgacgtacttggccttacaaccacgcaccagcgacatcattttccaaattatccacttctagcagccaaacaaacatggcccgacgattgctagcatatcccggtgtgccacagaatacagaggcggatgaacactacacagatcaacttaacaagaaggagctatcctcaccatcgaaaatgatgaagcacacccaagttgacaaagtcctagattctataattccagaaaaatgaagcttgttacatcctcatgacatgcatgaaggaatttgcttttgcgtatctgtggagggcttcgtcacttttgaatgaaaaaacatctatgtacatataaatcacttggtgaagcctttctcaggcatgtgtgttgatgcaacctctgggaaacaaatgctatcagctgctgacatatgctacttcaatactgcttgatatgtattgcactctcagttccgtctactgttggtccaaactgcatctgtgtatatacagacgagttgtattaaactttctaaatctgtgtatactaatgcaacctcttgaaaacagttgttagcccttgacacgtatgctattttaatgctacttaatatgtattgcaatttggttttcctgtacagaactgctacaattcacgttccaatattaatcggaagctactgcagcctagcaaaatttccttaagtctgctttgtgtccatgtatttatgtgcttcataacgaatatccttcatataacatttccacgctacaat

SEQ ID NO: 37937 - DNA, 2790 bp, Zea Mays
gccgcagcaggcagcggccctgtgggggttaaagaagggtttttggcatctagccgtccctttctgctgcgaacttgcgttgcgaccgtgcattccgttcctctcctctctcggctctcggcgagcgagatgcagagcctaaccgtagcaagagcgcttcctcccgccgtggccacagctcggcggcggccgcgcgcgtcctcttctagcagggaagcggttttacaatgttggaagtacgaattaagtcaagaccaatatctgggaggatccctaaggataggttcgtctcaaggaagtttggacatacatcgctcaacaaatttgctcagaccagctgctgcatctgtttcagttgaacaagatgaagtcaatacttatcttccaaaaggtgatatgtggtctgtgcacaagtttggtggaacctgtatgggaacatcccaaagaatccagagtgttgcaaatatagttcttggtgattcttctgagaggaagctgatcattgtttctgcaatgtctaaagtaaccgacatgatgtacaaccttgtacagaaggctcagtcaagggatgattcatatacaatagcattggaagaagtttttgagaagcatatggttgctgcaaaggatcttattgatggagaagatcttgcaagattcttgtctcagttgcactcagacgtcagcaacttgcgagccatgctccgtgctatttatatagctgggcatgcgacagagtctttctctgactttgttgttggacatggagagttgtggtctgcgcaaatgctatcttatgcaataaagaagtcatactttggggcaaatgttttgcatccgcgcaccattatacctgtgatgaaagacaacattcccattgttattaggaacatgttcaatctctctgcctctggaacaatgatttgcaagcagccggccaatgaaaatggtgatttagatgcatgtgtcaaatcatttgctactatcgataatttagcacttgttaatgttgaaggaactggaatggctggcgttccaggtacagcaagtgctatatttagtactgttaaagatgttggagctaatgttatcatgatatctcagaaaaggaagttgctgcagtttctgctaggttacatgataggtttcatgaggcattagcagcagggaggttgtctaaggttgaagttattaatggttgcagcattcttgctgctgttggtctgaggatggccagcactcctggagttagtgcaatactttttgatgcattagcaaaggcaaacattaatgttcgagcaatagctcaaggttgcagtgaatacaatatcactgttgtattgaagcaagaagattgtgtaagggctctgagagctgctcactcaaggttcttcctctccaaaacgacacttgcagttggcatcattggacctggtttaattggtagaacactccttaaccagctcaaggatcaggttgctgctctcaaggaaaatatgaacattgatctgcgtgtcattggaataactggctcaagtacaatgcttttgagcgacacgggaatagacttaacccagtggaaacaacttctaaaaaaggaagcagaaccagctgatattgatagttttgttcatcatttatccgataatcacgtatttccaaacaaagttttggtggactgcacagcagatacaagtgttgcatcccactattataattggttaaagaagggtattcatgtcatcacaccaaataagaaagcaaattctgggccacttgatcagtacctgaaattgcggactctgcaacgtgcctcgtacactcattacttttatgaagcaactgttggtgctggcctcccaatcattagtaccttgcgaggtcttctggagacgggtgacaagatactgcgtattgagggcattttcagtggaactttgagttatatatttaataatttcgaaggaacaagggcattcagtgatgtcgttgctgaagcaaaagaggcgggatacactgaacctgacccaagagatgatctatctggaactgatgttgcccgaaaggtcattatccttgcaagggaatcaggtttgaggcttgaactttctgatattcctgtgaagagccttgtgccagaaacacttgcagcatgctcgtcagcagatgaattcatgcagaagctaccatcctttgacgaggactgggccaggcaacgcagtgatgctgatgctgcagacgaagtcctgcgttacgttggagtggtggatacggtgaacaagaggggacaggtggagctacgtaggtacaagagggaccacccgttcgcgcagctctccggctccgacaacatcatcgcattcaccacctcgaggtacaaggagcagccgctaatcgtgcggggcccaggcgcgggcgcggaggtgactgcgggtggcgtcttctgcgacatcctgcggctggcgtcttaccttggcgctccttcttagagcttccacttacagttgtcaatttgaagaggcagatggacagtgccctgcatgatgcctccgtgtttaggcttattatggacttgctcaaagttgttctgaataagtgccaggaaataaggcctctatctatttaggcctctatcttcggggtagctgactaagtgttgttattgctacggaatccagaattctgtgaattgaaatgaattgtaccgatgaagactgtttgcttgtgtctactggctactgttatgtgtcggtgttttaaccagagggtcccaaccaacaagtgaatttg

SEQ ID NO: 37938 - DNA, 843 bp, Zea Mays
ccgttgtctcccagaagggcctctcaaacggcctggcgtccccagcgagggtgagggcgacgtcggggaccaacagccgtgtgtcctctctcctcgtgtgctccgtctgtctccacagttggtacaggccctctcgccaggtcgtttcgttgctttgaaccatcgaggatatatttttacatcctgctttttctatcaagatcaggtcgctgaagcacttggaacaatcgtagcttgcttttgaaacgttacatcccctaaaggaccaggttcaaacagggacagcaacgcatcaaagaaaaaaaacagacaccaaatctttcaagaactgaagattttaatttctcagatcgtcgacaaccttttaacacaaaaatttgctacatctaattggataaagtggcttggccaattcggtgagccacgactcggcggcggcgacgacgcttggggcggcctcctcgatggtgggggaggcggtgctcgggcgcgaggtggtactggacggagagctgtgagcgtggctgcaacgaagaaggacaagcagtgtagaaggaggagtctgcatgcgccagctatgagatgaagcgagaaaggaaaccaaatacaaaatacattgggccaacatgggtcgtgtaatagtggattgtagttccacaaatcacaggggtgcgtttggatgcgtgtatcaagccagccagactctcgtaacgcagccaagccctatgtggccagactctatgcatgcaactggttactgtttggatgtctgtatgcgtagcatccggtccagctgagactttgtttggtttgctggttgcaccaagccccgttagtccctgt

SEQ ID NO: 37939 - DNA, 472 bp, Zea Mays
gggctgatccaatcccttgtttgagctaggatataacctgagtgaagctgatgcatgaaagccatgtaggctagtttatgtgttgctggcacactgtgaacacatctccactgcatgttgagctagtacagtgatatctgtcccatgttcagttgtttaaaaggcttaatcgagtgaagttttcctccctgccctgaactctacctacagaccactgtaaagagtatgaaattcgtgtattcttgctggtgtaaccccctcccccagtccttagctttgctctaacccagaaccgagtgcatcaagccctaggtggtgaccacaactgctgatcccccacttcaccatggccagaacacctagaagaagtggtgtttgaaggagaagtctactccagtggctgttgatcaagtggaggagccatctaactgggtatttaatagagggatctggaaccccttctctgcaacaa

SEQ ID NO: 37940 - DNA, 3448 bp, Zea Mays
gaaaggaagcagggaaggaaaggaagagaggaagaaaacggacgctccgagggcaagtggtgccggatttttgtcagtctcctccccacctagtctcttgtatccaatacaacctttgccttcattgccgcagttccgtttcacatcccatcctctccatttccaccccctcccatggcctgatttccgagcccccccgccattcgccccgcccccgaatccgccgtctcatcgaacgcccggtgccgtggggagaagcgaggctccggttctttgtttcttggcggccgaaatataagggaatatgattgacgatgaggaaagccaagggattaagaaggtgcatttcagggattcgttctcccagcaccctatagttacctacaagaggcgtcggcagcagaagccacagacgcagcagcaattacggcaaccaccgccatccctacagcagcatccggagccacagctacaggtgaagctggagccaaagactgaagatgtgccggaacagcagtttccgatattgagagcaagggatattggctgggagcatgctgtggatcttgatggaaataaaagacggtggcaatgcaagttctgttctctatgtcgaagtggtggtgtaactactttgaaggctcatctcattgatgacagctgcccaaacgttccaaaggaaatttcaaagaaagtatcaaacttcattgaagagaaaagagcaacacgccttcttttgaataattatgtctttaatgttgatgaggacttcaacacaatacttcaagaagggactgtagaatatgtaaatgaacaacaaccttcaagaaaggctacatatgtgcaaacattatctaagtgtgctattaatgaggtacacaattaccctgcagtgctaagggacagtgcatgggaacattctctgatatatgagaaagaaaacggacactggaagtgcaagtggtgcagtattgagggtgatcatggtttaactagattgatgtggcatcttgttggatggcagaatcgacctcagtgcccaaatataccaaaggatgttgctgaaaagatgaaggatcaaatgatgtcaaagaaggagcagaaagcgagatcaggtttgtttgacggcaatggctgttgtgaggtgttgtgctcttctaatagttcacaacttgatcagaaccatctcactgcaagaatacatgacagatgttcttcccaggcttttgaccatgctaacagtgaattaaaaggatgcaacatgttatccaatactattctttcacaacagagttccaatcctcaggtgcatcatgaggatcctcaggtgtgtcatgagcaagagaggaaggaggttgccacctcttcagaacctggctgtgagcaaggtcagaggatgcagtggcagtcgcaaaataagccaatgatggaaggacctcatgacaatggattatgtggtgacacaaaccagttggaggaacaaaaaagtggctttggaattagtgactgctggaggtatgttttggatggacaaatgcacttgcctgatgtacaggagggtgctggaattgggacatgcatccgtgatgctcttctctatggttgtgctgaatttggcacagtacctgacaaaatggaaatggattgtgataaaacagtggatgcgaacactgctaagtgccagaatattcttaaggatgttttaagatcggagaactttgctttgttgtgcagtgtactctgcagaactgtacatcaagatggggaaagaactagatattttgattttggtgtgattgattcaaggatgaaaaatggaaattatgggcctgaacctgaattattcgtccatgatctgaaactgttatgggaagatcttaaagtggctggtcaagatattgttcacctagcaaataatctatcaagcctcacagaggactcctatgaaaagctggttggaagagagagaggatcagatgatgatgagctcaatgaagctgtggtggccaggtctgaaccgaaaaacctagttcaaccaaatgcatcggtacccttgacctcacaaggctttaaccaattattggatcaacccgggccttctgatccttctgttgtatacaaggacagtatctgcaaccgatgtgggaaagtagcaggagctggtagcgttctcaaatgttacaggtgcatgctaccttgccacatttcatgcattgaggctactggttcacccatttcaactggaaggtggtgttgtaaaaactgcagcgctggcactaaggaaccagttgaaggagacatggtcttagcccatggcaatccaaattgcttgcatgaaagttgtgtcgtctgcgacagacttgcggcctgcaggtctccaaaatgtgataactcaagagcattggttatttccagcgtggacccagagattgatacatgttactcatgcaagatatgtggaggcaccgaagaggatgagaagaggttcttgatatgcggcaacgtcctctgccgatacatgtactaccacattgggtgcctcaagtccatgcagatctctaccagtgtagagaggggcagcccgtgctggtactgcccgtcttgcctttgccgagtttgtctgtgtgacaaagacgacgacctgaccattctgtgcgatggttgcgacgaggcttaccatatctactgcataacacctcgccatacttcaatacccaaggggcagtggtattgctcatcgtgcagcgtggagagggcagaagaggggatgagacagtacgagaggaggacgctgaagctccaccggaaggaggatgctggactacaaagttggaattttgatggtgtggacctgctgctatctgccgcggagcagctcaggatagatgagcagctggagactcgtacagattagcgtgttgcacctacactctggtccttttgccgtgctaaagtgagtttgttgtttgaagagcagaggcctgcctcaggatcagagctcgggcaagggcagttaacaaaatttgctgcagtcctctcacgaactgatgaaaatacaaggatcttcaaacagcattcgccttttgagatgcgtgctatatgataacatgctgtaggatatttgtttcgtttatctgtctttttgctttgttgcacttgcacctgcttgagaagatacttaactcgatacaccttactggtatccaaactgcaagggatgttcttaaattcaaggaaaatctccaatttgagagagcaagccgtctttgaaaactgcctcaggtttttgttgaggctgttattatgctttgtggcctgaattattttagacatacaaacttattgcttcacgaccttcttctcaagtcggtctagatacttcttggggcaacgtcgaatgctatgtccttcatccttgcagtagtagtaaacactatttgctttgagg

SEQ ID NO: 37941 - DNA, 945 bp, Zea Mays
ccgcgatggtttctgcggcgagcaaggcccaggcctaacagaccgagatgtatcgagttttgcgccttcgatacgtcgtttacgtattcagtttttcacacaacggcggcgatgtcgtcggcctcctcctccgccgccgccgccaacgccggtgaaggaagcgggggtgcggaggagggcgtggagatcacttacgtgagctatggcggggagcagcatctgccgctggtgatgtcgctggtggacgaggagctcagcgagccctattccatcttcacctaccgctacttcgtctacctctggccgcagctcaccttcctgcaactgagctagttactagatcaattcgggcaatgatggaatctggctgtgaggaggtgacacttgaagcagaagttactaataagggtgcccttgctctgtatggtcgccttgggtttatccgagcaaagagattgtacagatactatctaaatggtgtagacgcatttcggctgaaactactgtttccgcgccctgataatgacccacaaatatttggtataattgactagattctccctactcgtgacagcatcctaatcagtaggttgaattgagttggagatctgtaatccgatcatttttcgctctgttcatgcttcctcagctatcatgtggctgtaatattgctgtacttacatataaatgttcgaggtgttttattttcttcctgttctttgataagggtgttgtaagacctttttcttttgtgagaaaaacaaaacgcatgccgcagttgcaagaggactgtgcagttcttttgctcaataaacaaaacgcatgccgcagttgctgtagtgtttagggggtgtttgggaacaaagtttttctgcagttttggaagaatactgcagtattctcaaatactgcagtattatatacataatggtgtttggcaagctg

SEQ ID NO: 37942 - DNA, 2411 bp, Zea Mays
ggggctaacctccgagcggcgaggatgaggggcggcggcaggatgattgacgatgaagagcgggtgggccacgcggagatcccgaccagcttcggccccgagctgcgcgcctgcctccgatgccgcctcgtcaagacctacgactaggaacccttctccgctggcgccgctcccctcccccctcctcacgcctaggcctgcggtctaggttcaccagccttccgttgaagggacggttcgaggactgggggtttcgtttctcctggtgcggtccgttctcggcggcggctaagttcaggcagaacggctgaacgtcgtcaactgcaccacccccaacttcaccagaattatctctttgatggaccccagtaggagttgggcagctcgttggttgagaattggtgacccttgttctcgtgtatcctgcagtttgtttgcctcttcaatctagtgcgttcatttttgtctttttttttcttcactcgtgcaagggtttagtattttgaactgtgagcgaagtctcacatcaggtgcagtttatattaaatgttgtttatgtagtaactcccttggtttacatggttttccagattagagagcaacatctgtaggaaaggcacttttattttcagttgtcgttcatagcaaaactgcacagctaaggttacctcatgtggcagtgtaaaaagtaaaagagatgaaaaatacatgtttgcattttacttttgtcataacttttaggtggcacctctgtttctgtgcaatacgaattaagagatgttatagtttctacatgatcagcatgtcagttccaaataagtgcctgatgtttatgtttgagcttgtatttagagctaaataaaatcaaggccttgcatcagtttgtttaaagttcacttctgttcttggttcatagtagaatttatttatggatacgtctattcgttgcgctgtggcattattaaccgggatcatgcaaatctgcaggtaggttcattccgggttgctacacacttgctgtttcggaggaacttcaagaagagtatcaggggatttgccaagacaacaacgtgtagtatgtgccacccaagcgatgtctagagctcctgaagcagtatgaataatttagcttatataaaatggtgcatgtgcttgttgccaagcgaactgccctgctttgttgtatctgagtgctaatcaggacccctaattaaccctttcgtgctacgaatgggttttttagccaagatggcataaaacattagcacaaatgtcagacacatgaccaagacaagttcataggccagcaattctgttcaacaaacacctcgtcttcgtcgtacacggatgtggataccaatttgcagattgcgagccacgagcccatctaccagtagcctctccagtgtccatactgagaaatttatcgcaccagcaccactgtcacaatacaatggtacaggtactgcaccgtgcacgtgcccacaagctttcgacatctgcgtgtcagcatcggttatcatcaatcaccaagaatgactggaccgtggcgcgctggtcctctgcgctggtcctccgggaggtcagatgatacgggcgtaacttatctaagaacaatcaaataaataatttaattcggctgagcacaaagtaacatttgacccgattaataatccaacagtcaatgtttaccagtactttaaagagaagaacacagcactaccaaatgctgaagtaattcacacaaacagatcaaaagctagtcttacaaaaccatcggtagttacacagcttgatcggtcgacggactccacaaatgacacggtacgaagtctttgcggcaaatcatcagcattcagatccaggtcaatcgaccagtcagcgattctgttgctagaacctctcccacgccttctattgctgaagaagggtaacgagcaccaaaaaatacaaatactcgcatgcggcatgcaatcatacctttcctactctagatgcattagtgcagtatttcatgcaaaacatgaaccattaacttgcaagcctacgtgggtatgttcaaagaacagttggggtagccagataaggatacccttttatgaccataagcatgtcaataaacttgaattgcgtcacaagtgtgtatacagctttaatactcacctgcttaagacatgcgcttatgcattctcgataagacatgtttggcaaaccgcagaaatgaattgacagcacatccagtgcatgcaacgattaattgtgcacatgcagaccttatgatccaaaaacccaaaacaggactatgatagatcagtgcagacacatctaaatccaaatactataatgggggttaacacctatagcatgtagatgcatggggcgatgcataaatcattggaatcttacttgtc

SEQ ID NO: 37943 - DNA, 468 bp, Zea Mays
acgcggagtgcggacaccgtaaaaaaaccgacaaccaaaccaagcggaggtcgccgtggggctcaaccatgtcgttccttcggccggagattgcatatatatggagatccgtagccccgtctcgacccatcggcttgatctgcatagcccccccaaacaccatcgggaaagaagaaccagagaggggtagcgtatgggagagagggagaaggataggagagggccgtcgtgggaaaaagcgttcagcgccgtacagatttcgcaatagggtcaggaagactcaccctatcccggcggaagcttccgtggagtcgttgggcggattgggccacctgctccgactgaattgcttgccggagtatcaaacccgctgtggtgctactgtgcgtcgtgggctgcttgtctggatcgacctcgacgaggtgaggtcacaagaaaccggaagaccaatttggtgaagtacctggg

SEQ ID NO: 37944 - DNA, 5060 bp, Zea Mays
cgacagcttgctctcgcccctgccttctcctctcctctgggtgttcccggcggtttcttcgccgctcaagccgcctccactctccctgccgcgctagcaactacgtttcggacttccccgctcgactttcgacctcccctgccgccaacaccgcccaaccgccgtcctccaccaccctcggccggcggcgccccgccttgccggaggcggagcagacgacgcgtggcagccgattccgcgatggatgcatccactgccggcgatggagacacgaatactttgaagaggccatgcaaaacatcgcctccagaaggcgaaacagacaagtataaacggcagaagagggaatgccaggatttctctcccagaaggtaccagcttgatgtctatgaggttgctacgaggcacaacacaattgcgatgcttgacacgggagctgggaagacaatgattgctgtcatgctcatcaagcattttgggaagatcaacaaagcaaacaatgatcgaaagctcatcatattccttgcaccaactgttcaactcgtcacacagcaatgcgaggttattaagagctacactgattttgaggtggagcattatcatggtgcaaagggtgttgatcaatggaaggctcatagctggcaacagcaactcttaaagtatcaggttatggtcatgacaccacaggtgttgctagacgctttacgccaagctttcttgatcttggacatggttagtctcatgatatttgatgaatgccatcacgcaactggtaaccacccatatactaggataatgaaggagttctatcatggatcagagcataagccaaatgtgttcggtatgacagcctctcctatcataagaaaaggggtctcctctgatttggattgcaaaaatcagctatctgagctggaaaatattttagattccaagatacactctgtggtggatagagaagagatagaactttgtgttccttctgcaaaagaagtgaatagatactatgagccaagaactgtttcttttgacgatttaagtgaagaactggaaattttgtgttccaagtatgatgggctgatcatacaattgcataacagatcgaccaatcagtacaaagatgctgatgaaataacaaaagaatcacggaaacgtctctcaaattctttagcaaagatttgctattgcctagaagatgctggtcttctttgtgctagtgaggctactaaaatctgcattgaaaggggccagagaaaaggttggctgaaggggggcagtgacaccactgatcagcaaagtggtcaaaatggacctatcctgtttgcagaaatttcaatgcttcatatggagttttttcaggaagtgttggatataatcggcaaacgcgtccaacagcaacaaggaattgatgcccttctgaactcagagcgtggatgtgtggaagcaaaaaatatgggctatatttcaccaaagctctatgagctcatgcaagtatttctctctttcagtgaccctgataacgttagatgccttgtttttgtggatcgaaagattagtgctagagtcattgagcggacgatgaagaaaataggccaactctcctgtttcagagtctcttttctaactggagggagttcttcagtggatgcactcacccctaaaatgcaaaaggatacactggattcgttccgctctggaaaggtcaacttactgtttactacagatgttgcagaagagggtatacatattccagactgctcgtgtgtaataagatttgatttgccgagaactacccgcagctatgtccaatcacgtggacgagcccgacagagggactctcagtacatactaatgattgaacagggaaatgtgaaacaagatgatttgatatctgggattatgagaagtaaggcctcgatgactgggattgcttcaaaccgagagcctgaggattcacaccccagtttcttacccactgaagaaataaatgaataccatataagcaaaacaggagccaaaataactactgattctagcatcagtgttctcaaccagtactgtgataagctcccgaaggacaagtactacaccccaaggcccaagtttcagttcactcattacggtgatggttatgagtgtactgtaacactaccatccagtgccatgtttcaacttttggtaggtcaaaaagcaagaaacatgcagaaagcaaagcagcttgtttgccttgatgcatgtaagaggctgcatcagctcggagcacttgatgaccatctttctccatcagttgaagagccgcctccggaaatttcaagcaagtctagtatctcgacacctggtgcaggtttaggtacaaccaaacggaaagaactgcatggtacaaccaaagttctttccatgtctggctcttggggttcagatagaagtgtgactaaacttcaaggctacaagttgaattttgtttgtgatcaagttggtcaaaaatactctgcctttgtccttttaattgatgctagtatagcaaaagaagctgctactttagatattgatctatatttgcatgacaagatggtaaaagcttcagtttccccttgtggacctcttgagttggatgcttggcagatggaacaaacaaaactatttcaagcacttctctttaatagtttgtttggaaaactgttcattggatcaaaagcatcaaaaaccccaagggagttcattctcaagaaagatgatgtgttcctttggaacaaagaaaatatgtatttgcttttacctgtggattctactctggattctcataaaagtgtttgcatcaactggagtgtaattgatgtagtggctacagctgttggattcatgagaagcatttattcagatggcaaatgtaacctaactgataaacttaattatgaaaaaaatggtgaagatcttattcatttggccaacaagtcatgcaagggtaatgatcttaaaaatatggtggttctagcaattcacactggaaagatctatactattgttgttgtatctgatttatgtgccaatagtaaatttgatggtacaactgacaagaaagaagcaaaattccggacatttgcagaatattttgagaagaagtatagtatatttctttgtcatcctttacaaccattgctagtgttgaaacccacccataatcctcacaatcttctttcctcaaagaatagagatgaagacaatgttgtggaaaataaaaatagggcgaacagccttgttcacatgcctccagagttgctgattccccttgatttacctattgatgttttgagagtattctacttgtttccatctctgatgcatcgtcttgagtcactaatgctagccagccaactaagaagtgaaattgcatacagagattctgatatatcaagcttcgtgattttggaagctatgacaacacttagatgctgtgaggacttctctatggagcgattagagttattgggggactctgttcttaagtatgcagtgagtgcccatcttttcatgacatttcttaataagcatgagggacagttatcgtccagaaggcaagaaacaatatgtaatgccacactttataggcttggtattgaacgcaggatacagggttacatacgtgatgctgcatttgatcctcgtcgatggcttgctcctggacagctgtccagacgtccttgtccttgtgaatgcccagtaaattctgaggttgtaactgaggatattcataggattgatgacaagtctataattataggcaaggcgtgtgacaagggacacagatggatatgttcgaaaaccatctctgattgtgttgaggctctaattggggcctattatgtcgaagggggattaaaagcagcttttgctgttctcaaatggttccagattgagactgaaatcgaggaagagttaattatggaagctctgtcgagtgcttcagtgcgaaactatcttccaaaagttgatgtagttgaattgcttgaagcaaaactaggctacacttttcaaatgaaaggtttgttaatagaggctctcacccactcatcacagcaagaatctggagcaacatactgctaccaacgcttggagttccttggtgatgcagtcttggatattttaataactcgccatctgttccttagtcataaagacacagatgagggggagctgacagatttacggtctgcatcagtaaataatgagaattttgcacaagttgcggtaaagcacaatctccatcagtttctacaacattcttcggggttcttacaagaccaaattactgaatatgtgaatagtcttgaaagttcgtccatggacagagccagccttttatccagtggaccatgtagggggccaaaatggttgtgaaggttaagttgagcaaaggaggacctcgtatatcattgtacgagtcgtgtaaaaagcttcagtggccaatgccgacctttgaattcgtgaaggtcgaaccaagcgtgtgctcctcttcctgtggttcgtcacaaaaggttgcgccccaaggattcgcatttgcttcgacaataacgttgcatataccgaacggcgatgtcatcagcctcacaggagatgggcgtgcggataagaagagctcacaggattctgctgcgttgctcatgctctatgagctgcagcggcaacgtagattccaagttcaagaagtatgaggaatcacctcgtggttccatcaccaaagatgcaatgttaccgccaccggcgattattgcttgggcatcttggagtaatgtcaccgccaaatcagtctttagtcgtcagccgcacgggggtgtaagaaaataatgtacttcattctgattctaaattataagacaccccgaattatgtaatctaattatcataatgtcctataatttgaaatggagcggtgttggttactctcgttcccgtctgatggattcagacatttcatctgtacacattaggttctggtgcatgttaaaagagcctggaagggcactgcttacgtccgccgtggtcgtgatgtgtgtacacgtgca

SEQ ID NO: 37945 - DNA, 505 bp, Zea Mays
aaaaaaaacaaatagggacaatgtttgttgttgctgtggctgattttcttatgggtgcaaattgttcagcagataaatcatgatggagaggtcaatcgagctcgctatatgccccaaaattcatttgtaattgctactaagacagttagcgcagaagtatatgttttcgactatagcaagcacccatctaagcctccactagatggtgcatgcaaccctgatttacggctgaagggacataattctgaaggatatggcttatcatggagtatttttaaagagggacatttgttaagtgggtctgacgatgctcaaatttgcttgtgggacattaaagcaaatagtagaaacaaaagtcttgacgccttgcagatttttaagattggaaaactatactttctttctctgatgagtacgagtagaaaaaccatttgtatctgccactgaaccgggaagtgctctatttgcaatctagggatttcaatttctcattagttgttttctt

SEQ ID NO: 37946 - DNA, 898 bp, Zea Mays
tccatctccaagcgcctcgcctctcctgtccttgtcttgcccttcgtcgcctcggcgcggccgccatccgtcgctcgggcgggggcctcggcgcgctcgtgttttacgtcacttccttctctatatactacgtttcgatttcgaggcgggtcggcttcttcttcaccggttgatttgttccgctgctttgcgcctccgtgctctcgcagatcccttggggccgtctcgcctccgcgcgacgccggcagcgagctgagtttggtttcgccgggttgctcggtttgcggtttattcttcccgcgattttagtttttgcgtcgatcctgtttcgtcctcgccttctcagcgtgtgggttgcaggattttgggtccgatccggtcttaggcgttcgtcatggcgtcgtgtggcgaggagatggaggcagttttcgtgttgattcggtatcgtcctcgacttctcagcgtgtgggttgcaggattgggtccgatcggtgttgtgagagttcgtcatgatggcgtgtggcgaggagatacaggcaggttcactattattgttgatttcgggtttaaggatattctgaaaacaatggttcctaatagaagattaactatggcatgttttggtttgagtccggccattccatgatttttattagagctgatcttgtggcaattgagcatcttctgcctaggccaaattggatggattcctagttttattggcaaacataactgtggcatgttttgagtccgatcatgcaatgatttttattggagcatcttctgccaaatagatggaagactcactagttttgttggacgaaattaactggaagcttgtgatgttttacaattggcacacgttgaatgttcagtcctgtgactaaataaaatactc

SEQ ID NO: 37947 - DNA, 1820 bp, Zea Mays
gcaatcactgctagtccgcaggcaaccgagagcccgagaccgcccaggtgcccaccactccaccagccaaccctagagcctctccagtctccactgctcggccgccgcctgccgcagcccgccgtccactggtcccgcctcccggcgtccgctccacgcctccactgctcccggcgtccgctccattgctaccatcgtccggcgttctgctcctgcgccctccctttgattcgttgccagttgtagtgtccgggcagatttgagctgtggcagcaagcaaggattgacgaagcgtgcgttcccatcgcaccaccatgggctacacagagatcgacatccacccctctgggagcggcaagatgtgatagatattagtatgaaagataaaaactagaatgctatgcctgtcagaggagctttcttcagtttcagaacacacctctccatctttcggtgcttggtggatcaccgtctaaacgatccaccaccagaaccgcccaaccccaagatagtctcctccatccaacctttcctacgtaggcagctccatctcagtcgttgtacccgttcaatggcgagctggtggcagcgatgtaggagatgatccatgccgaggtgcacaagtacatgttagtggacggcacctgccaaagatacaccgtttctactgtttttcagttggagaaaacatttaagacaacattttcatcgtttgttctccatatggggcttgtttcacgccacttgaaggaagaagggaatggtggtgttaagttcggacaatacatctacacatcttggagcatcggcatcaatgttctcaatcttctcaaatttcaaattatactggtcattactttgaccattagaataaaatccctataaaacgtggccatgcaatcactggttgtaaactgatgggcagaatgttgtaggatggattggctcaagaactaatatagcttacttatgacaatgtagtaattcatgaagttattgttccttatgttcatggagtttgttctgctaggtttttatgcttttaatttctatttccttaacgaaacctcaggcaccttaaagacagcttggatgattggtttcatgaacagctagagaacttggatgatgattatcttgtgtttgattgccctaatatattctcaaatcatcttttcatgctttagttgtttcttaatagttgcacagtttcatctcactcatattcttgccacttacatgtatgtgacaaaacagacaatccgtcttttttattgcttatggcgttgtgcattatacatgtccaccaattatatacaaataccatttgtgggttacctctggtgtgtttaggtgcgagctgcaatcaaagttaaggcattagtcatcatttgcttcacctcttctggacaggctgcaagggtgttctggacaaagaaagcttgtaccttaaaacaagaggatacaagaagctggagtggttgtctaaaggcttttgaactgcttgaagcattagtgtagctttggtgattttgtgactgatcagctctggagcagctagagtgatgtagttgtgggcttttgaacaatagctggagtgatatgaaacattagtgatgtggttgtgggcttttgaactgcttcaagctggagtgatgtcgctgtgttgcttttgtgactgatcatctctggagcttttgtgaatgatctaactagctatatgtaaatgatctagttgtgaatggtattataattgtgatgattttgtgaatatataattgtggtgcttttgtgtttatgtgatggatctatgactggta

SEQ ID NO: 37948 - DNA, 1976 bp, Zea Mays
cccgatccagagcattccccagtcctcaccccacgtccccacccttgtcgccctttcgcttccgtctcgtttggacctccatccgcggccgccgccgccgcgctgagtttgggccgggctctgttaatctgggcgactttgattttctctgctcccgctgccacggccgtcaggagtgaagcgatgctggagaaagaccggatatcctacttctacgacggagatgttggcaatgtctactttgggccaaatcaccccatgaagccacatcgtctctgtatgacacatcaccttgttctttcatatggacttcatcaaaagatggagatatatagaccacacaaagcatatccaatagagcttgcccaattccattctgctgattatgtggaattcttgcaccggataactcctgattcccagcacctatatgcaagtgaactaactagatacaatcttggagaagactgtccggtctttgataatttgtttgagttctgccaaatctatgcgggaggaactttagggtaatgactgtgagtttccacaagtatggtgacctgttctttcctggaacaggtgatattaaagatataggagaaagggaaggaaaatattatgccatcaacattccacttaaagatgggatagatgacactagctttactcggctttttaaaacagtaagctcactgcactttatcccttgttattttgtcatttttttagtcctgccatgttatctgagtttgtcatgcagattattgccaaagttgttgagacatatctgcctggtgctattgttcttcaatgtggggctgattcattggcgagggatcgtttaggctgcttcaatctctctattgaaggttctccagtttttaacagatatatacacacatagaatctacaagactcatgtgtgtatataatatttatccatcggctgctagagtgtcttttgtgggaatgggaagccccatgtccttgattatccattttttctgtttttgctgagtttcctcgcattattggaggtttagagttccttcggacaagtcacctagtttcctgaagctaagcctactatatttgtccattagtgcttaactgcttacttgccctatctgttttcataaacaggtcatgctgaatgtgtaaagtttgtcaagaaattcaatattccccttctggtaactggaggtggtggatacaccaaggagaatgtagcacggtgttgggctgttgaaactggggtccttttagacacagaactcccaaatgagattccaaaaaatgaatatattgagtactttgctccagattatacattgaaagttccaaatttgaacatggacaatttgaacagtaagacctatctcagttcaatcaaagtgcaagtgatggagagtttgcggtacatacagcatgctcctggtgttcaaatgcaagaggttcctcccgatttttatatcccggactttgatgaagatgaattggatcctgatgaacgtgttgaccagcacactcaagacaagcagattcaccgtgatgatgagtactatgaaggtgacaatgacaacgatcacgacgacggcacacgctaatctgcttcttctgaggccctggtgtaaatggaaacctgagattcttcactgttgtgtgtagttcagcagccttgagatgtaatagtttgtcagttgacagcagggatctaatttagcaggtcaaagtggtttagacttttataagggattctgacccctcctgaattacacattgtagtacaagtctgcatatttttaagcatgcaaaaattcaaatttctcagtggtattagtatctcaagaaaatacaaattcctcgctcagtaacattgctgatatgtggtgaatttgattatatctagaaccccaaggcctagtttgagtattctagtattgaccttaatctacatgtattgaactggattggat

SEQ ID NO: 37949 - DNA, 760 bp, Zea Mays
gaaggactaaatcgtctctaattatggtttcaggaggagagtggagatcatcccgatgatgatgcgaggtggaaggctcacgggtttgacctctcaggttctgaggtgcttcagcacggagatatttgtcagcagattatcattctatacgacagaggaagaattcaaagatattttttcaccatttggcaccgtagaggaagctcgacttatgagagaccaccaaactggaaggatgaagggatttggttttgtcaaatattcatcgcaagcagaggcagagaaagctgtcaaggcaatggatggcaagattctacgtggaagattgatctttgtggagatggcaaaaggacacgaaagcaagtaggacaccctccccacgagaggatttcactgaacatgaaacatgagagcgccatcagcttatgccagatggcaaatatcccaaattctcaattgatgttgcaacttatatacaaagcacaagttaattttagctagcttatctttgataacactgctaccttgccatctgaaaggttgccgtgcattggtatccgttgacctgtgtaagaaatgttggcagctctgtgccctacgaactagcctggttgattaaccaagatctgttcaaaattaaagccagtaaaacatgaatattgttaaagatttcagcaatgaatcgttgagaaaagattgataaagacgttctaattataatatactcgttagcctttaacgagtgggtctagttagcctt

SEQ ID NO: 37950 - DNA, 4124 bp, Zea Mays
ccttcccctgcctcggccggccagccatggattcaccaagcgggctctggtggcggccggcgccgtcgtcgtgtcctccattcccgtcaaccccctcgatgtcgccaagcttcaaattaaccagtccattatattatgcaactctgtgaatagaattgagctactggctaagaaaataactgaactcggttattcatgcttcacattcatgctaagagcctaagatgttgcaagacaacagaaactgagtgtttcatgagtttcataatggtgcttgcagaaaccttttgtgcacagatatgtttaccagacgaattgatatctaggctatttatgtggttactaattttgactcctctaagacatatttacacagggttggtcgttatgggagatatgggcaccttggtttggcagtgaacttgaccacttacaaagattgtttcaacttatatagtattgataaaaaaaacttggaacggaaattaagacaatacccccacaaattgacctgtttgtatactgccaatgatgatagcgacagcttcatgagcgtcaggcacattttatttattttgacctgtttgtatactaacttaacacaagcttttttgtcaataacgtgggattcggaattttctgagctttgtgtagtggaggaggaggagaggcccatgtcggtggagctggaacccatcgccagcgagcagcagcttaactaggtccttggagaggcgtagcagctccagctcctcatcgtcctgctctggtaaccccactttcctagatcggtttgtgcctgtagggtgttcttgttaaagtttgcttgtaatgtctgtgagattgcaatcatggtcgtgtatgattgcggtgttcacagattttgtttgcttgttcctagatagtcatttatgtggtgcaaatttagcatcttggatgaagtgaaaatggacaattttgttcatttgttattaggttctggcacttggacttggtatttagtaactgagaatttacttatttagtagttatacagcccgtgtcattgtcgttgggcgaatgaatttcatcgtcagtctattgcatgaatgataaatgcatgtcggtggccttttgccgaatctaccattttgtttgttcctcatctccattcctatctgcttgtttattggtagtagaagtagaactgctatttatggctgaggcctgagggaaaaaataatcaaatgttcaaccaacttcatttttttcttgagtgcatgggttgcagcctttggctagcttatgatctcgtgtggtctatttaccatataaataaatagcagcattagttcaatttgatgttcatagttctctctctctaaagagtcatatgttagattcatgggaaatacttgaactatacatttttttaatgtatcagatgtgtgaattatcatgtccggatcaatttcaaccaaccaacagttcctttagcaaatttgtcaggcatatttatgcacttgttcgcataactgagactatattatttttataagactaaggtcagactattgatggtttggtttgggtggcaccttgttcttcgttccttgccatttccatgccatccttttattatatacatacatttatttggagataaaatttgatgtcaagagaaacttgtctttctttcactctccaactcatcttcgtagtttgattctcatgggaggaccctgtttccatcatgctgcatctttttatctgataaagtgatatttcttagagcatcaaggttcgacaaccaacatattctcgtgtgaggaaatggaaaagtgatgtcttgaggacattttttatcttttgatgttgataattgttcatattattatggttcaacaactcctagcaccaagtcattctgtatgatctgttaacttgatagaagttaacatcatttgattttaagaaatgtaatcatatttcctgattgctcagaattgacttgttcatcatttttcaatgtccctaattggtattagatttttgtgatcttgtgtcatattctgtgatcaacaatgtacaatttgttgaataggctgttgttgaaaaagctgtatattatgctcttgtatggatcaataggctgttggctgtcggtcatgacatcgccatcaagacagataggaaagttatattttttcctaactatatatgctcttacctattcctgttctccatagtacaaaagatgatattgattttgtggctggtttcatttgttggaatgctcttcaactttcttacgctcatttacattggtgagttctctgtccatgttaattttaagtgagtatgtaactatatgctctcatacgctttagggatccgctacgagcagcctacacatttatcatctgttcccatgcttatttttccttttttttattagtgatgggaatcgtatatccataaatagatctggagactggagcagtttttgttgggataaactttgtactggaccggagcatcttatctctggatgtgagtgccatgaaagtgatacccaacaaacaactaactctggaacacctttggtatgtcgggtaggcgcaaagccagcaagacaacaactgcttgagcagctttggccagttttgcttgccaccatgaatagccatatgttggccatcacatggtaccttgttcgtcccaaactagaccagagcattacaagcaatgactgccatatctaaaattgaaaacatgtgcggcttataagtatcctaaatttgctccacttctaagtatccaagatctactggttttgatgcgttccattgcttgcagcttttctctgcggtaaattgctggcttaaatgcatgctgcttgaaccctataatcagatagaccatcccgaatgcaagtcaaggcctgatagtggtctttctgcaattacagagctggaccctggttatataacaggtaaaacgtatggcttactttctttttcttagcactgacttcacaaagttgtagccatgagttgtaatatctagagactctaatatctattacatgataattttagattatatcatactccatgttgagtgaaaagttcattttggaaaacatttttgcaagttctgagctgaagtggctgaaacatggctgaaacagaaaatgtttttttacacgagatcatcaaactaatgaccataggtgctacaacaaagtattgattaggagagaatcatgttctttattcatgtctaagctgaacaatgtggaataatttgtgcaggtacagttatctgtatctcactcacactactgcttctttcaaagtaatctacgttcatctgtttccaaatggcaactccccatatttgctttgatattagcattgtgttctacgcttcagaatagtcctgttagacagggtgcattcagtactcatgtttgttagtgcattctgaagctacccatttcatttattcatgaagagagaaagggaagggaaaacaccttgcactgatattattttattgggcaaggtttcaggtcctctctcttcagtatggaaagaatgggtcaaatggtgtgtagagtttggcattgaagctaatgcaattatcgctgttccgtatgattggagactgcccccatcaatgcttgaggagagagatctgtactttcacaaattaaagtttgtaacacttgcctcaacttgttatgaagcaaccaaatgctatacatctgttagcaggatcagtaagagttaatggcccagtgacggattcaaggtatcctgctcaccaacagatcccacaagcatacggttaccgccaaatgcctgcaaggttggacagtaccaacccatcacaggccatgggaggttacacgctgcagtcacagaaggaaacattatttgaagagttgccattttgaagagttactcgaatccaatattttgctcttttgaattccttggtgtacactggcaaatattagcatatttgaagagttgccatttcgatcatcatcttcatttgtactttttgggtcagatctaataaagcatcagcattaaatttacaatgatcacctaaatccatggtttttattgcct

SEQ ID NO: 37951 - DNA, 1447 bp, Zea Mays
gggttagcgtatcgaaatcaatcgtgttcctcgcctgcacgacgagagcccgagaccaatccagccgccgcctccgccttcgcctcgcctagtattccctccgattcagaggccgatggagtgcatcgccgagatgccccgcgcgccgctggacagcaggctgcgcaagcgtcagcgtctcggctgggacgtcggccctgccgagatgtataaggccgtgcggccgcggcacgggtgggacgtcggccccgccgagatgtatcagttagaactttgtggacaagaagttgtgaatgccatcagtgctgcagccttgggcctttcgtcgggctgtgtttcttctcaagtcaaacaagagcagcctcatgatggttcccctcctctgagagaagatgacagggatgggcattatgtttttgctgttggagataacctcacatctcgctataagatcaatgcaaaaatgggagaaggtacctttggtcaggtgttggagtgttgggacaaggaaaggaaagaaatggtggctatcaaaatcattaggggcattaaaaagtacagggatgctgcaatgatcgaaattggcatgctcgagcagcttggtaaatatgatgaaagtagatctaggtttcatcccgatccccaaaggagggatcctattacaagcgggtgcccaagtctagtgctatcaaggtgattgattttggtagcactacctatgatcaacaggatcagagttatgttgtgtcgacgaggcattatcgggctccagaagttatactgggacttggatggagttacccatgtgatatctggagtgttggttgtattcttgttgagctttgcacgggtgaggcgatattccagactcacgaaaacttggaacatctggctatgatggagagggttcttggacctttgccataccatatgttcaagagggcagatcggcactctgacaaatacatcagaaaaggacgcctgaattggcctgagggttgcacttcgcgtgaaagcatgaaagctgtgatgaaattgtccaggcttcagctgcaggagatttcattgaccttttgcaagggctgctgaagtatgatccatcaagccgtttaacagcacgagaggccctgaggcatcccttctttacccaagggttttggcgaagatgatgatactccttgcattctaccttgtttgtctgacttgatgtcttgcatttgacagtctgtacttttcagtggtgtatgtaggcggtagatcaatctgtataaagccgttgtagagttgtttcagtcttgtttggaacgtcgtgcagattaagttgtagcataatggaagtcaaatggatgcatttgactttaaatcctgacttgtttgaatttggaatgtcaatggaaatctggtttgaggagaaagtgaacatcatatattaaggccctgtttgatt

SEQ ID NO: 37952 - DNA, 1486 bp, Zea Mays
gatccgaagtcgcctcctcgtccttccttcgctagatgttctccttcgccggcggtcttgttgctagaggcgcccccgacctgtgcatccgtttcaacgccaactcctccaccagtcagttcaatttctacagcctatggctaactcattcggagtaggtttagaaattgattgggattcaattcagctagaccctagatgggaggaggaagactacaagaagttgttaacgtggaagtggtgtatgatacactgggcctgacaaatgaggtgatgggtggaaccaattgtgatggttggcaaaacgattatggtgatgcaggggcagctatagaatgcaaggacattgacgatgacattgtaatgtttgatatgaaaaatccagttatgaggcttggtaacatatatatatagtagcatgaaggagtttaggctcgcaatgatccaatatgcaattaacaaggaatttgagctaggcattgaagctactagtactcgaaggtatagaggttattgtaaaggggatgattgtccatggagtattcatgccagaaaagaagtagaagaatcgcctatcatcattgttactgccatgacagatatccacacttgtacatctagtggtaggtgaaggacaaagacacctactagtggttgggttgctgcccaagcaatacctctcttgaagaagaaacctggcatgggagccaaggagttgcaaaatgcactacatgacacttataatgttcagattgcatatctaactctttggagagggagagagaaggctttgtatgagttgtttggtagttaggaggatagtttccaactttgttctcttggaaggaagctgtgttggagaaaagtttaagaaagcttacgagggaagaatagagcaactaggagataagtctttttggccaaaagtggagatggcaaatgaggtgggggcaccactgggtaggagaggtgtgggcagacaaaggaaaaatagaatcaaaggttgcctagaaggcggtaggggcaagaaagcatgtgcaaacgaaactgtaaagcaatggaaggccaaggaagcagcgacataactctactcaaaaatggttttatgtgttgatctttgttcctgtttcctgttctgtttttttcaaaaacttacagctggtctgtattcttataggccaaggaagcagcgacattactcaaaaatggtttcctcgcgacgacagatttacacaagaacctagaacaccgcatttcgacaaagttatacaagaccctggtacaccacatgaacagccatcgtcttcgcagccacttccaaggtggaagtctcaatgccctgggaaaagaagaagagagccacgagaaaggaaggggcaaaactggaagtctcaatgtcgctccctggttaacgcccagcgttctcagttccaaatgtgaaagaacatcagctttcaaccattgatagtcatggatctcctcctct

SEQ ID NO: 37953 - DNA, 3203 bp, Zea Mays
tgcacgttctgcctccggcaacccgccccgcccgcggccgcatccctcccgcatcccgcggccgcaccatcaacggcgcaacagccgcatccagtccctcccgcatcaacagcgtcgcagccagtccctcccgattcgcgcttaatccccgcatccagtccctcccgcatccagtccctcccgcggtgcaatccagacgcaaacaactccattgaccccgattcgcgtacatgctctctcacagcaatccctgctctctcctcgccaacgcctctcgataaactccatggaaggttcacactgatgcgctctgattccttgctccacgctctctcctgctctcgcgctctacatggaaggtgaggccgacgcccaaatcgacggaatccctgctctgcgctctcccctgctcccgcgctctacatggaaggcgaggccggcgcccaaatcgacgggatcactgctcggacaggattgcggcctcgatccgcgctctccagattcgcctagattgacagcgtccgcgccgcgcttgcccagatcgatggaatctaggtctccagatgcaagtccggggctcgctacccgtggaaggcgaggagagacgacgcatcggctctcgatccgtgctctacatggaaggtgaggcagatcggggggagtgtgtagagaaatccaagcgaaaccccgcgagagcgaggcgacggcggacggaggcgagtgggtgagccgcgggcgagagacgaggtagcgggctagcgcgatgccgtcgccggttgtagtggccgcgacgctgctggtggtagcactggcggcattctgcggcacggacccgctccggacggacagcatggtggacttcccggggtttgagtcccacctcgtcgacctccccaatcccgccgagatgccgacgcacgcggatgaatgggagcggctctgtggagccgatgtgcggttctgcggcgaggtgcaggggcccgagagcatcaccttcgaccagcagggccatacacgggcgtcgccgacggccgggtcgtcttctgggacggcgagcggagctccacggagggccgaaggcctcgccgctggagtatctcccagcgagcatatctgcaaccgcccgctcgggctctgtttcgataagactggggacctgtacatcgccgacgcctacttcggcttgctcaaagtccgccgcgaggccgggctggccacgctgctcgcaacggaggccgagggcgtgcgcttcaacttcaccaacgacctcgacctcgacctcgacgacgagggcaacatctacttcactgactctagcattcactaccaaagacgtctgtgatgccatgccctcgctctcttccctctgctttgcgcgcttggttggatgctcacttgattcctactgaccacggggatggtgatcgactgattgttaacatcacttgattcctctgctttatattgattcctactgaagatggacaatataaaaacctaaaatggaccaattctttctttgagggatacaaccctactctggtgtaacttatacttgttctagcacttggccctctgatctggtgaataagttatgcagaagaaaaattatgttttattttatatttaactgtactttgttgtagcttgtaggtactgatcagagggccaggtgctatccacgaatgatagtgtaatgtctaggaacgatagctgatttggaaaacctgcaaagtctattcacaacagcgaggtcatattttcatattgattttctgtacctgggactttggagaggggaacacgttccaaaaccggagcgtttcatcaccagccccagtaactatggtctgttggtatgacctcgctgaggttgttgccctcaccgagagcatcggcaagccgctcgccgaggtgctcaaggagctcgggaagagggttccagactcccttgtgaagacccgcatcgaggatgatggcttcactatcaactcgagaagagggttccagactcccttgtgaagacccacaactagagaaataggatggagagggaaatttactaagagaggacgtgtaacaaataaggccaggaattattagaatgaatggaaaatgtcctcatacacctttggagattttatttcgcttgtgggcaagtgaaatcatatgagagggcaataatctccgtggagcaactgaatgctattcttagacaggcttctaaaaccaaggaaaaggaagatctcaggaagatagataactggcaatatattagttgtgtcaccctatgggttcggtttctgtgttgtcactataaggattacaatctccatcccttattttctcaagttcttcaattgctctttgactgcctagaattaagagaagtttctcagaaagaacaaacacaaagaacaaagatcaacttttcgtctttgttgaaggtgccaaagaacctgctgaaaccaagggattttcaagaggagtgtattctttcagcgattcagattctatcagcacattttgcccagtggagttaccatgtttccttcctagaagtagccaccattcctcttgtcctcttgaagaggctacatgagcagacaacagttgaatcacttcgccatcctattaagtgtttgatagaccaggtgacggagaacaaggattttatagaaaggaaaagagaggttgtatccttttcaccaaatgataaggcgtcagttgatagcttccttcagtcaattgcttcacatttactattcaacatctggcctgctgagtttgctgaaaaacatattactgttgaatgcaggaggagaagtccacacagaatgtcggacagggacgccgtggcccccgcgggcggcggtgaccggaaggcggccaagctcgggagctggagcagcatgagcagcaactacggcaacaagaagcggaagagcagcagcagcagcttcgggaggagatccacatccacctgcgaggaaaggcagggggtcttccgcatgctcatgagctggaaccaggagagccggttcagcaacaagatcaagacgacgacgagcaaagaaagatgaacgaaacgaagtgttcttagcttggtgtgattattcggggggttgcttgctggagggtttttgttcgtttagtgtctagccttagcttacttattacttttgttagtactctactagcag

SEQ ID NO: 37954 - DNA, 2023 bp, Zea Mays
ccttcgcctagattcctatctccaccgcgttcgggttcctcccaacacctgcaccgcagaaccaaaccctagctgcgcttcctcctccagatcccggcgccccggccccatggccgccctcgtttctagctccagcttctccgcccgccgtccctccgctctctagctccggatcgcacgcgcacgtaaagacatggagcccgcagccgaggacgccgcagccgctgcgccggactcgtgggagacggccgacatagacgggcccatgagtcggctcatcctctccgcgcgacgcgtgtcctcttcgccggacttcgctgacgaccaggacccgccccagccgccgcccacactgcagccgcagggcgcgccttcggctccctcagatgcgcgcgaggatgtggtagcccaggtcgatcagttcctacgagaggccctcgagaagccaagggagaggctttctgtgctaagaatggagcaagaaattttgaagttcattcatgaccctagtcgtacagagtatgaattcaatggccttccaacttcgtatctgcgtcttgctgcacatcgcctggcgcagcattacttcctgcagtccattgccataccagacaacagtttgcctgatggaactggttcacgtatcatcctccgtaagacaacattcgactgccgactgcctgctgtccgccttgcagatattccagttaacctgccacaagaagacatctctgtggcgaaagtagctattaaacagaggcctcaaaagaatttacatggcatgaacagctcaagtgctcactcttctagagacaacctccaaaaaagcgtcgaagaaagaaaagaggaatacaacaaggcacgagcgcggatatttaacaacagcaatagcagtactgctactgatgagagatcagctgaggaagtgactttacccagtactcttcacaggtccacttccttggagttgaactcaagcaatagaataggtcaaggggctgaaattactcttgagaggagcttgactaccacttcagctagcagcaggtcaaatagaagcaagattgataaggagcctgcagtcaatagaaacaagcagaacaatagggttgcaattttcagagatcgtgagtcagagcgcaaggatcctgattatgacagaagctatgacagattgagatgctggaggagcacatcttgccctcgttgaatgggctctgttgttgaaggactgatagtgttggtaaaaaaaatgggattgcgcagtgagcgggtgattggcaaggggaaagattgggatggtccagtatgtgaacaggcgacagggatgtggccttaagccccgttgcccatgggatgcttgccgggttgagctgaggtggcatgatgacgatgctggttcttgctttgcctagtgcaatcgtggcaccattcttggtcaggtttagaagcagaggcatctctgtgcagctgctgttcacggagctggtgtttttaagttctttgtagtcagtgttgtgttgtaaatcaatcagtgttagtttgagtgaacaaacctatttcttgtaccatgtgcatgacaagcaacgactatagttgctaaagatgatgacgaatcgtgtatgcctcacaggcctatttactacagaagtgtttggtgttggaacaatctgatggagtgatgatcttggatttgtgcgtttatgcgatggatgtgttttacctcaaccgtaaggttaacttcaatggagcaaggtgaggataagcactgcagtgacatctatacggctatggccctgtttggcacagctgctgcttgttgaaaaagcaacttatctggctatgaccctgtttggcacagctgctgcttgttgaaaaaataacttatctgataagctggaaacagcttctgcttgttggctgcttttagtgtattatgagaagcagctgaactgataagctgctgcagaagctagctgtttgacagaatttctgcttaaatttgtgaagaagctgaaaataa

SEQ ID NO: 37955 - DNA, 3661 bp, Zea Mays
gggaatgccacaacgtggcggacgccaccgccgtggtgctccccttgcgacgcctaagctacttcttttgcagggtttggtacaagtggagtggcccatatgttgtgcggaggagcactggtgaagcctaagaacccttatgtcgatgggcgtggtctcaagggaggtgttgtcagcatgcgagaggctctgcttcatttgcccgtcactgcggacgaggtcccgccatccggtcaagcgctacaagaaattgcttgcagaaatcttccctcggacacaggatgaagaaccaaatgatcgcaagatagggaaactgtgcgaatatatttcaaggaatcctatgcgtgttccaaagattacattttacttagagcaaaagtgctacaaggaattaagggctgagcgctatggttcagtgaaagttgttattgcaatctatcgaaaggtgatatgttcttgtcaggagcaattgccactttttgccaacagcttgctaacaattgtagagacattattggagcaaaatagacaggatgacttgcggaaattggcatgtcaaacactttttgactttataaataatcaggttgacagtacttacatgttcaatttagaaaaccagattcctaaactatgtcatctggcccaagagatgggtgaaaaggagaagatatgcattcttcatgcagctgggctacaagctctttcatctatgatttggtttatgggtgagcattcccatatgtctgcagagcttgataatgttgtttctgcagttctggaaaattatgagagcccatatgcaaatgctgataatgatgccgctattgaggatagacgaattcagtgggtggatgaagtgctcaaagctgaaggtcatgaacctcctgctgttaccattttgacaagggttccttcatggaaagttattagaactgttcacggtgaattaagtttgacaatagaagaatcaacaagtccaaatttttggtcagggatttgtctacataaccttgctagaatatccagggaagcaacaacagtgcgacgagttctggaagttatatttcgttattttgataataacaatctgtggtcaccttctaaaggatttgcactgtgtgtcctactggatatgcagattgtcatggagaaatctgaatgctcatatattgttgtctatgttagtcaagcatcttgaacacaagaatgtattgaaacaaccagatatgaatctagatatcattgaagttacttcacgccttgctgggcactccaaagctcagtcttctacagcactaatggcttcaataagtgatatggtcaggcatatgggtaaaagcatgcaatccttggccagcgatgcaggtcctggagacaacatggtcaaatggaatagcagatatgggaaagctgtagatgaatgtcttgttcaattgtctagaaaggtcggtgatgctggacctatccttgatacattagctgtagtgctggaaaacatttcaagttctatgattgttgcacggtctactatctttgcagcatatcgtactgctcaaatagttgcatcattgccaaacttgtcacatcagagcaaagcatttcctgaggcattgtttcaccaactgcttttagcaatggtctatccggactgtgggacacatttaggagcacatcggattttctctgttgttcttgttccctctgctgtcgctccgtgctcattttcagacacttcacggacaaggaagattgatctccgaaggacattatctagaacaacatcagtgttttcatcttctgctgctttgtttgggaaacttaaaagagacatgctttcatttcgtgaaagtccgctccatgataatacaaagctactacccatcagtgaggatgcagatgagatcagcgcaaatgatgcaaaactattcaagtcacagactattcaaaggatggctagtacaaaagatatttctcttccctcttccacagatgcaagtactttgagtgaacaaactccaaatcaggaaaaggatgctgtcacccttatgctcagtgttcgtcaggcaaatcttcttctttcctcgttatggactcaggcactgtcacctgaaaatgttccacggaattatgaagcaatttctcatacttacagcttgatgctattgttttctagagccaagggctcaggtgccgacgttttggttggtagctttcagcttgctttttcattaagaagtgtttcgttacaagcaggttttcttccaccttcacgcaggcgctctctttttactttggcaacttcaatgcttgtgtttttctcgaaagctttcaacgttccagcgctcattccagttgtgaagcatgtgttgacagaaagtacagttgatccatttctttgtttaatagaagactgtagattgcaggctcttgatagtgctgctcagtcttgcaaactctatggttcaaaagaagatgacgatcaagctctgaaatcactctcgaacattgacatgaatgaacatcagtcaaaagaaacatcagtgtctcttatacttgatagcttggaagatctgtcagagtcagaattgtctactattagaaaacagctgattgaggaattttcagcagatgacatttgtctgggatctcattttactgaaacaccttcgaaatctgcagcacaaaatggaaaactgcaccacaaatctatggaggttattccattcggatttgtttttgaagatgatactctcgttgaagcatctgacagcttagtagaacctcacttgcgacatctgccatgtaacagcgttcttgatgttgaccggcttcttaattcggttttggaaacatctcagcatgttggaaggatgtcagtttcaacagaccaggatttgcctttcaaggaggtagccaaccaatgtgaagcacttctgattgggaagcagcaaaagctatctatctgcatgagtgttcgtgaaaaaaaggatggtgaatcatccatcgagaagtcatctcagcaggatcctcaagcatatacgtttctctgcacagctgatgaacaatggcacctcaattcctgtaagctgccagtgctgtgtccctatgaccggttccttgcaacgtctgggtgctaagatgatctcttctggtacgcggacctttataactatgaatgtgttcagtggactcctaaaaattggcggttccagctcatgcatgccaaaataggtgccctacaaactgatgtccgtcgggccaacccagatgagcccatgtgtgcgtgccagatggcatcatttccatcatatgtaaattgttccctcgtttgtaaaggctagttgagagctaaaatatcagagggggttggaggagttaaaatccatttcttattcaaaattgaataaggagattttagcccctttaacccctccggttttgtggctctcaaactaaccttaaatggttcgtctaccatgggaaatacatggttgattctggcatttttgaggccggagcgaaagttactattgaagccccttctatatccatgagtgtgtatatatgtctatatgtataatatatatacttttatatggaaacttataaacacataattattgatctcaaatagtttttcagtaaatttagttttaaa

SEQ ID NO: 37956 - DNA, 2685 bp, Zea Mays
ctaagaatgaagtacccaactctgtagaatgtcagataagacggactccttaccgaagatttgctcctgctccgccaatggttacatgttgccaaaaccatcgaagtctggtaagagtagcatgatttctattgcatagagcggccccgtttggacagcacattttagaggaaccatacagaaattggaccaattttgcgtaaaagcatagtaggaattaggaaactttccaaagcagaccccgcactatcccgtccccgtgcccggtgcccccctgttcccatccgctgcaacggcaagcacgcagattcgcagacacgatggatctcccgaccccgtctgtcgccgtccctgggatgctcagacctgttatcccggccgccggcaaggatgcgacgtgaagccactccagtcctctccctactcccgctgctcccctcctatcgtcgctctggagacagatctgctcgccgtccccggtcctccttgttgccatcccttacctcctccagggctcgtggccgagacgcgcccccgggcggggaaggttggcgttgtccaagaggcggccgcgcgccccgctgtctggcacatgacgatggatgtgcacggccgcacaggacacgtcgcccgcccttgcacgcgcatcaaaggacaaaggccggtcgcggcgtatggcctgggctccaaacgtgtggccgctggagccccccaagccaaggcacggtgccatctcggccgttgctgcctgctcgacgggcggttcatgatgcggctgaagctgcccaacggcgtgacgacgagcgagcagacgcggtacctggcgagcgtcatcgaggcgtacggcgccgacgggtgcgcggacgtgaccacccggcagaactggcagatccgcggggtgacgctcccggacgtcccggccatcctggacggcctccgcgccgtcggcctcaccagcctgcagagcggcatggacaacgtgcgcaaccccgtcggcaacccgctcgccggcgtcgacccccacgagatcgtcgacacgcgcccctacaccaaccttctctcctcctacgtcaccaacaactcccaggggaaccccacaatcaccaacctgccgaggaaatggaacgtctgcgtcatcggctcgcatgacctgtacgagcacccgcacatcaacgacctcgcgtacatgccggccgtcaaggacggcgagttcggcttcaaccttctggtgggcgggttcatcagccccaagaggtgggccgaggcgttgccgctcgacgcctgggtcgccggggacgacgtcgtccccgtgtgcaaggccatcctcgaggcgtaccgggacctcggctccaggggcaaccggcagaagacgcgcatgatgtggctcatcgacgagctcgggatggaggtgttccggtcggaggtggagaagaggatgccgaacggggtgctggagcgcgccgcgccggaggacctcgtcgacaagcgctgggagcggcgggactacctcggcgtgcacccgcagaagcaggaaggcctgtcgtacgtgggcctccacgtgccggtgggccggctgcaggccgcggacatgttcgagctggcgcggctcgccgacgagtacggcaccggcgagctccggctcacggtggagcagaacatcgtgctccccaacgtcagcaacgagaggctcgacgcgctgctggcggagccgctgctgcaggagcagcggctctcgccgcggccgtcgatgctgctcagggggctggtggcgtgcacgggcaaccagttctgcgggcaggccatcatcgagaccaaggcgcgggcgctgcaggtggcgcgggaggtggagaagcgcgtggccgtgccgcggccggtccgcatgcactggaccggatgccccaacagctgcggccaggtgcaggtggcggacatcggcttcatgggctgcctcaccaaggacagcgacggcaagatcgtcgaggccgcggacatcttcgtgggcggccgcgtcggcagcgactcgcacctggccgacgtctaccggaagtccgtgccgtgcaaggacctggtgcccatcgtggccgacctcttggtggagcggttcggggccgtgccgagggagagggaggaggatgaggagtaggaccttcgtcaagcgccggctgggactgtcctgacctattttatgaggtcttgattggatgtatatatatattcatcttaatctatatggatttctgaagtttgatctaaagttcacaccagattactgcaacccacgtggattaaagtggatacgtagcattcaaacaagtcctcagcggtgagatgttgtttgctgtaaaaagtaagatgttgcctcttcgctggcacggcaagtgttgttgtagccaagacgtccccccccccccccccccttctctattcatttcacgctatagagaacgccgatgtataaagtaacacgctatcaatcatcctactactgttgtggtccgtcaaccttgttacagtattttgtatgttgtgaacttaccctcttgtttaaatcagttggaatttttttcgctgtttaatcgtctcacagaatataaggttattgacaatgctactgcggggtgatgtgggtacaagcactatacaacacgaaatggaagttcagacgcatagagcagcaaaactgtg

SEQ ID NO: 37957 - DNA, 2135 bp, Zea Mays
caaagcgaagcggcaaccaccgccgatcgagatttcttcaataatcttcagtcccttccccccgcaccccacttgttatatccacgagcgcgagctgcgcgcgatcataagagccacgccgcgtctgattccagctgacggggacctgggacttcggcgaaagactcgaacttttcttgacttgccctgccgcctgcattgcgacgagaggaggtcctgttcttggagcatctgagccgactcgcgggcgtttctcggctcgttgcggtagttcaggttctggaagcatgaggttatggtgtatcttcctcttgcctctgctgtgtcagcttgcaggggttcgatcagaggattactcggatgtaactgtcattgttcgcggctctgagacgattgcttcgactagtggcgagtttgtttgcgccaccattgattggtggcctccagagaagtgtaactacgaccagtgcccatggggaagggcttctgtcttaaatttggacttaactaatcctttgttggctaaagctatccaagcctttagtccactacgaatcagagttggaggctccttacaagatcaagtgttatatggcacaccaaatttaggactgccgtgcgacccatttacaaaagtttcgagtggcctctttgagttttctcaaggatgcataaccttggaaagatgggatgatattaatgatctcttcctgaatactggtgcagttgttacatttggtctcaacgcgctccaaggacgacatcagataaggaaaggtgtttggggtggtccctggaattctagcaatgctcgagaattcattgaatacactgcttcgaagaactatcctatagattcttgggaatttggtaatgaactgagtggaagtggagttggtgcaagtgtggcagctgaacaatatggaaaagacctagtcgtacttcaaaccatcgtcaacgagctatacggagattccagcaaaccactggttgtagccccaggaggattctatgaccaaaagtggtttgctcagcttctcgaggcctctgggccaaacgttctcaatgcagtgacccatcatatctacaatcttggtgctggtgatgatccccaagttccaaacaggattttgagcccgcagtatctgagccggacttctgatatattcagaggtctccagctcaccatacagcgccatggaccgtggtctgctccgtgggttggcgaatctggcggtgcatacaacagcggcagccgacttgtatccaatacttttctcaatagcttctggtatctcgatcagctgggtcagtcagcgaagtatgacaccaaagtctattgtagacagacgctgattggcggcaattacggtcttcttgacaccgacacttttgtacccaacccagattactacagtgccttgctgtggcatcggctcatgggaacaggagttctttccttagacatcagtggttctccgtacttgcgtccctatgcgcattgtgcaaagcaaaagggtggcattgctcttgtcttgctgaacctgcaccggaccatgggcttcatggtttcagtcaggaacgacataaatgtcaatctcgcagaagggcaagggatcagaagggacaacgccttcgtccatggcctgaaaaggacggtttcttgggtcgggagcaaagcctctgatggcttttctaagagggaagagtaccatctctcggcgcaagatgggaacccttttgcccggaccatgctgctgaatggagtccctcttgagctcactgaagatggtgacatccctccactgtatccagtggaggtttcagctaactcaccgatctatgttgctcctctgaccattgcgtttgtcgtcttccctgacttcgaggctgaagcttgtggccgttgatcaacttttgttttgacacgaagttttctgatatatgtagtagagatttctaaagaacaaggtcactgtaaagatgtgttcgttttctgatttgtgccccaattgggcctacattttcccaacgaatagtctcctggttcatagttagtagtctcctgatcaatgcctcgtccattgcgtcaaatgcttagcatcaatcaaattccagggaaaactgtgctatcg

SEQ ID NO: 37958 - DNA, 2061 bp, Zea Mays
gtaaagttggctcagccggaaggcccaattgatgaagacggataagctcggctcaggttaggccccggcatcgccgtcgactaggctggccctccgccgtctgccatgacgagatccgcgtccccgagcgtggacgctccacgcctccgcctcccggacgccggcgaggtgcgtccggcgtccctgctgcacacaacctgacaacctacttctctcttctatctaccacaagatccttccgccgcctccccctcctgacagagcagaggcagagctgaggcccggcctggccgggcttcggcggcccagcccaaataacccgacgggtccgcatcctgagctccgcctccacacaccttggcacctcgccctcgcctccagctccgcacgtcccgtcgcccgcttccacctccacgcgacgcgacggctcgccttcacctcctcgccgccagacgcgcccgccgccacccagcgagccggcagccgcccgctatcccaggcttcgttttcttgttggctccgccactgtgacagatggctgcggggggcgggcggtgcttgctcgccttggcgctcgccgccgcttggatctccggcgcggtggtcgccgcctcatcgtcgggtgagcaggaaggcggaagccgcacacccgtcaaatgcatgccctgctctagaacgtacattggtggtgcacatctggacaccttgacgggccagcttgctcagcgtcgtgacatagtggaaatgtctgattctggtgaattgtgcaaaggacttgctgatgatgtcgaagttcctatgctttcaaaactacgccggcaactggttggtaaaggttctcaccgccgtttagtctattctgtggattttggtgcccatgaaggtgctatggttaatttccttgatcactacgatgcccatctggtgatatttgaaaaacttcctgatggagtgtttgccgacccatttgagctacagcattttgttgagcgcaaagttttcgttgatgttgctgtttttggagacgccaaccttgaactgcccacagctctatccaatgggtcatctgttgagatccattttgatctcaggcgaatcatttcaatcaactgtaaccttgtaatagagatgcctctccatgctagatacccgcctcttgatgccagtggctatgccacagtggagtttggtagcgcagatctattcctccgctacagaaaaaaggacatccattctggttcctgtctttgggtgatcaataatctcaaagctgcacccctggagaaagctgcatggcgcataccctgtggagacgaggcccacataggatttgtatctagcatcacgtttctttcagctcttgtttgctccatgtccattgtcttggcttctctcattttttgacgtcttagggtcctatcagaccttttttttgtttacataaatactgaagtgcgagacaggagaattctcttcatgcatccacacatccttgcaaatgacaacccagttgccattaattttgctagctttagtggagtctttgcaagttccattgaacggagttgccaacttcgaatcacatacagaccagaaccagataagggtgttcctctttgtgatggaaaaaggagtcccaaaagaaaaatcatctacttcaagttcggtttgtgctcatgagtcatgaggcagtcagagccagaagctgaatgccaccatcatcttggaagaagacttgatccgctggctggaaagaaatcgaaacctaaccagtctgtcggatgctgacaaacattactgcagagcacctgatgtcctggttgatgcctgacagaaataacaaatactactaaaaagaatacaattttagatgcactcttaattgaaacgtgtaaaagtttgatcagatatatagatttaaaaggcactgatgtttatgacgccgaaagtaaatatgctatgaaaacatacctaatgacaaatttgatggtatttatttgatattagaattttctgttctttttaataatgttattacagatttaaagacattaacttggt

SEQ ID NO: 37959 - DNA, 2465 bp, Zea Mays
cagcgagaaactcacgaaaagagaggagccgggaagcaaagcgccgacgactacgccgcaagtcccaacccaacccaccctatccagaatccaggtatatcagatgactcgacatgtcagttctcgatgtttcaaatgctacagtatgttaaataacaggcaaaaggttgagtggaacaataggggtttctctacactccatgcattggtagctgctgccgtttctttctacctggtcatgatctctgacctcttcaatgaagatgcgcacaatagcataataattgacagaaaatcatggctatccgattgcatgtttggggtctcgatcggttactttttgacagacttgacgatgatcatgctgtattttccttctttaggtggaaatgagtatctcttgcatcacggactttctatgtatgcaattggtcttgctttattgagtggcaaagcacacatgtacatcctcatggtcctcttcaccgaaatcacgactccctttgtgaacctcagatggtatttggacgttgctggtcagaagacttgcaatctttacttatacaatggtgtggctctatttgttggatggctggtacaacaactgctctcacgagtcatcaatttcttttaaagaacaaatttctatacagtcataatgcacatggttcaggaaagttgtctctaaatgctagaacattgcatagttaggttacctggcagctgtagttgctacttttactatttctgctgcttactcacaccagactgcacacagaaatatcccacactgtcaactgcaggattatccttttttaggtttttgaccagattaagtgaaaaatgtaccaattttttatatattttttcatttacaaatcaaatggaaatctaaaacttctgatggaggagcagcttccttgatatgatttgttttgaagatgtgatagctgggggtaatgattagtgatggcttcactatacaaattggtaaggatcattttggatttcttttttttatggaacacaagaagagtcattttgaattttggaatacgggtttttgtcgtaaaaaacttttatgatcttgtttgaattaaccataagcgaacagatgtgtagtctagttggtagtaccttaggtcttaaggttctaatccctacggtagcaaatttaaattaaaaaacatccctcatcggttgtgttccctgatgagccgctttcagcgaaatgcacatggtccgatggccgcagacatgtctcgtaggcacttggtggcgtctagcgcagccgacttttgaggtgtttcttgatatatgtgggagaagtttcttcctgatgcaatgccgtggggacagtttcccctggtattcgagttctttttttgaattaaccataagtatttggatgccgcttctcagttttcaaatataccctaaacattctctttaagtgacccgtttgctctgatggatagttttgattaacttgtctttcgtctgatacagattgctcggataatcttattcatatatatgttcacccatatgtattttcatcttgatcaggtatgggtatttgaattttccaccccgagaggtactaccagttagcctgggcatctgtggaaatccattgacttctgacaatgtatatttttagaataagatccacagtgttttttttctgttaacattaaaggtagttcatcaatgttccgcaaaaaaataatgtagaaattgtgaaacactgaatgaagctaataaactatcaaaagttatggttgtttcagcgctttatgattatggtattttgcagctgaaaaaactggcagctacagaattatttgtacataaggtttcatcattaaaacggcttgccacagaaaacatatcttgctgtagcggcatggctgcacgcaactgctggaaaaaaatatatgacatcttgtgttatgctgctacggtgcttctgcagcagcatgaagttttttttcttcttgttaaaataggttttggtgcactcatgaattcatgaagtgtgatcgttttctattgccgttgccacccttgtttcccaggcgagatccatcttcagcttagggttctacagcttggtggcagtgccgtcggtggttgcggtgatgaacgtattttggttctggaagatactcaaggggatggtgaaaaccctttctaggaggaagcacagcgaaaatgggagaacagattagaaggaatgaaggaaggatgctactgaactgtacacatgttcatctcaacgcacttacggcactcgcattcatttctcacacagatgtaattatcttgtcttgccgtcaaagattcaaagtcggaatcccgcaactcttaaattgttgcaacagtgccacatgcaccgttactgaatatatattggccactgtcagtgtcagcgtgctcgcttgggagctgattacacgcgc

SEQ ID NO: 37960 - DNA, 2191 bp, Zea Mays
cggcgggcccccacctctggctcggcttccaaatccaaacggccgtgggctcgcctcaggccacttcggtccctcctcgagctccatccgatcctccctccccgtcgtgccggcatcgcgcgcagggaggaccggccggacggccggcccgcccgcccgccgccatgccgggatcgcccaaggtcttcttcgcctcctccgcctcgcgccgctccgggtcgctgcgccggctgctctcgacgccggtcttctccgcggcctgcctcctcttcggcctcgccggcttcgtcgccgccgcgctcgccctctcgcgctccccgtccgtcactcacagccgctgccccgattcctcgcgcccgctctccgtctcagtcgcgtgggaccgcagcccaggggatggctccgcagggggctccgcggagctcccggcctcgctcgccactggatcgcgcggccgccacaaggtcatggccttcgtcgggatcttcaccgggttcggctccatcggccgccgccgcgcgctgcgccggacatggctacccgcggatcgccagggtctacttcggttggaggaagctactggtctggcattccggttcgtgattggaaaaagcaattcaaagaacaagatggccgctcttaatagagaagttgaagaatatgatgattttgtgcttttagatctcgaagaggagtatagcaggctcccgtacaaaacgttagctttctttaaggctgcctatgcattgtttgattctgatttctatgttaaagcggatgatgacatttacttgcgaccagatagactttccttgcttctggctaaagagcggtcacatccacaaacatacattggatgcatgaagaaggggcctgtttttactgatcctaagttgaaatggtatgagccccaatccttcttactcggatcagaatactttcttcatgcatatgggccaatttatgctttatcagctgacgtggtggctagcttggttgctttgaggaacaacagtttccgtatgtttagcaacgaggacgttacaattggatcgtggatgcttgctatgaacgtcaaccatgagaacacacatgcgctctgtgaacctgactgcacggagtcttcagttgctgtttgggacattccaaaatgctcagggctatgccacccagaggtaaaaatgctagagcttcatcaaagaaaagaatgcacaggtggtccaaccgttgcagccgaggtgtccgagtccgaggactgatgatttctcggttggaacacaaactaacggatccgatagttgacctccgccctcactcagtagatgcgtttggagtattcgtttgattcattcatttatcagtggagccgcgatcgacgtttggaacgttcatcctgtaccgtagcaaaaaaggaattttgttgtatagaaactagaaggaatggatgcatcggcgattgatagacaatgcatacacctagctgtgatcggctggaattagggatattccctgaggttctcttttttggagtaaaatctgagccgtctgcttcgcctgatccatccatagctaatgctcatgttcaccggtcaaccagccttcgctgtccggacaccgaaaggtttgttgtgatggtgtagcggcgatatggatgcaaagaaacagatgcttggagggctcttatgatatatcttctgcaaggacttggtgatggtgcgttggaggcttggagccaagcgcaaagaccctatcacgggccctcctgacgggcgatacggatagcgctttgttcagatatttggactagcgctcagttgcagttgcaatttaattgcaatttataaagacagaatacggtagaaaaagtagaagccgtttccgaataagtcgcagcagacaggctaccttggagagtgattgctgcaaaagttctctataaagccccgaccacatgccttggttccatgaaaaatctataccatttgatttgtaaatgaagaccaccagtataacaagttacaagaggcaacacatgcatgcagctgccgggacacttttttcccggcaacgtaaacacaggtataaataacatggcaacaataaaaaattaatcgccctcccctcgcttagcttagctgtggaggatggcggggcggcagtagggcccgttgagccagccgtcggtgatctg

SEQ ID NO: 37961 - DNA, 2667 bp, Zea Mays
caacaacggaaatctcggtggtggcccagctcctcgagcaagttttctggaaagcagatttcactggtgagctgatcgagcgcgcttttgccgtcatggatgcagccatttctgttgcagcgaccagtaacagttgcactgtgtacatgatttgtagctgatcattcattcatatagagctagctgagcaggcttgcttggttggcttggctgtccacaatttttgcttcggatagcatttctaccaggcgactgcaaagctccaagcacactcgatcttgctgtgataattctgagaggaagggcagagggagcaatggcgccggtcagtttgcctcctggtttcaggttccaccccactgacgaggaactcatcatctactaccttaagaggaagatcaacgggagacagattgagctcgaaatcattccggaggttgatctttacaagtgcgagccatgggatttgccagaaaaatcatttcttccaagcaaagaccttgaatggtacttcttcagcccccgggaccgcaagtacccgaatgggtcaaggacaaaccgtgcaacaaaatctgggtactggaaggcaaccggcaaggaccgaaaagtgaactcgcataggcgtgcagttggtatgaagaagaccctggtgtactatcggggccgagctccacatggttctcgcaccgattgggtcatgcacgagtaccgcctcgacgagagggaatgcgagactgacacgggcttacaggatgcatacgctttatgccgagtgttcaagaagacagcgcctgggccaaaaatcatagagcattatggcgcagtgcaccatcccatcgaacaccctcagtggatggcagaggcaggcagtgttgaccgccactccccaacgctggacttgtccagtgacgctagaggtgacgacttcgagagcagcagcttctcgttcccgacggaggcgcccagcatggactccatgcacgggatgcagatgagcgcaccccacgaggatggcaaatggatgcagttcctgagcgaagacgccttcaacgccaccaataaccctttcttcatgaacccaccttcttcttcaagcttcccatgcctcccgtccaaggtggatgtcgcactggagtgtgcaaggattcagcacaggctctcgttgcctcccctggaggtggaggacttcccacaggacgtcagcctcgacaccaaggcgagcgtgctccgcagcaaccccaacgaggtcgacatcctccaagagttcctctccgtggcgtcggcctcacaggagctcatcaatggcgccaccagcagctgctacgctgcagagttgtggccatcaggcgcgggcacaagcagcaccagcacccactacgtcaacgaactgtcttccctcgttgagctcggggtgaaggccaaagaggaggcagacaacttctactatatggactgcattgttggaacatctgtagggttctcatccaagtcgtcggtccaagtcgatgaacaggccgttaggttggttgagatcgctgacatcgaggggttgaagcaggaagagaagaggcaggtagagaaccttagaggtgtgcggcttcacaacaatgacctaggagagattgttgtacaaggagatgaaagcaatccaacggactgcatcacacaataccccatatcagattattctgctgacaatttagactgcaggagaagccggtcacctggccgatcccactgacgttggcggcggcctagccactgcacccatcttctcgcaatctcagcctgacgacttcgctattgggttcggtgacgtcgacgtcaaccctaatgcatctttcgacctgtacgagagggtcgacgtcaagcatgggctcttcgtctcaacggccggtgcgccgaagacattcttccaccacgttgagccatcgaagaaggtcagcgtctacctgagtcccgtagcgagcgacgtcgtcggcaaggcgaccgagaagttccattcccccattactgtgacagcaaccaaagcttccgtttttagcaagttgaaggcgctcgtcactcgtcagggacaaattcctggtggggaagacgcctccatcatgccgccggaggtccttaggcagcaaagaaatagcggcagccccacgacgatgaataccgagcaagagttggtcaagaaggcgaagaaggtgatgaagccggggcatggtggtggtgatggaaaccaagcatgtcttcttcttccactctccaagaggagcaaaggcatttccagcatgttcttctcggtgagaaatgggcataatttctgacatccgcgctcagggcgcaatcactggaaggtctttctgatcatgactcgtgcaaaaaagtaagggtcgtcttgtgctactaggcaactagtatcgggtgcctgcatgctgctggtgcatggagatgcatagtctttctcgtgcatcagtcagttaactggtgtgtataactggagaaatgtaataatccgtatttaattttttactcgtccgtacgtgtattaacacgtctgaagaaattgtacatggaaacattgtaagtgcaaatacacatgtgacatgttcatccatatacacggttacgttatatttggtgtaactggttagggactcgtgcgttacaatggta

SEQ ID NO: 37962 - DNA, 885 bp, Zea Mays
gtgatatatgcactgctcagtacgcagccgctcccactactagattcaggtgagctcatcattagtgccccggcccttggtgcggtgcggccaacggccatggcgaagcttgccgcgcagctcaagagcaagttctttggcctcgtcggccgcatcaccagctgtggccgcgccggcgccacccacaaggatgccgctggtgcgacagaggccaagtcatcagtgggatcccaggttcctcgacctgtactctaataatctctgctatacagatattgttggctttattacgacttaccgagtttcgctggttatttttgttttgcttaattaattactcatgcataagctaaatatacagaagtgtcctgcatatatacacacacacgagtatatatatacttgtgccccactttaggtcaggagactcggtggatcataggaatgacatttgttgttgatgctgcttgttctttgcagcctgttgagatcaggtcaaggggaggtgctcctcccgttgatggaggggccaagggtcacatcaacagtgacaccatctagaggagagggagaggagaagagaagagatcgaagagaagagaagaagctcaccgatggtgcttggacttggacattatctgcagcttagttaccatgtttgaaagaactgaagctgtaaatcgcagtcgtcgttgcttgtgtgtgtgtgtttatagttcctccatggtttaccatcgttttcagcttttctagtatatctggtgcttgctatgtttcataatttcgggctatgttgtttcagtgtacggtatttctgttcattttcttccactattatataatctagcttatggattatataagcaattattgacctgcttatgg

SEQ ID NO: 37963 - DNA, 1795 bp, Zea Mays
aaaagtagagctgaaaaagaaaaaattcgggacacgatagtgctcgattttcgtctcactcacatctcccatcgatccagctcgcccccgcccgttttctcctgaaaacaaaacgaaaggctccgccatccggaaaaaaaaaccccacacaaaacccataccccctgcggcggcggcgatggacccgtcctcgtcgggctccggcggcaactccctcccgtccgttggccccgacggacagaagcggcgcgtgtgctactactacgacccggatgtgggcaactactactacgggcagggccatccgatgaagccgcaccgcatccggatgacgcactcgctgctggcgcgctacggcctcctcaaccagatgcatgtgtaccgccccagcctggccagccaacgcgacctctgtcgcttccacgccgacgactacatcaaattcctgcgctccgtcacgcccgacacgcagcaggagcagacccgcctgctcaagcgcttcaacgtcggcgaggactgccccgtcttcgacggcctctacagcttctgccagacctacgcgggcgcctcagtcggcggggccttcaggctcaaccacggccacgacattgcaatcaactggtcgggcggcctgcaccacgccaagaagtccgaggcgtcgggctactgctacgtcaacgacatcgtgctcgccatactcgagctgctcaagtaccacgagagagttctgtatgtcgacatcgatatccatcatggggatggagtggaggaggctttctacacaacagacagggttatgaccgtctcgttccacaagtttggggactatttcccaggaacaggggatatccgtgacattgggcattcaaaggggaagtactactccctgaatgcccctctagatgatgggattgatgatgaaagttaccagtcccttttcaagccaatcatgagcaaagttatggaggttttccgacctggcgcagttgtgcttcagtgtggtgctgattccttatctggggataggttgggctgcttcaacctctcaatcagaggtcatgcagaatgtgttaggtacatgaggtctttcaacgtaccattgttgctccttggtgggggtggatataccataagaaatgttgcacgctgttggtgctatgagacgggagttgctcttggccaagagcttgaagataagatgcctgccaatgagtattatggatactttgctccatattacactcttcatgtcacaccaagtaacatggagaacaaaaatacacgacaccaactggatgatataagatcaaaacttcttgataatcttagaaaacttcaacatgctcctagtgtccagtttcaagagagagttcctgatacagaagtacctgatccagacaaagatcaagatgatccagatgaacggcatgatcctgactctgatacggaagtggatgataacaaggctgtggaagcgtcagcgaggaggagcattctaggtatgaaagttaagagagaatttggtgaaaatgataccaaagtacaggtaggtatggaagttaagagagaatttggtggtgaaaatgataccaaagtacaggtaggtatgaaagttaagagaaaatttggtgaaaatgataccaaagtacaggatggtggcagagttgcatctgaacatagagtactggaacccaaggcagaagacaatggtttctccattcaagctcctagtcgtatggtggtgcagcggggaggctcttttgtggcacaagtactggttctctggtcaggtttg

SEQ ID NO: 37964 - DNA, 2255 bp, Zea Mays
aaaaccgcggctgtggtcggcggccccccggtctccttccactcgctttccggcgggcgactggcctaaaatcgcctcttgtttgtttgcttccgtcgtcccctctccacgtagagcacgcccccggaccaccttttataagcaccaaccatctggccttgccgcgccgattcgccacgaagccgcactgtgagagagggacgcggcctgttgtcccggcttttagacgcaacttccatcgctgcgaagctatccattcgtgttcgtcatggccgccagcgtcaccgtggaaaacctcaaccccaaggtcttaaaatgtgagtatgcagtccgtggggagattgtcatccatgctcagcgcctgcagcaacaactacaaacacaaccagggtctcttccttttgatgagatcctctattgcaacattgggaatccccaatctcttggtcagcaacctgtgacattcttcagggaggttcttgctctttgtgatcatccgtgcctcttggaaaaagaggaaaccaaatcattgttcagtgctgatgcaatttctcgagcaaagcagattcttgcaactattcctggaagggcaacaggtgcatatagtcacagtcagggtatcaaaggactgcgtgatgcaattgctgctggaatcatgtcacgtgatggattccctgcaaatgcagatgacattttcattacagacggagcaagtcctggggtccacatgatgatgcaattactgattaggaatgagaaagatggcattctgtgcccaattcctcagtaccctttgtactcagcctccatagctcttcatggtggagctcttgtcccctattaccttaatgaaaaaactgggtggggtttggagatctctgatcttaagatgcaactggaaaatgctcggtcaaaaggcattgatgttagggccttggtggttatcaatccaggaaatccgactgggcaggtttgtaccaatcatttctcctctctcgttaaagaacatctctgcttgcttagatattctatttcctatgcacaacatactctttataattgagtgtaattacatgaagttcttgctgaagacaaccaatatgatatagtgaaattctgcaaaaatgagggccttgttcttctagctgatgaggtatatcaagagaacatctatgtggacaacaagaaatttaactctttcaagaagattgtaagatccatggggtatggcgaggatgatctccctctagtatcgttacagtctgtttccaaaggatactatggagagtgtggtaaaagaggagggtacatggagattactggcttcagtgctccagtaagagagcagatctacaagatagcttcagtgaacctatgctccaatatcactggtcaaatccttgcgagcctcgtcatgaatccaccaaaggttggagacgaatcatatgcttcctacaaggcagagaaagatggaatccttgagtctttagctcgtcgtgcaaaggcgttggaggatgcattcaacaagcttgagggattttcatgtaacaaggccgaaggagcaatgtatcttttccctcagattcttctgccacagaaggcaatcgaggctgctaaagctgctaagaaagcgcctgacgctttctacgctctccgtctccttgaatcgactggaatcgtcgtggtccctggatctggatttggtcaagttcctggaacatggcacatcagatgcacgatcctgccgcaggaagacaagatccccgcggtgatcagccgcttcagggctttccatgaggcgttcttggccgaataccgcgactaaactgttacgctgtgtgtgagttaagttggaggttcagtagaactgtagaagagctcagtgacagcgcagaaagaggcagtgttagaaaggcttaggtccttcttcacaggagcaacagttgtcttgtctcatcaaggagaaataaaaattttagttttacaacttctcattgacactgttgggttcttgacatggtagagaattgtgtgcactgtgcctggcactgggtcctactagcggcgcaatttaagcgtgaccaggatggcgccatcagccatctctgtcgatattacactgctagctgaaaatgccacttggtccctttcaggtgtttgtggacctaaacctaagttgtcttccttcaggaacttgtggactgaaagcaatagatgcgacctgaatgacggttctttgtggatctaaaagcaag

SEQ ID NO: 37965 - DNA, 904 bp, Zea Mays
ggggtctaattataactgaagtccaatgtgactacatatacgaaagccacccaacccaaggggtgtgagggatggggatgcgcatatcggtctctacaaacaattgtctcttggtacagattgcaacaatattcatcaatagatgttccttctcacagggagattcagcaagttcttgttgaaattggtgacaaggatccatcatttattggatcttgtgagtggatcggagccattgagttaagctttgtcctcgacaaactgctgggcgtgagttgtaaggttatcaatgtgaggtctggcgatgagcttcctgaaaagtgcagagaacttgccaggcattttgaaacccagggaactcctgtgatgattggtggtggagtcttggcttacacccttttgggagttgattataacggagccagtggagactgtgcatttcttatccttgatccgcactacactggtactgacgatctcaaaaagattgtaaatggcggatggtgcggatggaagaagtctgtcgacagcaaaggccgaagcttcttcttgaaagacaagttctacaaccttctactaccccaaaggccaaacatggtgtgaaacctatattgttcaatatgttaatagtgcagacgtgcaggttcacgaggcacagatatttatgcttgtgatagaggtttatggttgcgatagcagaagttatgatttgtaaaaaaaatttagtgagacattatattgtttttttaataaatttgtagtgagtaaattaaattaaattaacgaatgagagttttacaggcataacactaaaagcagacgttttgcttgagacgtcatgcttaacatgtggagtctgtgtatttggtaaactaagggtctgtctgtatccattggcactgaa

SEQ ID NO: 37966 - DNA, 4676 bp, Zea Mays
cgcgcgcatgcatgcgcattgcgattgcgatggatcatcgtcaagacgccggcgatggcgaggaggagcgccagcagcagctgggtgatctggagaccgacaaggaaccggtgcagaagcaagggcagctatcgccgtcgtcctcgtggcgggctgcggcggcggccagcatcagggagagcctatcccgctcgctctcctctctcagccaccagcaggaggagaaggacgacgacgaggtggagctgaggtgggcggccgtcgggaggctgcccaccatggacaggctccacacgtcgctgcagctccacgcgggccagcggcaggtggtggacgtgcgcaggctgggcgcggcggagcggcgcatggtggtggacgccctcgtcgccaacatccaccgggacaacctccgcctgctccgcaagcagcgccagaggatggaccgcgtcggcgtccgccctcccacggtggaggtgcgctggcgcgacgtccgcgtcgaggccgagtgccaggtggtgcatgggaagccgctccccaccatctggaacgccgtcgtctccggcctctctcgagaggccagggtgcgcatcctccacggcgtcagcggcgtcgccaagccttccaggctgacgcttctcctgggcccccctggctgcggcaagaccacactcctcaaggcgctcgcggggaagctcagagccaccggtctcaaggtgacaggagagatagagtacaacggcgtggagctcaacaatggcttcgtcccggagaagacggcggcttacatcgaccagtacgatcttcatgtccctgagatgactgtcagagagaccatcgacttctctgcaagattccaaggcgttggcaacagagctgagatcatgaaggaggtgattagaagggagaaggaggccgggattacccctgaccctgatgtcgacacttacatgaaggcgatatctgtggaaggtttagaaaggagcatgcaaacagactacattatgaagattatgggacttgacatatgtgctgacataatggtgggtgatgcaatgagaagaggcatttcaggcggtgagaagaagagacttaccacaggagaaatgatagtaggaccctcaaaagcactcttcatggatgaaatatcaactggattggatagttccaccacatttcaaattgtttcttgccttcaacaattggctcatatctcagagtctactatactagtctcacttcttcaaccaacaccagagacatatgagctttttgatgatattattttgatggatgaaggcaaaattgtataccatggacctaagagttgcattatgggtttctttgaatcatgtggattcaagtgccctgatagaaaaggcgccgctgactttcttcaagaggtattatccaaaaaggaccaacaacaatattggagccatagtgaagaaacctacaattttgttaccattgaccagttatgtgacaagttcagagtgtctcaaattggtcagaaccttgctaaggagatttcaaagccttgtgataaatcagaagggcttaaaaacgccttgtcttgtagtatctattcattgtccaagtgggaacttctcaaagcatgttccgcaagagagcttctcctcatgaaacggaatgccttcatctacataggaaaatctgttcagcttgcacttgttgccgcaattacagggacggtatttttgcgcacacatatgggcgttgatatagttcttgctaactattacatgggttcactcttctatgcactcctcctactgatggtgaatggattccctgagctttccatggcagttatcagacttccggtcttttacaaacaaagagactactacttctatcctgcatgggcttatgcagtgccagcttttatcctaaaggttccaatctctttagttgagtcaatagtttggacatcattatcttactttctcattggctatactcccgaggcatccagattttttcgtcaccttcttatcctcttcttgattcacactggagcattatcgatgtttagatgtgtcgcctcttactgccaaacaatggtggctagcatagtgggtggtacaatggcacttctactcatccttctattcgggggtttcatcattcctcgttcatccatgcctaattggctggaatggggattttggctttctccattatcgtacgctgagatagggttagctgaaactgagttcttagcaccaagatggctaaagttgacagcatctggtgtgacacttggaaggagagtattactggatagagggttgaatttctcagtcaacttctactggatttcaatcggagcattgattgggtttatttttttatgtaatataggttttgctattggcttgacaattaaaaagcctccaggaacttcaagagcaattatttcttatgataagcttagcagacttaatagaagagaccagtgtgtgcttgtggatactaaagatgggataaataagcaacaagaaaattcatctgctcgtagcgggactggaagggtggtattaccttttgtgccccttgcagtatcatttaaagatgtgaactactatgtagatacacctgcggaaatgagggagaaaggatacatggagaaaaaacttcaactactccacaacatcacaggagccttccagccaggagtcctttcagcactcatgggggttacaggggcagggaaaacaaccttgcttgatgttcttgctgggaggaaaactggtggtgttattgaaggagatataagagtaggaggttatcctaaagttcaggaaacttttgctaggatctcaggttactgtgaacaaactgatattcactccccgcaaatcacagtgggagagtcagttgcatattcagcctggctgcgccttccaacagaaattgactccaaaacacgagatgaatttgtcaatcaagttcttgaaacaattgagttgactgaaataagagatgctttggttggaatgccaggaataaatggactctcaacagagcaacgaaagcggctcacaattgcagttgagcttgtatccaacccttcagtcatattcatggatgagccaacatccggcttggatgcaagagccgctgctattgtcatgcgtgcggtgaagaatgttgcaaatacaggcagaacagttgtgtgcacaattcaccaaccaagtattgaaatatttgaggcatttgatgagctaatgttgatgaaaaggggtggacagttgatctatgctgggccgctgggataccgttcatctatactcatcaaatatttccaggcaatacctggggtaccaaagatcaaggacaactacaacccatcaacatggatgctagaagttacttcaacatctttggaagctcaactaggactcgattttgcacaagtttacatggactcatcaatgtacaaggaaaaagatgagcttgtaagtcgtttgagcataccaactttgggttcaagtaacctccatttcccaacacgatatccacaaaagtttagggagcagttcaaagcttgcatctggaagcaatttttatcatattggagaaccccttcctacaacttggtacggattgtgtttatactagtcgccagcattgcctacggggcattatattggcagcaaggcaacataaataacatacatgaacagcaaagtctattcaatatattgggatgcatgtatggcaccactatattttctggcatcaacaactgtcaatcagtgatgccattcgtttcgattgagcgatctgtcgtgtacagagaaaggtttgcaggaatgtactctccttgggcttactccttggcacaggtcactatggagattccttatgtgcttgtgcaaatagtgttgttcatgttgatagcttacccaatgatagggtatgcatgggaagcagcaaagttcttctggttattgtataccatgttctgtacactgctctacttcctctatcttggaatgttgatggtgtcggtcactccaaacatccaagtggcatccatattaacatctttgttctacaccatacaaaacctcatgtctggattcattgtgcctggtccacaaataccaaaatggtggctctggttgtactatacatctcccatgtcatggacactcaatgtattcttcaccacccagtttgggtatgaagatcaaaagaagattgacgtatttggggagaccaaatctgttgcagcattccttaaagactactttggtttcaaacgtgaattgctaccactgtcagctatagttctagcagccttcccaatattctttgccgctctattcggttacagcatttcaaaactaaactttcaaaggagataaattagtaaacaatcaaaagcaaaatagtgcttgcatagtgcaacatataaatttatgcacatgtatttacaaaaagtaaattttgttttgccctctgatacaaaaggtcaatattatgtacattagatatgtgctacactgctaattattagcttgtgtttggaataagtggttgagtaacaaacaatgcatatagaatggaatgtattatgtggcatgtataaaatacaaattgtattcatcatatgtaattgcttgaaatatatttctcttcatttc

SEQ ID NO: 37967 - DNA, 4054 bp, Zea Mays
tgcacggcccctcccctgccccttccgctcccgcaacgggtgtgcctccgttccggccccgcccgaccttctctcacctctccagcgctcgcctcccgatcctcctgcagtcccacctccttcgccgccttctcatcgcttccaaaatcgcaaagccggatcgcggggacatggacccggacgacgagtccgcggcgcagcggaaagccgccgacttgcacctgccgcgcgtcacggagcctgcctccgcgcccgcacgcaccttctgcgccgcgcagcgcgtgctcagctacggtgacggccctgtcgcctccgcctcggcgcagcgctgcgcgtcgttcccgcagcgccacgggcacgggcacggccacggcgaggcggcgctcgcccctgctgcgtccttcgccgcctgggtcgacggcggcccgacgccgccttcggcggtggcagcggcactggagcgggccatgtcgcagtacgacggcgcgggcgacgcgctgccggagttcgtcggcgccggcgggggcgagggcatcttccgcgtgccgctccgcgcggcggtgcacccggcccgcccgccgccgctcgaggtgcgtccccacccgctgcgggagacgcaggtgggcgccttcctgcggacgctggtgtgcgacccgcggcggcggaagctgtgggccggcgccgagtccggggtccgggtgtggtgcctcgacgaggtgttccgcgggtggtggccaggcgccgggccgcggcgccgcggcgacgaggaggccgcgcccttcagggactccgtgccggtcccgcccgcgctctgcgccgcggtcgacagcgccaacgggctggtgtggacgggacacagggagggcaggatcagggcgtggcgcgtggaccacgccgcgcccgccggaggagaccccaccggcagcgcggccatgttcaaggaggccttcgcgtggcaggcgttcagccgcacgccggtgctcgccatcgtcgtcacgccgtacggatcggaaggaggtgcgataaaggcatggccttgggaagcccttgctaagtgcctctcatctacaccagaagaaattcatgaggctgcctcgttggttgaaaaatcctatatcgaccttaggaaccatgctacagttggtaacatgtgctctttgcctactgctgatgtgaaacacatgctcgcagaccactgccgattgaaagtttggagtgtaactagcatgacatttgctctttgggatgctaagactagggagcttttaaaagtatttggcatcgatggccaagtcgacttagctcgtcctgaggccccagtaatgccggaacaattcatagaggaagagattaaagcaaaacccacaaaaaaggagaaactgcaaggttctttaagtttctttcggaaatctaggaatgccttgatgggcgcagctgatgctgtacgcagagttgcaacaaaagggacatttgtggaagataatcggcgaaccgaagcggtggctcaagcaatgaatgggactatttggtctggttgtacagatggttcaattattgtgtgggatggaaatgggaatagactgcaagaatttcattaccatagctcttctgttcaatgcatagaggcactcggagagaggatctgggtgggctatgcaagtggtactattcaagttatggatgttgaaggtaaccttcaggcaggatggattggtcatagctgcccagtcataagcatggcagtcggcgattcttacattttttctttggcacatcatggtggcattcgaggatggtctctaagttcccctagccctcttgatgatattctacgctatgaattggctagcagggagctgtcatacacaaggctagagaaccttaaaatactggttgggacttggaatgttgcacaagagaaagcttgtcctgaagcgctaaagtcatggttgggtggtgcatttttcgatgttgggttggtggtggttggtttgcaagaggtcgagatgggtgctggagttcttgccatggcagcagccaaagaaagtgtaggacttgagggcagtaccaatgggcaatggtggatagacagtattggcaaaacacttgatgaggggatatccttccacagggttggttcaaggcagttggcaggattacttattgctgcatgggcaaggaatgaccttaagccacatgttggtgatgttgatgctgctgcagtgccatgtggctttggacgtgctattggcaacaagggtggtgtaggattaagaataagagtctttgatcgcaggatatgttttgtaaacaatcattttgctgcacaccaagaaaatgttagccgccgtaatgctgattttgaccatatttatcggacaatgactttcaacaaaccccatggatctacagcttctgctacatctgtccaattgcataaagcagtgagtgctaatgaaaaccaagccgatgaagataggcctgagctggcagaagctgacatggttgtctttcttggtgatttcaactaccgacttgatggcatcacctatgatgaagcaagggatatggtctctcagaggagctttgactggcttagagaaagggaccaacttcgagcggaaatggaggcaggaaatgtgtttcaaggaatgcgtgaaggtcgaatcaaatttcctccgacctacaaattccaacgacaccagatgggtctctcagggtacgattcaggcgagaagaagagaatacctgcttggtgcgatagaatactatatcgtgatagccgttctgtatcaatgcctgaatgctcattagagtgtcctgttgtcgctgcaattacagcgtacgaagcttgcatggatgtcacagatagtgatcataaaccagtgagatgtacatttagcgttgatattgcgagagtagacgagctgataagaaggcaagagtatggaaaaatagtcgagtctaacaaaagggtacactctttgcttcgggagttgcattttgttccggacactatcgtcagcacaaacaacattatattggaaaaccaagaagatgtcatcctccgaataactaataactgcgaaactagtaaggctgcatttgaaatcctgtgtgaaggccaatcaatcagaaagcaagatggaactaaatctgagccagtcataagggcatcctttggctttccactttggcttgaggtccagccatcatccggcctcatcggaccaggagacacaacggaagtcgccgtgcaccacgaagacttcttcacgcaagaagagttcgtcgacggggtgcagcagagctggtggtgcgagaccaccagagacatagaggtcgtcctgtcggtgaacgtcacgggcgtcgcctcgaccgaggccgccacgcacaggatcaccgtccggcactgctgcccggcgcctccagccccgccgtccgctaacccacgcggccccattaccgactcacctagcgacgctgtgccaggtcccaagagtagccagtcgaatcacttgctgcgttctgacttcgcaaacttcggcagctccgaggtgcgcgacctgtgcggcgtgcggaagcggaacctgtagagacgagcagctcagttttgttttgcctggtgctgtggtttttttgctttctgtccgagtgtttagccggtggagtcttggatttcttgcctaagcttgggggtgggggtggggagagaagaagtggttctgctcttcatcttgttctgtacatatgcgtccctgacctctcacgtctcaccgtcctttgcatatcagatcaaaaagggaaaagaaaaaagtgtgtgtgtgcagttgttgcaaacatttttctttttacattcttacgttctagatgtggcattgaaattatgtggttagaaggtggagtacataattgtgtgtgtacttataatagaggtttacttcattgaatcaagctagtgtgaattatacacagaggcagtacatttaacttacagggcaattctcttggattaatgaggcagtgatcttttgtgcagaagaacctataccca

SEQ ID NO: 37968 - DNA, 2169 bp, Zea Mays
atacttttgtcatactttagctttagcatcttcaccatacagttgagtgtctctcggatccacctgtttttgctctgtacaaactttgcttaaattacgaaagaaaaaggaaaaggaaaagtctctcgagaattcgaaataattggaattagatcgtcgtggggattccacatcgtaaccactgaagacgaggcggcggacgagacggagagcagaaccgcgcagcgaagcagcagcggcgacaagccctcgcgtcggtagaggcgccgtccgccgtccgccccctcaactccggtagccgctggccgctgcaggtcgagtcccgtcgagccgactcgcgcttcccgatctgggtggccgcggcgccggcatggcgcggttcgaggtgaacggcaagtcggtgcaaggcgtggacttgctgcggcggcgccactggccgtcgcgcctcgacttctggcccttccttgcactctatgcgctctggctgctgcttgctgtcccggcgctcgacttcactgacgctctcatcatccttgccgcgctctccgctgctcacattctcaccttcctcttcaccgcctggttcgtcgatttccgtgccttcgtcgggtactctaaggtcaaggatatccatgccgctaacacgtgtaaggtgactcctgctaagttctcggggtcaaaggagattgtacctctgcacaaacagaaaaatctgcaggtgagacagaggagatttactttgattttcggaagcagaggttcatctactcggctgagaaagataactttttaaaactccggtacccaacgaaggaattgatcggtcattatggcaagggcactggttatggaactgaggccaagattagcaccgcagtggacaagtggggcagaaatgtattcgaatatccacagcccacatttcagaaattaatgaaggagcaaatcatggaaccattttttgttttccaggttttttgtgttgctctatggtgcctggatgcgtattggtactacagtttgtttacacttttcatgcttttcctgtttgagtctactatggcaaagaataggctgaagacattgactgagctaagacgtgtgaaagttgatagccagattgtgttgacctatagatgtgggaaatgggttaaagtccctggaactgaactactaccaggagatattgtgtcaataggccgctcaactagtggtgaagatagatctgtaccagcagatatgctattgttagctgggtctgcaatagtaaatgaagctattcttacaggagaatctactccacagtggaaggtttcaattgctggacgtggtcctgatgatatgctatctataaggcgagataagaaccatatcctatttggtggcactaaagtattgcaacacactgcagataagtctgtaaatcttcgatcacctgatggtggctgtctagcttttgtattgaggactggatttgagactagccaagggaaattgatgaggactatcttattttcaactgagagggttactgcaaataacaaagaaagtggcctgtttatactctttttgcttttctttgcaatcattgcgtccggttatgtgcttgtgaagggattagaggacccaacaaggagcagatataaacttttattgagctgttcgttgattattacttctgtgataccaccggaattgccaatggagctctccatagcagtcaatacatctttaattgcattggctcggcatggtattttctgcacagagccattcagaataccatttgctgggaaggttgacatatgctgctttgataagacagggactctgacatcagatgatatggaatttcaaggtattgttacatcggaaggtgatgacttaatatctgatgcaaataagctgcctctccgaactcaagaagtgctttccagttgccatgcactggtatttgttgacaacaagctggttggcgatcccctagaaaaggctgctataaagggcatagactggatctacacatctgatgagaaggccatgtccaaaaagcctggtggtcaacctgttcaaattgtgcacagataccattttgcttctcacttgaagagaatgtctgttatcgtccgtattcagcagaaattttacgctttcattaaggtaagaatt

SEQ ID NO: 37969 - DNA, 2048 bp, Zea Mays
caaggacaaagctgatatttgagtttatgccaagtgatattttggttgtggagtttggcaaggttcagtgtccttgggcagggcatgcaaacctgcgtggagctgaagacaggccacgtatgattggtccatgcgttgctggcacccttggagtctctcttcctcatgctgtgagtgacacagctcttgagttcaagtcgatatacatcctctccccagccaatagctcggtctgcccttgtgcttagcgctccaacactcagtctggtgaccacgctcacccaactgctcacctcaccgtggccgagacgcttggagcaattgcatccccgggtggtcagaacagtgccacgctgccgcagaacagagtcgtggacagctccaccgctggctttccaatccatgttgatctcgaatgatcttgtgcgagcactgaaggtaggtcgtcgacgtcgtggccagcgagggcgggtgcttggctcgagcatgaaaacattggagcttgttaacatggacgtgttttgacggtgattatgatgcgcctgaggtcagcgccgctgtggctggttgggccggctgagtgagtttgggcctgatattgttctaagttttgtcttttctattagctgagagatttgaaatggtgccaaaatttgtagaaaattccaaaaatcatgggacaaaatttgttggatgtataaaatcaaaagctctctaggaaagttggtttctggatttttaggttggttaccaaatattaagggatttaaatgtgctcttggaaggattgtttggattttaaaaataaaattacagtgccaaaacttatgaaattttttgggtaacattttttggtcatttgagtttgtggtaaaggtttgaggctgttcagaatccatttgctctgaaaactttgtaagccccaaaataaaatggttaatccctaatcaagtgtgagttagtgctttggaaaggggataagtttatctaaggaagagatgcagtttcttaagaagttttaagcttttggatgagatataagttggattagttccctggtttacctaagcgaattcaaattggtcacttttattaagtgctaggttgtctagatgtgtatgcctatcatatacttatttaggagtgtttatattccccacctctccttgtgagagtttgcatttcatatcataacataagcatacatgtatttgtaattgacttgtagaacacctagaagaagtggtgtttgaaggagtctactccagtgcctgctcatcaagtggatggagctatctaactaaaggttgggtagaaggatctagaacctcttctctgcaacaaaggcaagccccggtgcatttgccccttccttgtatttttaaaaagacttttatacacttaagtctagtgaaatgggcattaagtttataggaattgcttagaaactatttgatgcattggctaccttgatatccatacctttatagatacttctgatgaagtatcaaaatatgatttacaaaaatgcttagccctgcttagatcttgtggatagaggttgtcttttgcattaatgcctagctcaggggttatcttgaggaaggatgacttctacctgcaagaatattttcattgggagcatggtgggatcttactgcaaagttccctataatgctcttttcatccttaggaacacaaaacaatcctaagggtggaagtacttaacttgagacttgggctaggaacaggtgatgctccacctaggttaattaaggattggatgtgtatgtaggcctgtatgatcaaggactatcttaactggccacatgccctggatatgggacagagtaagcttgaacctggctattccatacgtgaaaagacaaccgcgcactaggcgtgggagatggtgggagtagcgtgtaccctctggctagaggctggacggaggagtattgtgctctcgggtagcgcagaccagttcatgttgtggaggatctgtgggaatgttgacatatgcagggttaagtgctacatatgtcgtg

SEQ ID NO: 37970 - DNA, 1188 bp, Zea Mays
cttcttttctttttttttaaaaaagacgaccatatcgtcaattggtgcaaaaacctacgcgtggcgtctgcatatgaagcagagttgaaagaaatggaggggcagtccagggaagagtatattgggtccttaaggaggaaaagcagtgggttctccagaggtgtttccaaataccgaggtgtcgcaaggcatcaccacaacgggagatgggaggcgaggattggtcgcgtcttcggaaacaagtatctctacctcgggacttacggaggaggcggcgatggcgtacgacatggcggcgatcgagtaccggggcctgaacgccgtcactaacttcgacctcagccgctacatcaagtggctccgcccgggcgccggcgccgcgcagaacccgcacccgatgctggacggcctggcgcagcagctgctgctgtcgccggagggcaccatcgacggcgccgcgttccaccagcagcagcacgaccaccgccagcagggcgccgccgagctcccgctgccgcccagggcgtcgctgggccacacgcccaccacgtcggcgctcggcctgctgctgcagtcgtccaagttcaaggagatgatccagcgggcgtcggcggccgagagcggcaccaccaccgtcaccaccacgtcgtcgtcgtcgtcgcagccgcccacgccgacgccgacgccgtcgccatcgccacctccgacgccgccagtgcagccggccagggacgcctcgccacagtgcagcttccccgaggacatacagaccttcttcggctgcgaggacgtcgcgggcgtcggcgccggcgtcgacgtggacgccctcttcttcggcgacctcgccgcgtacgcgtcgccggcgttccacttcgagatggacttgtagctcatcacacgccattactcgttaatcactatctgggttttttttttgtcgataggagaatggagctctctcgccatttgagaaccaagaaaatggtgagacacacaaaacaagagaggcagcagaacagacagacggcgcctagtctgttttgagagatttatttacagtggtaactagtgacatttactgaacggttaagattgtattattcaaatttttttcacattggtaacaagggattgtttcatttgtttcattcctcagttctgataaaagaaaagaagcaaccaatcaat

SEQ ID NO: 37971 - DNA, 1793 bp, Zea Mays
gcaacgactgctatgcaagcagtccttctgtgcaagcgtgcaagcaaaccatctgatccatcagattacgatccaaccacagatacaaccatgaaagtaacaccctggaataccaaaaggctccaagaagctataaggaatggtgccgatatacatccaggtgcaacacattacagggacaacaatagcatgtataagttacaggcagtccctgccaaacgccgttccattgctaagatgctacctgcatctagaggatcaatttgtcagccagggagagatcctaattgtgagtttgaaagcaaggttgtatatcggcatcttcaagatggtgacattgtacttgtcaataggcagcctactcttcacaagcccagcatgatggctcattttgttcgggtgttacctggagaaaagacgttacgaatgcactacgccaattgcagcacctacaatgctgattttgacggagatgagatgaatgttcatgttccgcaagatgaaatatctcgtgctgaggccatgaatattgttgacgcaaacaagcaatacattggtcctaggagtggggatgctgtcagaggtctcatacaggaccacattgttggtgctgtactattgacaaaaccagacacattgctaagccgtgaagaatatagtcagcttgtctttgggtcttgtgtgccgtcctcaaattgtggctctcatcaccctgctaaggtgtctgctattgaggattacgatacacttgaacttgtccatcctgctatttggaagccaaggcccttatggacaggaaaacaggttataacaaccatcttgaatcatttaacaaaaggttgtcctccatttactgtggagcagaagggaaaaataccaaaagaatatctgaaagaagatccttccgctcaaaaggaaaaagaagatccttccgctcgaaaagaagctcattctgctaaaaaaggaaaacgagaagatccttccgctcaaaaagaaaaagattcttcagttaataaagaaaaacaagagaagatacaaaaacaaaaacaaaaagatcgttctgaactggtcttatatattcacaataatgagctcataaagggcataatagacaaggcccagtttgggaagtatgggatagttcatacagttcatgaactctatggtgcatatacagctgggatactgctctcgacattcagccgcttatttacactgttcttgcagttgcatgggtttacttgtggggtagatgacctgctactattgccagagaaggataaactgagaagtaaaattcttagtggaagcgaagtgcgtagtaatgaagtccactggaaatttactggagctgacgaagatcataaaggtgatctggtaaaattgcatatggaggttgagaaggctgtaagaagtaacggtgaatcggacacggctaccttggacaatgatatgaaaaatgctctaaatgggataacaaccgacgtcaataaaatattatttcctgatggtctacaaaagccctttcctggaaattgtctctctcttatgactacaactggagctaaaggtggtccggttaacatgaatcaaatatcatcattactaggccagcaagagctagaaggaaagcgtgttccacggatggtttctgggaagactttaccgtgctttccgccatgggatatttcttcaagagctggtggctttatcagtgatcgatttttaactggtctgcgtcctcaagagtattactttcactgtatggcaggcagagaggggtaactgttaca

SEQ ID NO: 37972 - DNA, 904 bp, Zea Mays
ctacaaaggaccatcctggcaaatgatatcagttcttcatgctaaagccatttgttgcattatagttttcctgagaaaaagcccaagggtagcattttgtggatataccatccctcatccttctgagaagaaagtgaacataagacttcagacaacaggagatgcagcaaaggatgtactgaaagatgccttgcagaatctgatgattatgtgccagcatgtcagagggacaatggacaccgcggtggttaaccatagagcaaaaaatgctgcagaagaaatggatgttgatcagaactagaatgaacgcagtgtttgttgagaccaaacacaatatcattacagcttttagtactggtcagaagctcggagagctcagtcattgttccagttgtttgtaggagtaacggtcgtattcattggcttccacttctgcaatactgaaacttcttcagtttactgcataattgcttttagcaacatctatactactgcttatgtctttagtgtaggcgtccatattttttgttctgccatcgtgcggtctgcctccctccccgtgcccacagtccccaccgccgagcacagccgccgcgcccgcagtcctgcggtccccgccgccgagcacagccgccgcagtctcgccgcgcccgcagtgcgacggcggtgccggtgagggggagccgtggttctacttctgcccgtggcaggagcgggaggcgcggggcgggcggcccagccggacgacgctgttggggtactggaaggccgctggtacgctcggggccgtctactccgccgaccgccgcgccatcggggtgaagaagaccatggtgttctattacggccgcgcgccgtcagggaccaagaccaagtggaagatgaacgagtacatggcgttcca

SEQ ID NO: 37973 - DNA, 740 bp, Zea Mays
atcatccccttcctcccgcatcgcctctccctgcagtgccccctacatggcgttcgtcttctctctcacgctagatcaagcggagcactattcatcccccatcctttccttctggatgatggcagcgagcacgccttggcgaagaaacctcccgctcctttgcggtgggtttggacccgagcgcggaggaaggccgactcggatccgctcgatctcgccgccgaccaggcccaacagcaggacgttgcggcgcaggaagcattcccgtcgatgtactccgagcaggcaccgcaagaacaaccctcactgccgcaggtgttcttcatcgccacatccgacgtccttgattcagtcaatcgatgctgctctcaaatctagttcccctcccatcgccgctccatctcaaagcacagatcttgacgtactccatcagtggccgggctcgagggctcggatgagtcggagtactcctcggacgaggagaattcctccgactcgtccgaggagggtggcggcggcgacggcgacgacgacggaggcgacggtgacggcggcggtgacagcggcaagggtggcggcggcgacggcagtggcggcagcaagggcagcagcaagggcagcaacaaggccagtggctagacgccactagttttatatgttagtgtagattagtagtagaaatagtattagcgaagtaatgtagtagaagctagtagtatagttagttaaatgtaatgtag

SEQ ID NO: 37974 - DNA, 3238 bp, Zea Mays
gtccgagccgggcggcgcgtctatatattctgctgctcccactagctcggagctcgcggccactgcccaccttaaaaaaaacagtcggatacgatccgcgaatgcgagctgttttgaacggcgatttgtctttttgttctccagcgcgccagccaaccttaactgctacgatcgatcgaggggaggaagtttctggagctctagttctgcccatggcgtcggcgatggagctactggggagatcgttcgcgccgggccatgccgccgcggcgccgaggcggggaggcgggccctgcttcgcggcggtcggaagggaggggagtggtgcgcacaggaggagatcgtcgtcgtcgtcgtcgctgaggtcgactgcgccggtggacgcgctggccgagcgagtcgtggcgccgccggagagggccgaggcggtcccgccggagccgagcgtggccgcgcgggccgtggtcaccgtgcggcggagtcggaaaagggacgccaagtgccgggtcgccgagcggctggacgcgtgcgccgactgggtcggccgcagcgtcctcctcgagctcatcagcaccgagaccgacccaagaaaaggggggccaaagaagagcaggcggtcggcgctggtgggctggtttggggagaaggacgtgaaggcggagcgggtggtgtacaccgccgacttcaacgtcgacgggtccttcggcgagccgggcgcggtcgccgtgctcaaccggcaccagcgcgagttcttcgtcgagagcatcgtggtggagggctttccctccggccccgcgcacttcacctgctactcgtgggtgcagcccacgcgcgtgcaccgcgacccgcgcgtgttcttcaccaacaagccgtacctgccggcgcagacgccgccggggctgcgggagctccgccgcctggagctcagcgacctgaggggcgagggcgctggcaccggcggcgagcgcaggaccaccgatcgggtgtgggagtacgacgtgtacaacgacctcggcaacccggacatgggcgccgagttcgcgcgcccgatcctcggcgggcgaccagcagctgccgtacccgcgccggatgcggacgggccggcctaagaccttcacagacgaccgcgcggagagcagggtggagtacccggagcccatctacgtgtcccgggacgaggagttcgaggagggcaagaacgagatgctgtcggaaggcgcgctcaaggcgctgctccacaacttcatgccgctgctggtgagctccgtgtcgccggacttccgcgacttcgccggcttccacgacgtggacaacctcttcaaggagggcctcaggctaaagcaggccctgcaggaccagctgttccagaagatccccttcgtgcgcaaggtccaggagaacagcgagggcctcctccgctacgacacgcccgacatcatcaagagagacaagtttgcttggctgcgggacgacgagttcgcgaggcaggcgctggctggcattaaccccgtcaacatcgagcgccttcaggcgttcccgccgatgagcaagctggacccggccgtgtacggcccgccggagtcggccatcacggaggagcacatcatcgggaggctcgacggaatgtcggtgcagcaggcgctggaggacaaccggctgtacatgctggactaccacgacatcttcctgccgttcctggaccggatcaacgcgcaggacgggcggaaggcctacggcacgcgcacgctcttcttcctgacgggcgcgggcacgctgaagcccatcgcgatcgagctgcgcctcccgccgatgaccgacgggtgcgcgcgcgccaagcgggtgctcacgccgcccgccgacgccaccagcaactggctgtggcagctcgccaaggcgcacgtctgctccaacgacgcgggcgtccaccagctcatcaaccactggctgaggacgcacgcgtgcatggagccgttcatcatcgctgcgcaccggcagatgagcgcgatgcaccccatcttcaagctgctgaagccgcacatgcgctacacgctcaagatcaacgcgctggcgcggcagatcctcatcaacggcgacggcgtcatcgagtccgggttcacccctggccgctactgcatggagatgagctcgttcgcgtaccgggagctctggcggctcgaccaggagggcctccccgccgatctcatcagaagaggaatggccgtggaggacccgacgaagccgcacggtctgcggctgctcatcgaggactacccgtacgccaccgacgggctgctcctctggtcggccatcacgcggtggtgcggcgcctacgtggccacgtactacccgtcggacgagtcggtgcaggccgacaccgagctgcagtcgtggtacacggaggccgtgcagacggggcacgcggacaagcgcggcgcgccgtggtggccgcgcctgacgacgcccggggacctggcgtcgctgctcacgacgctgctgtggctgacctcggcgcagcacgcggcgctcaacttcgggcagtacccgctgggcggctacatcccgaaccggccgccgctgatgcggcggctggtgcccgccgagggggacccggagcacgcgcacctggtggccgacccgcaccgcttcttcctgtcggcgctgcccggcctgacgcaggccaccacgttcatgaccgtcatcgacacgctgtccacgcactccgccgacgagcagtacctcggggagcgccccgacgaggcgtggacggccgacccggccgcgctggcggccgagcgcgagttcgcggacgaggtgcgccgcgccgaggaggagatcggccggcgcaacaccgacgcgggccgccgcaaccgctgcggcgccggcgtgctgccctatgagctcatggcacccacgtccggcccgggcatcacctgccgcggcgtccccaacagtgtcaccatttagtcttctcgcttgggcggacagcggagatgatctcgaagcgaattttttccattcattgtaatcgggcggggagaaatctaaaagcagaagcaaatggttttgggaacgtatcctgtgagcacaggtcttccgtgcgcacgtgagcattttaattgggaacaattggatctataccattaaaagatccaaactttagatatataccatggaccccacatgtcattgactcatgtggacccatatgtaagtgagatagtaatagtatggatctaaa

SEQ ID NO: 37975 - DNA, 2772 bp, Zea Mays
acctcgcgcttgagaagcacgcggccatggagaacccagacgcgcaggcgaaggcgtgggcggcggagatgcgcgagctggcctacgacatggaggacagcatcgatctcttcacccaccacgtcgaccacgaaccggccgacaccgccaccaccggcgtcaagaggttcttcctccggatcatccggaagcttaagaaactccactaccgccacaggtttgctcaggagatcaaacaactccacgaccttgccaacgaatcgtaccggcgtaggaagaggtacaggattgaggagggcggttcaagcctcccgcacgcggagatcgatcctcggttagaggcgctctacgtggaggtggagaaactcgtgggcatccagggcccaagccaggagatcattggacagctcgtcggcgagaacgcagcggagcggcggagggttgtcgccgttgttggatctggaggttcaggcaagaccacacttgccaaacaggtgtacgagaaaatcaggtgccaattctcttgtgcagcctttgtgtccgtgtcgcaaaagcccaacatgaatagcctcctgtgggagttgttatctcaaatcgggaaccatggtggagatttaggaatgatggcagtaggatattgcagtgacaaacaactgatcgacagactaagatcacatcttgaaaagcagaggtatctcgttgtgatagatgatgtttggacaaactcagcgtgggagaccatacaatgtgcgctccctaaaaatgcccatgcaagtaaaataattctgacaacacgaatcaacagtgtaggccagttctcctgcactccagatgagggttttatctatcagatgaagcctctttgcagaaacgattctgaaaatctgtttctgaaaaggacactatgtgataaagataagtttcctgctcagctggaggggattaaaaacgagataatcgagaaatgcgatggtttgccactggctattgttactctagctagcatgttagctactaaacagagaacaagggaagaatgggagagggcacttgattcaatccattctacgcacaagaaagatagtagcctggaagtgatggacaagatactgtctctgagttacagggatctacctcacaacatgagaaattgcttgctgtatatcagtacatttccagaggaccacacgatttacaaagatgctctagtatggagatggatggctgaagggtttatcgctgaaacacaaggctttactttggagcaggttgccgagggctacttctacgagtttgtgaacaggagtttggttcagcccataaccttgcgttcaagatatgaaatgcgtggagaaggaggttgccgagtccatgacattgtactgaacttcctcatctctcgtgcagctgaagagaactttttaactacgctgtatggcgcccagggggttccatcttcagaccgaaggattcgccggctctctgtctgggacagtccagaacacgcactggcagtctctagagcgaccatgaatctgtcccatctccggtcagttagaatatgcaacgttggagactggcccgtgcctgctgttctagacttacctgtccttcgagtgttagatctagagggatgccgtgatctgaggatcgtcgaccctgactgcattctaagcttgtttcatctgaggtacctgggtttccgcagcgcaagtggtgtcgtgctaccggctcaaataggaaatttacaccatctgcagaccatcgatttaagcgggactggagtgacacagctgccagaaagcattgtccagctcaagcgactgatgcatcttgttgggcaacggctcatcatgccagacgggtttggtagcatggaatcccttgaggagttaggtactatcgactgctgcaagtgccccgctgagggtgctccgagtgaccgagtggctttcgtcggggtcgaaacaagtgacatggaaaccagaaggaaatctttgatgtcatccctctgcaaactcggaggagacaaccttcggcgtgtcactattatcgacctcgctggcggtggagattgctttgtggagtcgtggcaccctcctcctcgtctcctccagaagttcatccatatcagtcagcaacagcacttctccaggtttccagaatggatcagttcctgcctatgtgatctcacccacctggatataaaggccgaaaagatggaaagggagcatctaagtgttcttgaacacctgcccgccatccgttatctataccttttcgtgaagcgagtctccgaagacgggctcgtcatcagccacagcgcgttccgatgtctacggcgtctcgagttctgtaacttagatggacctggtttgatgtttgcaggaggcgttccaatgctggaatggctgaggctcgggttcgacgcggatagagcgcaatcgacatacggcggtctggaggttggcatccagcgcctctcgtctctcaaacatgtcgtgctcattgtctgtatggtttctgaaggcggtgatgatccagcggagcaagccgtctggtctgccatcaatggccaagtagagatgctccccaattctccgacggttgatatccggtttcgtagacggagtcagctgcaggcaagctcagaataaggagcacgaaaaagacgatgatgttgggtgtcgcctgctgtagtatgttgctgcttctgcttgttggcaaaatggaatgctgacacttcacagtttacatgttcaattgaggtta

SEQ ID NO: 37976 - DNA, 823 bp, Zea Mays
aatttctataaatctgaaggcccactcacacatatatgttgaagctattgagaagaggaaaggggagaacacacacgctcgctcattcacctctcgtctcctcgctgggtgggtggggtggtctggcgatttcttgcttctaaccttatggttacaggtgcgcgaatttcttttgctacttgatatttttgcatgcatggagaaaattttgctgacctgttttgataagaaattattctcgcattaattgtgattgattgcgagtaaatcacgttagtgttgtgactacacgactgtttacttgcctgttttgccgcgtcgtgtgtgtaaaatggggccgagacgtcgtcctcagaatagagtttttcagcccctcgttccatcgcgttgtgctgccctcgtcttccctatcctgccgtcgacgtgccatcgaagttgggagagcaggatctttgaagcctacgcctcctcgtgtccctgcacgtggtagaggccatatcaagtttttgggaagcgccgtcgcgaatgcttgctgttcgtctgctttctctacgtcgacatcgtggttctcgtcggatgcttcgtctactcttgtattgttctagctccgacaagctcataatgtctatcctttctttgttctgtattctcatattctttcaatcactagcactagattatgaactgctagtgagttattcgacactgttgttcttgttattattatcggaatcaatttgttcatcaataaattgcttttgtttcggaatcattgaagacttggcataatttactttcaagcctgtggatgccccaaaagttt

SEQ ID NO: 37977 - DNA, 1756 bp, Zea Mays
gctatcgccacactgtccgatctcactggccgctcgatctcatccgtccgctggtaagccataagccaaagaccacaatagatctcgtctccctccgttcccctcctgtccgtcattttctcgtcacctacatatctccggctcgccgtcggcgtcgccgcctcctcctccttcgcccgctggaggcgcccatagcgacctcaccggtgggtttgctgaagtgacatcggccgaggtggaactggttggggggagtccatttcgggttcgagcagcctgagccggcgcgccggcagcgacggaggggcctcgcctccgtccccctctccgatggctggcagcagcagcggccccgccccgggccaggcagccaaggacaagaagatggcgtccgcggaacagctggtcctggaactctgcgaccctgaactgcgcgagaacgctttacttgagctctccaagaaaagggagatttttcaagatcttgctccgctgctttggcactcatttggcacaattgctgcgttactccaggagattatatccatttacccgtcactatcaccccccacactgtcacctggagcatcaaaccgagtttgcaatgctcttgcacttctgcagtgtgttgcatcgcaccctgagaccaggatccttttcctaaatgctcatattccattgtacctgtaccctttcctcaacactaccagcaaaacgagaccttttgagtacctaaggcttactagcttgggggtcattggtgctcttgtcaaggttgatgatactgaagtcatcagttttttgctgcaaactgaaataattcctctgtgcttgcgaaccatggagatgggtagtgagctatccaaaactgtggcaactttcatcgtccaaaagattcttctagatgatgttgggctgcgctacatttgcgccactgctgagcgtttctttgccgtaggcagtgttttagcaaacatggttgtttcacttgctgatcagccctccacaaggctgctgaagcacatcattcgttgttacctccggctgtcagataaccctagggcttgtgctgcattgcagagctgccttccagacatgctcaaagatgggaccttcaataactgccttagggatgatccagcgacaaggcgctggctccaacagctcctgcacaatgtgactggcggaggcatgggaggtgctcctcaaccaggaatggatcccatgaacatgggaatgtgatgtgcattctagttgttgcaattcactgcaataacacatcacctctcagtgaattacaactagagaagatctggccactgtccagatgaaacttagtatggtgtagcctgactttctgccggggtaaaaataggaatgttgtttggtattgccataagctaagctgtagaaacaagatcggcaggcttctgttattgtgttcttgcaccggagctcttgtgcgttgacccttcagaacctgagaacaaaggaggaaacccccgtcccgtgaagctttgtcgcagtgccgatcgatcaagatcttgaattgcttcagatgatgccataagaaagcatactgaaaagaagtgtatgccgtgtgctatattttacgagtttatgggttgcttttgtctttctagtggcgtcgtgtaacaaagtccgctgttcttaatttgttcaggtaacaattaattaatccagcaatattttttcccaggttaccaataataatataaaaatatattctataaaa

SEQ ID NO: 37978 - DNA, 2729 bp, Zea Mays
ggcgagggcaccccacaaccacaccggacgcggcacgctggcgggtggttggcaaaagccaaagggtaggctttcatcgcctccgcgtcgcgtcgcgtcgcgtcgctttggatgcgactgacagcacgagtctcccgagacctgagtcctgagatgagaagaaagcactaaagcagagtgggatgccgcggtgaggactgaggactgaggactggacgcgcggcgcgggtgcgcggcttcggagtccgctagactacaccacgcgggttcggcaaatggggatggcggcggacgcgacgacggccatgaccatcgacttcctccgcgcgcgcctcctctccgagcgctccgtctcccgcgccgccaaggagcgggccgaccaccttgccaagcggtcaatagtcaccgagcccgtcgccgcagtgcaggttgtggagctggaggagcagctccggacggtgacggcgcagcggcgcaaggcggagcgggcggccgcggaggtgcttgccatcctcgactcccagggcttcggccgcctctccgacgccgcggacgattcaggctcagagtacgaggccgacacgggcgatcccaatgccgtcgagagggacggaggcggcgggaatgcagcggaggacgcgctgtcggggtcggagctgggagccccggcggcggcggctgctgcctctgctgctcaggccgggggcttgtcgtggaggggccgcgccgcgagccccgaatgcgagaggcggcggccgcagcaccaacagcacaagggcaggcagctaaggcagaggcacggccacggccacggccacaggaggggttacttttactgccgcgccgcggattcgtcgcccaagtaccacccagggcagtcttgccggaagatcaagaggaaggagctgagatctcagacagaagaagaggagggcaacgacaatgcagtggagagcacggaggacgggcaggagagatcagattgtactgtttgcactgatcaaccggctgatgttgatggcgaggtgaaccaagatgggcatggctcttctagtaatggaagaggggaggatcgtgatgatcttgccatggtatatgagaaggatggggagatggagagggtactcgagaagcaggctgagctaattggacagttcgaggctcaagaaaatgctcagagggagtgggaggagaaattcagcctgagccgggattcagataatgttaacttattaaacaacaagctaaatcaggctgaaaatgcttgtgggaggagggaaactgctcgggttgtagataaagaagtggtttgtgaacaggcaagatcaagtgacaataatttccattgcatcaacgacccctctgaatgtctaccaaatggccctgtttcagaattgccccaaaatgtagccaaagatagtgttactgaacaccggaaatttgatgggtttggtcatgattgtgtagtgactgctgcagcagtaatttcaagccacggagaactgcaggttaggaaggatgtgctgacaactaaaagctatcctgaaggaagtggcaataatcttgggaaatcagctctaccaccacaaggaagctgtggtagcagactaaatgcaggacatagaaatggtcaaggagatgaaagttcagacagtggttcaagctaccatgtgaatgctcgatcttctgagcaatacataaacacatcatcagttgggagccagctaagtgatactcctaaaagcgaagtctcagaatggagctcctcttgctttcataaccataccgataaccagcttgatacacaacttcatcaatcatcaaacaaagatgtaggaggggtgctagaggcccttcgacgtgccaagatgtctctcagagcaaagctgagctggccaagtctagccagcaagaacatattggcacttgaagcaccggatgatttgccagtcaatggcatggaactttcactctgcaggacagcccatgtcagtcaggaaatattcgcactaccaacaccaacagactaccttaacaaggtattaccgcatgatgatgtgaaggtaccaataggtcctgctggtttgtttcgtttgccaatagattcatttcccagagatgagatgaccacaagggatggctatggttcatggttcagtttgacctcggtgagtccaccctacgtgtcgccaagctatcatgctgatcatattatgccagctctatccttgtctcagtatggttctgggttgtcactaaatccatactatgatcctcatagttccatgttgctatccatgcccactgctggtgggcgtagcgtccctgtgtcagatttcagaataggggatggttccttcctccgagaagttccacggcctgacaattattaggggatgccttctagagacaactgcacacttccagtatggtcatggtcacgggaactctcataatgttcaaatgtatcttcatgctttgtaaaaactatcaaaaagttcaattgtacctgttcatgcttggaatctcacgtctgtgatggtgttggatgccatttgctgcatcgattctgcattacgttaggtactgatgtataccatgtagtgttgcaaactaagaacatgttctgtttgtaagcagtatcggtgtttgaaatattatttcgtccgtccgatgtaagttgtgataaggtactaggatggtaataaagctaatttttttaactgaaa

SEQ ID NO: 37979 - DNA, 3211 bp, Zea Mays
ccgccgctttaaaccccgtccgtgtcccgctagccgccattgcagagcactgactgagcacaccacccaccagctccgaagtcatgtcccacctcgacgcggcctcgctcctcgccccctcgccgccgctggcaaagccccacccgcgcagccgcttcctctgcctcatctcctccatgctcgccgtcctcggcgcctccctcgcgggtctcctcttattcgcgctccaccccgcgccgaacccggtcccgaactacgcgtcgctcttcctctccctcggatccaacgacaccgccgcctcgcacctccgagcgctcactctccacccgcacgtcgcggggaccaaggcgaacgccctcaccgcccgctacgtgttcgacgcgctctccgcgctctccttccccacccacatcacgccttactccgtcctcctctcctaccccgtccaccgctccctctccctctcggcgccaggccgcggcgtcgtcacctccttctccctaaagcaggagacctaccccaacgacccctacgcagcagccgcggcggagaccatcccgacgttctacgcgtactcggcctccgggtcggtctccgcggaggccgtgtatgctaactacggccgcgaggaggacttctcttacctcgcctcccgcggcgtggacgtcgcgggcaaggtcgcgttcgcgcggtacgggaggatccactgcgaggacatagcgcacaacgcgcgcgccgccggcgccgcggccgcggtggtgtacactgacccgctgcagtacggcggcgcacccggtgaggggtggttccccgactcgcggtggctgccgcccagcggtgtgcaggtggggagcctcttccggggcgtgggggacccgacgacgccgatgtgggcatcgtccgagggctgcgagcgcgtcagcttggaggaggccatgaataccgatgacatgccgctcatcccagccctgccggtatcggctcaggacgcgatggagatacacagagccatgggcggggccgtggcgccggaggactggcagggccgtgaagacggacccgtttaccgcctcgggccagggccggcagttttgaacctgacatatcttgggaatgattcgatggcaacgattgagaatgtcttcgccattatcgagggcgccgaagagcccgatagatatgtcattcttggtaaccatcgtgatgcttggacgttcggtgcatctgatcccaacagtggaacagcagctatgattgagttagctaaaaggttttcaatgctgcaaaaacaaggatggaggcctcgaagaactattatcttctgtagttgggacgcggaagaatacggactgacagggtcaactgaatgggttgaagaaaaccgggagatgttgtattctagagctgttgcttatctgaatattgacgtttcagtcgttggtccaggattcctgccttctacaactccccaacttgatgagttacttcagcaagtaactaaagtggttcaagaccctgataattcatctcagactgtgtatgattcatggattaaatcgagcactcctctccgggtgagttgttgcaacttgcttatccaacagcctaccttctatgtagtgctgagaatccagttagttgtcactataaaatagtgattgtattgttaccaagctacaagttccttttcagtttcagttccattcctcgagaattatgtggtttcaggaggacagaccacttcgacttcctgacaaattatataacattactcactattcactgcatatctcttgcgttaaggttcttagactaggtgatggaggatcagactattcagcattcgtccaacatgttggtattccttcgatgaatataatttttggagaaggtaatgcccctgctctcttctatttgtctgctcagtgacttttatttttcaatgaactttcctgggtacttttgcttttgtaggaccaggatatccggtttaccactccttatatgatgactacgtatggatggcgaaattcggagatcctgcgttccgtagctgctagcatatggggaatgatggctttgaggttggcaaatgaagacatcctacccttcaattacatgtcctatgcaattgagcttgaggcatacacaaaaacggtagagaatgaagtgaagggaacaactgtcacttgttcccctctgtacaactcaatcagaactctcggagcggcagctaccaaagtgaataacgaacaaaaggaacttcaaaagctactcttgagcaagcagctgaacaaggattcactgaaaatccgacaactcaatgaccgtcttatgcagaccgagcgtgcattcactagcagggaaggcatcttcaagctagaatggtttaagcatctggtgtatggaccttcagaccagaatgactgggatactgcagtctatccaggtatagccaatgccatagccagcgcccggagcagcaacacttcggagtcctggaagtttgtacagcatgagatctacagagtagccagggccgtgacacaagcatctgctatactgagtggccgtctgacatgacaggattcaaaccatattcgttaaaaaagattgttactgtggatttcggaagttttgacattttttgaaactttcgactatgaaatatctgagttgcagagaaagaccgtgcaccacattagggcttgttcgttttgctctcaatccatgtggattgggtgggattggatgagtttcaatcccaaacaagtcaaaatctttcacaattttttccaatcccatccaatccacatgagataggaataaccgaacaagcccttaaaaggatttggtataggtcagaactttccgatagggggttggaaatttcaacttgggcatactttccaaacacaaaaaagaagtgtgcagtgttgtgcttagtgtctctcagttttatattaaagaatttgttatgcacttaagcacaactagtagtgagagttgagccgctttttagtacaggttccctatactcaagaatagaaaacaagtttacaaagcattgaggttgaagcttgattgaaagctctcatttcctgtacatctattggacaaatctccatttgtgcttaacaactataatcatatcccatatgacttgttggatcctaaatttcttgtcatcaatacaccaaaaacccacttc

SEQ ID NO: 37980 - DNA, 3011 bp, Zea Mays
ccgcaatggcgggctctctctttcccgctccgaaacattaaaccctagctccgcgcaccatttcccgaatccccaacccagcgatccgcctccagcgccgggccccaatcactgtgcgaccacgatgaggccgctgccgaagaaaccaaatgcagcgctgccggtgccgaagcaactcaaggtgcatcacccggaaaatgagtccctctctcgtttcttcctagagaagtggcgggcgatgatgcaggagccggatgggctctcgcagaacaactacctggccttcgccaacgccaaccgcagcctctgctcctccaaggagccaatccggaccctcaaggacttctcgaacgtcaagggtgtgggaacatggctcataaatcatatgaaaagtttctttgaaaagtcgagtcaggatttatctcctgccaaaggaaagaaagcaaaagggacaaaaagttatttgccaaggaagaacactgctgcttatgccatactaataacactccatagggcaaagactagcgggaaagattttatgatgaaacaagagcttattgatgctgctgaagccagtggactgtcacgagacgcgattggtccaaataaaagtaaagcaaaacagagttacgggaaggactggtacactggttggagctgcatgaagacacttctatccaatcgacttgtcaccaagtggagtaacccagcaaagtatatgctaacacaagaaggggaaggcactgcacgtgactgtctttcacggtctggattagatgattctgcacggcctctaacgataattggtgctcacaacacatctgctatggatccttctgttgccaggcacagtcctgagcttgtcagcgacagttctctgacaaaaaagaagagcaattgctaccgtcaagttcaagctactaattacgaaggaatcatttgttgcgattcagattcagaagagccatgtggaaaggacattcccctaaaaggcatggagcctattactagttgtggaccaccagatatttctcgtccattccaaggaacacccaaactgcaatcttctacaatgggttctgctaaactagctatgccacctcgtcgagccaatgaaaactttcttgaagcctatgaagttattttaatattggatgaccgtgaaaaattcgggtctcgttcaagaaaagttgctgataacatttgttccctgagccattttgctgtggatgttagttgggatcagagtttgcactcttctatatcatgtcctactttctctctgctgtagaaatgaaaatgggggcatagttatactgattagcgatatctcttatatggtgccagacctagagcctgacaatttcattggccactacattttcccgctttcatgtttatgcctctattacatagttggtttcaaaatataccattggagtcctaattctttcagtcaaggatctttgactattaacaagctacctgaaaaaatattagaaaacaattagaaatgaaaaaggcaaaaaaagtacataaaatacagtgaaaatttagtagaggtaacaagataacttgcttgatattttgtctgtttcaactttcaacttctcatgctggcagcctatagtatctccttgtgctcaaggtggctgatggcatcagtgtctaatgtcacattgtggacagtgttgcaaatcattggattagttttttgtataaacgtctagaatgcatcctcttggatatagtttttgttcttttttaacataagaaaggttgaggcgtgatgcttgattgattcgtttgcgtaatgtgccagagaaagtggttttgattcttcagtttgaaccttgtcgtccaggtcaggcaattgcctgtgggagatggtatttggattgcccgtcataaggaagatcacacagagtatgttcttgatttcattgttgaaaggaaagaggttatggatttagatggctcaattgaagacaaccgatatagagatcagaaattaaggatgaagaaatgtgggctgaggaagttgatatatcttgttgaaggtgatctcaaccgtgcaccaaagagggttaaaacagcctgtttcaccactgagattctcgatggatttgatgttcagagaactactgggtttgccgatacccagaagagatatgttgatcttacacgttcggtaatagcatactatgatgcaagtttctcgatcgttggtaaagcttcccctgtttgcccaacctacgatgacttcaagagaaagtgttatgatcttaagaagaaaacagtgagcgacatatttggctgtcagcttatgcaggtaccacaagtaacagaagaagctgcacaagctgttgtagagctctatccaacccctttgttactggcaaaggcatactctatacttggtggcgatacctctgcacaagagaagatgctaaagaagaagaacgagatggtaaatgcaggagcaagccgaaacatatttcaccttatctggggtgacggatgaaaaatactctggactggaaccagttgcgggccaactgaactttggtggcttatggtgtcaccgtcgtggtgaccatcttttgtgtctccgagatttagaggctcccatgttctaaagcaaatagtggctccatagaacactagggatctagattaggaagagtttctctctacgtcgcgtctagagagtactctgctgtggtgtcgtggttgcacagtggaatgaagtggtcccttggatttacgtggtcgggatttcgtgtatcggtctgggttgtctggattatgtgctgtctcgagctacctcggggctgttaagtctacaggatagcataaaatatcgcagtgtacctacagggaagattgtatgggtcgcccatgtgttccatggtcggcgccttgtctggtcatctttggctgaggccctcctacatacaatgggtgtcgctttggctggccaagacaagagcagactgccctgccgtttg

SEQ ID NO: 37981 - DNA, 2059 bp, Zea Mays
ggaaggggaacggtggaagagaagtggagcaccagcgaaccgcatatgctcggggttcttcgtcgcgcagccctcgccgcagcgtcatcgccggcggcggacctccgacagagaagaccaagaagtttcatatggtcttaattgggctattgctggaaaaggtgtcattgtgaaagataaggtcctccataacttggaaacatctgagcttcagaaaggtggcgctacttaccctgactttttgtctggtataccacttcatgttagaggagatgttattggtggtgtccctggtgtttctaaagctcaatttgcaaagcttctaaaactggtaggttctaaattttggcttcaccactcaggccctgttcgttttttgtcaaacaatggggattgagggggaacaaatcccctataagtcaaaatcctcctcaatcccttccaatccccccccccccaaatccccatgattttgggatgaaacgaacatggcctcaatgggatgatgatattcaatgatgattgtcatgaatggagctgaaatactgttagtccctttttttagcatctgattttttttctcatttttaatttagttgtgacatctccctatttgttgaagggcagtcctggtgcaacaatgagagctgtctcactgagtcatcaggtcacgggttcgaagtagtctctccgtatttgcgggggaaggcttgcttcggtttatccctatcctagacgtcacatatgggagcctccaacagtggatctacctttttttatctccctgtttgttgacagactacttgcttgcataggtgacgttccatctttcatccatctcgtgtctatatgttcaagatggcgccattggttcctcagcagaatgtgatgcaaaggttcgggtcattagtgataatccctctgctgttatgttactgtcgaatgtcctttggaaaataccagatcgtgcgatttcccatgacacatcccctttgactatatatgctaccagttcaataagtaacaacgttaagactgttcttggttctggaacacaatatgctaatggatttgctgtggcggatattgaacgatcatctctaatcctatgcggtaaagcatttgctgattcagctatcgtgaaagatgcacttactgctatgacagccccaatattgtctgcaagaggaggcctccctgttccaggatggattctgaactttggtggttctactgtattattgtttgccccagtggaaatcatgatgtcctgcgtagaaatccacaatgctctattgtccattgactgtggtgcagtcatatcttccaaggggtctactgtgcttttcccaacaaaggcaagcagggagcagaaactgcttaccaaaccaactgcagtaattatcgtatcatctgatagctctggcgccataccatctgtatgtaagctctctcctggccaggctgcctaccatttcttggctggatatcacgatggaaaatttgtcccagcatacaacagagccccctctcctgctgacccacttgcacttgcaagttctttattctcacatttgaaagaagatgatacaccatcgtatctgatcaacgctaagcactctggaaagtacattgacggcaatgggtttatgaaattattaaagctggcactatctcacgatcttcctgacatcaaaactgaaggctctagagttggggaactcaaggggaagtacaggagctttctatccagcaagtttggccaatgtttacccgaggaattctctttttaggagatacaccctgaggttgcaatgaacatgtatatttactggcataggtttacattttggtttgaaaaggtgtcagtattcccattctgtctcagtttcaatgtaatactctattaccttacattgcatctttccgcctcctggtgtttggatatactgacgtaacgacaatgtagctagtacctacatgcatgaattgtcttgtgcactccgcttcagtcaaattttgttaagcagcagaaaattggaaactctcagtatacatg

SEQ ID NO: 37982 - DNA, 1632 bp, Zea Mays
gtgaaatactactgctaggaaatcgggacatgatgattgtttgttttctaagctcgttcgccctctctcttctctccgtccaacgacggcgcgattcagatccaggcatacaggccatccttccgccgccgcggactgcacctaatcttccttctccagcagccgggcgttcccgtcgtcctcgatcgtcccctggactggatcgcaacggagatccagctggacctgcggtggtcccttccttttctcgcataatgagctcgccagtggagaggtgattcgtcaggctggtatcaagttcctagtccatggtgcctggatgagcagtagagatgctactggccgtggaaggaggagggttcttctcgtcttcagctacaggttacagccatggcctcgccctcttgctgctcggacgcaaagctgaggagaagcccgtaaaggtctcgccgtggaaccagtaccggctagtcgaccgggagaccgagcaggtgtaccacctgccctccgccaaggaccaggctcctgggaaatgtgctccctttgtctgcttcggatgcacggctaatggcctcgaggtggcgtctcctccaaaagcgacctccagcaatgcgcttggtaccggtacctcacaggaagaagcatcttgttcagcaaacaagacgttgaccactagtggttccatcagtggcagtgagagacgaggctgtcttaagagcaactccaaaagggattctttggagcaccgtatagtggtgagcgagggtgaagaaccgcgtgagtctttggaagaggtgcaaaccctgagatctagcatggaacggaggaaagttcagtggacagatacatgtggaaaggatctttttgagataagggagtttgaaacaaggtaaccatcttgtgaggtaacttatcttcaagttttcaagtaacaaagataccacaaagttcgagccatcttaatgagtagtctccaaccaaaagcgacgagagtctgtcagatgatgacccagaaaatgaaggtttccggaaatgtgagtgtgtgattcagtagatttcttgtgtgcacaacaagcctgacaggaacatctcctcatgggaagcccatgtcctgctgagaaggacatgccatatgttcttctgggaaggatatgccacacccagtgatttcattgcaactggaacgatcgatgacagtcgaaacaaagcaaacggtgatgaatcgatattgtgctagattatttgttggttctacgcttaactagtctgctcggcagggttatagtttcgatgcccacctgtacaataccaagatcccattcctttctttttgttgtcatgttttgtttctctgactttccatcacctttttcacgcccgctgtaccatatgaggctgccctgttacttctgccatggatggtggatccctgacttcatgctgttcccttttgttttgcccctaacgtgttgagtgatgtcttgttgacattttcgtccaaattggtaaaattcattcttcgttgcgtaagagtgacatacgagggctatttggttgtttaactcaaagtccggcgtactgatgtggatctgtctttctgcccctataatgtcgatgagacattaatgtctt

SEQ ID NO: 37983 - DNA, 2310 bp, Zea Mays
cccacccccgcgcgcgtcttcctccggcatgcgccagcccccccgagctcgcccgcgcaccaatctcgccgtcgggtatcccgcccgcgagcccgcgcaccaagctccttccccgcgacaagctccctcccccgcgacgcgtcttcctcctcgccctagatcgccgccccagctctctcctcaccccgcaatccccgccgcccatgctccgctctctactcgccccagatcgtcgcccctgttcgcgtggattgggtaccggtcccaactatctccatggattgcgcgtccgcgacaacccaatctcctcccggtctccatggaaggcgcgtcctccccccgtgattctcgattccccgcgtccgcgccccagatccactctcctctctcccacaatccccacggactctgccccgtatcaccaccccggctccttagaacgtgatccactctcctctctcctgcaatccccgctacctcaacccagatcgccgccctcgctctcgatcctcgcccacgctctccatggaaggcgaggccgcgatgctcgcgtggatctatgtagaggctgcgacgctctcccaggaagactactgccagtgctccgtgctccatgcgccgcgctggaacgccaccgtgcggtccatgtcctcgtagtatcgcccagactcgcccatgtagtcccacctgcatccaccgaccaccaagcacactctcactgcagaccagagaggattgccacgaataggtgtgtgcagttctactctacccctgcatcgagccggtgtgcgtccaccagaggccggagttgaaggagagcacgtcggcgtcgcgccatgactcggcgttctcgtagatgtcgtccagcatcagcacctgcttcccctggaccacgtcgatgtccaccagggtccacggagacgagctgcgtcggcgactgcagcgcggcggcgtgcagcaggcagacgagcgactcccactggttgcgccccagcgagtcgcccacgaacatcaccgtcttccccttcatccgtgtcaggaagaccgtggcacaacgcctgatgtcacgttgtcccagcggcgccgcggccggcgtcacgccacgcggatggtcacccacgccacgtccctagaccggtgtggtacgccggcgcccacagcgtcgatgaggaggaggtcggagcagcagtagctgtcatgggcagtgccgcagatgtggagcagtcgaatgagaggctagacgggctggagcaccacagcaggctggtgtcgctgttggccggtagccgctcctcccccaccggcaccgagagggacttgtgacccaaggatctgttcccgggggatgtggtgtttgcgctcgtcgatgatctcaggctcaaccactccaaggacccataggccatggggttatgcaatccaaagaaggaaattcctgcttgagccaattacagaaggccctgatatttgtcaaattgatggttgtagtgttaaattggaatacaagaggaggcaagtcaaatatgaattatactggcagagctcctgacggagcacctgacggagctcgccacaggtaccaaacggcgcagcagcagttgatgtgcaacccgagtgtactgccgctcgaggaggccagtaagtgccaacaacatgaatagccaaagcagggaaatagggctggcgggggcacatgggtaacttggtcctggagcattggagaaggagcataccacaaggaaaccaacacgattactgggttaacgaacaactcatactttgatggagcacatgaggttcgacattatgtcaggaagcattcgaatcttggtcgtattgtgcttgaagttgctaaggactcgcaaatcccccgccaagcaaactgctagaaatcttttcagaggtggagatgatgaagatgatagtgctgatgccgacacaaatgatcctgttgtaccttggtcattaggtagagtaggagttgggcatatggtgtacatctccggtttgacttgtgccttgagttcaacaaatatgaaagtgctgagagaggtggcatctagaggacgtcatgtcgaacgtgtgaagaatttttttagaaatatgtatatttgtgcgaaactttttagaaacttgactccattttattttctatgttactctcggctttgtttcctatcctttccaatgacttgctatgcatttgcactgtatttggcatgtttaaaactgctacacaaaacttgctatatattttgtccaaaaatactatatccttgttatgattgattgatctttattttgtctgct

SEQ ID NO: 37984 - DNA, 3447 bp, Zea Mays
ttttcctctacgctaccagtctaccgctagcctgcctgccctcagacttcctctttcttccccttctcagcctttccctctcttctctgctctttgcatctctctcttgttcctcccttcctctctctaaaaaagggttctgatccctttctagaagctcctgggtttctgttgccgacccgagctccccaggggcgctcaggaggcgccgagccggcgaccgctccggcggatctgaggagccgccgcggtcgctttgcctccggttccttgtaaactattgattgggaaacactctgaagaagagtttgttggctgcataacatctcctgaagctggtttgaagtttgctgataggaaagatcatgggcgctctctgtgatttctgtggggagcataggtctatggtttactgccgatcagatgcagcatccttgtgtttatcatgtgaccgtaatgtgcattcagctaatgctctttctcggcgtcatacaaggacacttttatgtgaccggtgtgcttcacagcctgctatggtccgctgtctagcagaaaatgcctcgctttgccaaaattgtgattggaatggccacattgcaggatcctcatctgccggacacaaaaggcagactataaattgctattcaggatgtccatcgtctgcagaactttctagaatatggtccttcgtttcagatattcctaatgtagcacctgagccaaactgtgagcaaggaataagcatgatgagcatcagcgacagtggtgtcagtaatcaagataatgctgcaggggacagtattttgttagatatagctagtgcaacacttgtaagtgatattggtacttgtgacaagcttttggtaggttcctcttcaggagctggagtgaacctacttccactggctactggtcaaacagaaacagctggatctgtggattccacaccagataaggttccctatacgccagataaagatatgttcagtaaggacagcatatatgaagatttttgtgtggatgacgctgaccttgctttcgaaaattatgaagaactctttggtacctctcatattcaaacagaacaactctttgatgatgctggaatagacatttactttgaaatgaaggaagcacctgctgggaattccactgaggtttgtagtttgctaatgaatatttttttcttaatccgttacaatcattcacatccatgtgcacatgcacttctcatagtgttggtgttctctttgctatgccaattaactgaaccaattctgtagtcctcccaatttgtgtaacttataagccgttcattttcctgttaactcatcaaaattgaactgtgtgataagtttttccaggtgcagtttaatttttagtttgggaagggcaggcctggtgcagtggtaagagttctcactaagtcaccagatcacgggttcgaagctgcctctccgcattttcttataggccctaggttttcttctttctttgatccatagcttattattgacaaactattcaaaatggttgacttttctgaagtgacaaaaggcaggaagaatcttgccttctttatgttagtcttgggttttgggatatagcttgtgccaaatttatgtgtctggttttgtgtttaagaagcaaccagtaaccacagataggactgtaaattgtaacctatcagcattaaatgtatgtcagctagggatgaaactggatctgatacagacggatattagtgatcctgcatccatcctattttccatattgtatctcattttttttctggaatctcagaaccggatagggatatattagagtgatatttatctatacatatcagaaatctgtttttgtatccagatttgattacgatcggatattaaatgttcagattcagataaggactatacatataggattttgaattttcaggatggacagataacgggaaatatccgttacgttttcatccctcatgtcaccagatctgtaaaccatttggtgttatcctgtagtcagcgtatctggtttggacaaattagacgttgcgtttttgtgttttattatatgattattataggattcttgtctcatgcttttcagcagtccaagctgaagcaacctgcaaatagcaatgcggtatctgccgactctgggatgtcgaaccctggagtgaaaggtgattccagtgtttgtacccctttgaggcaggctaggtctagtctgtctctttcctttgctggtttgactggtgagagtagtgcgggagaccaccaagattgtgtggtatcatcattgcttcttatgggtgagcctccttggcagcctcctggccccgagggctcaattgctggaggtagtagagacagtgcactcacacgatacaaggagaagaaaatgagaagaaagttcgacaagaaaatcaggtacgcttctcgtaaggctagagcagatgtgcgaaagagggtaaagggtcggtttgttaaggctggtgaagcatatgactatgatcctctctgccaaacgaggagttactgaagcatatgatctttatccagttttaaattagcaaactgcaaccaaggctcgttgcagctagaacaaaagcactggcaatccaagctattgggccaaactgtgccttcgaaaagaaaaaaaaaggagaaagctgtcggcatgataaaatatagagaaatatttggatgttgcagaagtttttgagtgaggatcctcctttttcctcctgtacagtggttggaagcggtttgagtctctccatcttttgtgaattagcctgaatccagctaaacagacttgttgcattttgatctccattctgcatttctgctgactgccatcagtctacgtacacgggctggcggctgcggtgtttttggaggtgttcgtccagattagacaagatggctagatgtgatctgtgaaatatccttctattataataatgtaaaatttgctgggacctggatgtttctgctattatcaatgtgcaaataccaggtcgtagccaaactggtcgtcagtttgttctttttaagttggtgatggaacccatccaactggacagtggacaccaactttctgtgctcattctgtccaaaccaacctccaaactgactcgatgttagtactatttgtattatgtgactcctgagcaagtgagcttgtgctcaaacctcaaatacgtcctcttgtaccaaaccacgatattggagggtaaatttttgacctgttcctttgttgttgaaacttctggttattttggaaaaaacaaatgtggaacactgctttgtggcttttctgttctgcactgttgtactcagtcttgcaaattagaagacgatgtggcatttttagacatagttatgtatttagatatatactatgtctaaatacctggtgaaagaaatgtatctagaa

SEQ ID NO: 37985 - DNA, 788 bp, Zea Mays
agatgggctgatggtgtgcagataaagaaacccatagaggtacgagtacagatgggctgatggtgtgcagataaagaaacccatagaggtatcagcaccaaaatatgtggagtatctgatggattggattgaaggccagcttgacgatgaatccatatttcctcaaaaacttggcacgccatttccaccgaacttcaaggaagtagtaaagacaatattcaagcgcttgtttcgggtctatgcccatacttaccactcccatttccagaagattgttagccttaaagaggaggcccatctcaatacctgttttaagcacttcattctgtttacaaatgagtttggcctgattgacaagaaggagctggctccacttcaggagctcatcgaatccatcatcgttccttactgagaacacggtttgctaaacatggatacagagctcttaatgctgatgctgtgaaattcagtctgtttatgacagcactttactgcatagagcttattgttcccgttattagacacaaggacatgtcacatatgcgtgtatctgtgttgtttcttcctgatcatgctgaccatgtaagtactgtcatatcagctatagaacggcgatgataatgtactgcagaaagaaaaaaaacacgagaaagctgagttggggctataaattgcatattggcacttatcgagtatagaatagatctccttctctttcttcttacaaacagaattgacttgttatttttaatggaatgaaataaatattcacgctttttgacatagaa

SEQ ID NO: 37986 - DNA, 3879 bp, Zea Mays
tgtcacatgcctgtattttgctgttatgggcactaggcccacagtgcacttccaggttatgggagatccttctatgggtgcaaagcaaagaacatttattattgatgctgcacgagcactggacaaagctaagatgatgcgctttgatgaaaagagtggtaacttctactgcaccgaacttggtcgaattgcaagtcatttttaccttcagtactccagtgtcgagacttacaatgagatgcttcgacgtcacatgagtgaaagtgagttgattactatggtggcccattcctctgaatttgagaatatcgtagtaagagaagaagaacaggatgaattagaagcccttgcaaggaaagcatgccctttagaaattaagggtgggccgactgacaaacatgggaaaatttcaattctcatacaggtttatatttcccgtgctccaatcgatagctcctctttacattctgatgctcaatacattagtcaaagtttggcacgcataatgagggcactatttgagatttgtctgcgtcggggatggtctgagatgtcatccttattgttgcaatattgcaaggccgtggaccgcaagatatggccccatcttcatccacttaggcagtttgataaggatctttctcctcaggtattgtggaaactcgaggaaagaaatgttgatctggatcatctttatgagatggaggaaaatgaaattggagctctgatccggttttctcatcagggaaagttggtcaagcaatacgttggatacttcccgtatgtcaacctatctgcaaccgtgagcccaatcactaggacagttcttaaagtggacctgcatataactcctgaatttgtgtggaaagatcgttatcatggcatgtcagaacgatggtggatcattgttgaggattctgaaaatgataccatttatcattcagagctattcacattaacgaagaagatggcaagaggaacacctacaaagatatcttttaatgtaccaatatttgaacctcatccgccacagtactatatacatgccatctcagactcatggctacatgctgaaacactcttcactgtttcttttcataatttgacattgccacagacacaaataacacacacagaactcttggacttgaagcctcttccactgagtgctcttggcaacaaaacgtatgaggatctgtacagattttcccatttcaacccgatacaaactcaggcttttcatgttctttatcacactgataacaatgtactcttgggagctccaactgggagtggcaaaacaatttcggcagaacttgcaatgctccatcttttcagtacacaaccagacatgaaggtagtttacattgctcctctaaaggcaatagtacgagaaagaatgaatgattggagaaaacgtcttgtaattcagcttgggaagaagatggttgagatgactggtgacttcactccagatttgatggccctattgtcagctgacatcatcatttctacccctgaaaaatgggatgggattagtcgaaattggcatagcagaagttacgttatgaaggtcgggctcatgatattggatgagatacatcttctgggagctgaccgtggacccatccttgaggtcattgtatcaagaatgcgatacatatcatcacaaacagaacgttcaattcggtttgttggtttatcaacggcattagcaaatgctcgtgatttagctgattggttgggcgttacagatgacggtctattcaatttcaagcctagtgtgagacctgtacctcttgaagtgcatatccagggatatcctgggaaattctattgtccaagaatgaatagcatgaacaaaccagcttatgcagccatatgcactcattcacccaataaaccagttctcatttttgtgtcatcacgtcgacagacaagacttacagctcttgatatcattcagcttgcagcatcagatgaaaaaccaaggcagttcctgagcattgaagacaactccctagacatggttctttcacaggtttctgacagtaatttgaggcatactctgcaatttggcataggtctgcatcatgctggtttaaatgacagagacagatccttggttgaggagcttttttcaaacaataagattcaggtgctggtatgtaccagcacattggcgtggggtgtcaatcttccagctcacctggtcataatcaagggcactgaatactatgatgggaaaacaaaaagatacatagattatgatatcacagatattctgcagatgatgggtcgtgcaggtcggccgcaatacgaccaacatggcaaagctgttattcttgtccatgaaccaaaaaagagcttttacaagaagaaattgtttctggcaccatcagcaacaaggaggaggcgattatttatctcacctggacttacctatatcgcagattggttgttaatccggcctattatggattggaggatactgaaacaaacacattgaattcttatctatcaaggttagtcgaaactacatttgaagatcttgaggacagtggatgcataaaagtggatgaccactctgtaaagtacttgattttggggaaaatagcttcacagtattacctgagctacctcactgtttcaatgtttgggtcaaatattggccccaacacaacgttggaagtctttctacacatactgtcagctgcatcagaatttgatgagcttcctgtacggcacaatgaggacaatttgaatcgaatactcagcggaaatgtcccgtatccagttgatcaacaccaccttgatgatccacatgttaaagccaacttactctttcaggcacatttctccagagcagaattgccaataagcgactatgtcactgacttgaaatcagttcttgatcagagcatacgcatcatacaggcaatgattgatgtatgcgcgaatagtggatggcttacgagtgcattgacttgcatgcatctcttgcagatgatcatacagggtctctggtttgagagagattatgaatccctctggatgttgccatccatgaatgatgatatattagaccatctcaagagtagaggagtctcaacagtcccctccttactagatctttcccgtgaagaattgcgtagggtacttcaaccattttctgcgtcagagttgtatcaggatctgcaacatttccctcatgttgatgtgaaagttaagcttcataatgaacaggagcgatccaaacctccaactttaaacatcaggttgcaattgaaaaattcgcgacggtcagcatcaagagcatttgcccctagatttcccaaggcaaaacaagaagcttggtggcttgtcctggggaatgctacaagttcagagctgtatggtctgaaaagaattagttttgcagatcgggtgattaatactcgcatggaattgccacagacgttcaatgtgcaggagacgaagctgatcttggtgtcggattgctacctaggttttgacttggagtattctcttgagcatctcaccaagggttgagtgctttattcagagctgtttgggctgtttcattttgtatgggttcagcaaccagctcatcctagattgatcctgtaatcacgagacatgagttcattccatgaatttttgtttgtatgactacatccctcgtgttcatggttatattatatttaatagctatatatacgagtggataggtttataactttcatgaaatatcttttccgtaagcatagtagatgtttgagctctaaggttatgaccaacaaattgtgtatatggtcgtgcaaaatactattttataatataaactatattatttacatggtgaagtttgaaatagaa

SEQ ID NO: 37987 - DNA, 218 bp, Zea Mays
ttcccttttcttggccgccaacccccccttttccccacccttggccgcccctcccccttccccttgcagccaccctccactacttcctcctccctctagatctccccccacgcagcaaggatcgagaagaggaggagcaagatggattgaagaggaagagaggatcaaggagatgttctacccccatctcttgcagatttttttggggaaaccctagg

SEQ ID NO: 37988 - DNA, 3063 bp, Zea Mays
ccggccagcgccgttcaagcggacagatccaacgcaaacccacaagaaagtttcaaaaaaacattcgcactccctccctctaccgccactagccaccctcccctaccccaatcccctctccccagatcgagcgccgcgtggctagggtttgcgcgaccgccggcagcgatgcccgcgtcctccgtctcggggggtagcggccccggaggcgtctccccggatgccatcatcgagtggctgcaggacgagatggggtacccctcggcccctcctgcaccggatcagctccgcaagatctgccggggcaacatgatccccgtctggtccttcctgctccgccgcgtccgctccgagcgaaccgtcgccaccgcgcgccgcaatatcctcgtccacggcgtcgcggcccggcgggcgcgggagggcggagcgatgggggcgggcgcgggtgacgctgcggccagggaggccgaggcgagggagcgggacctcgccgctgaggaggccgagcggttgcgtgggatcgtgaggaggcagcgcaaggagcttcgcgcgcgcatcgcggaggtcgccagggaggaggcggagcgcaagcgcgtcctcggtgagcgctccaatgccaggcacaagcaagttatgctccaagcatatgaacagcaatgcgatgaagcgcacaaaatatttgctgaataccagcgccggctacatcagttcgttaaccaagcaagggacgtgcgaagatcaagtataggcgtggctggagctacaggtgctcttgtggatatgcaattgcagagtgatagagatgatctttacccatcgactatcaaaagcaatagattgccagaggatcttttagaaactgcaggtgaaaggagcattcggaaggcatgtgaaactcttgctgcggatatgattgaaacaattcgaagttcattcccggcatttgaagggtgtggcattaattcaagttgccaattagatgcagaaaagctgggtattgacttggttggtgaaataccaacatatgttaaacttgttgcattggattccctaaagaatccattcatgcttctgcagtcaatcattacctacacatcacgcatgaaaacacttatacatagagaaactgacaagattgacatacgcgctgatgcagaactactgaggtataaatatgaaaatgagcaggttattgatgctgcttcaactgatgcaagctcacccttaccatatcaggtgtatggaaatgggaagactggatcacaattgtcaactcgaggaacatatgatcagctactagaaagacagaaagagcatgtacaacagtttttggcaacagaagatgctttgaacaaagctgcagaagctaaagcactaagtcagaagctattgcaacgcttgtatggcactgctgacatggcaggaaataagaagctgcccactgggaacaccacacagaatgtgaccaacagtaggcatttagagttggacgtttgggccaaggaaagagaagttgcaggactaaaggcgagcttgagtacacttacatctgaggtacaacgtttgtataagttatgcgctgagtggaaggaagcagaagattcactgaagaagaagtggaagaaaatcgaagaatttgacgcccgtcgatcagagctggagttcatttacagtgctcttcagcgggccaatatggattcatcagcattttgggagcaacagccattatcagctagaggatatgcatcaactacaattatccctgcgtgccatgctgtggtagacatgtctacgaactcaagggacctcatagagcgagagttagctgcatttagccagagcttggataatagcttgtgcaggttgccagcaacccctcaggcccttttggaggctgtgggttctaacggcgtgacaggatcagaagcacttgcagctgctgagaaacatgcagctttgttgactgcaagagctggtgccagagatccatctgctgtgccgtctatatgccgcatctctgctgctcttcagtataactttggtacagaaggcacagattctggcttggcttcagtattaaattcactggagttctgcctaaaaccatgtgggtctgaagctagcatattagaggatttatcaaaatctatcaacttggtgcacacacggagaaatcttgttgagaatgaccgtgttttgctgaaccgtgcacatcgtgctcaacaagaatatgaaagagtggccaactattgtcttaaattagctggcgaacaagaaaaggtggtgagtgaaagatggcttccggaactgagaaatgcagttcaagaagctcgaaggtgttttgatgactgccagcgtgttaggggtctggttgatgagtggtacgagcagccagccgccacaattgtggattgggtaacgatagatggacagagcgttggtgcctggatcaacctcgtgaagcaactccacatggagatctccagacggacgttggccatgtcatcggtaggagacgactgaagcaaccagccgtgacctgcggctttggaagttcggaggctcctttatgggttcggtttggcgccaagatatcttctatctactcgatagccttttcccattgtagtttatacgtctctctctctggtttggtctgtaattagttcctaacatgttccttttgtatgttgtcaattgtcatgtgctggttgtcacttggctcaaacgatcagtgttggtgttgtgcctttgctgatttgggttgtttgtatgttgtcaatggtcatgtgcgtgttgtcatttggctcaaacgatcagggttggtgttgtggctttgatgatttgcgcacatgtgtgttcaatcagtccgggaattgtttcagttataacgttcatgtaacttagggtatgtttggcaccaaaatatgtttggcccattttgttatggcttgcttgttaaccttgatggttatcatcttgtcatttttttctttgaggagatagggtgtggtagccttcttgttcaactaggtgtgtgactgtacgttgtcacatgagtta

SEQ ID NO: 37989 - DNA, 464 bp, Zea Mays
ccaaaaccctcaattagggttgattgcacttacatttacactctgcagaggttgcacatatttacccacaagacgtgttccctttgtcgcctcgggttgatcaaacccttaaacattgccaaggtgagtagatgatggtacactgcgaggcatttacaaagttccactagaggagagaacccgctacggtttccgggccgaaagctgcataggaatccttcgtccagaaagttaacaagacactcagacccaaggacctccctacacctgcatcctccaccccgcttgcccctttcgggaaaagattaactcacactagctttcctaattaatcagccaagggcgtcccattctacacttgtggtagcactgttttctcgggtggtcgctccatgttccaattaacataataaccttatcatgaacaaaaaatattccattgacaataaatagcatggtcatga

SEQ ID NO: 37990 - DNA, 2235 bp, Zea Mays
cgtttctgatcgaaacgaagcattcccccgttcctgtctctgcttactcacctctcccatgagacgaagcataaaatcaaataggatatgtgggttggaaataggtcgtgaaattgattgaaatacctggggcttgagcgtgatatatagagggtggtagagaccaagcgacgttgggcgagcggcgccgccggggctgcgttggtcccttcaccggtgatgagcatccaccagatacaggaatgaacaacattgtgtaggcacctcgtccagacatctaaggcgaaaaatgctgcgcctgcaccaccatagtgcacctgtctctccgcacgctgcgatttgtccaccgagtaggcttgcttgttcttgcatatgtaacaagccaaacagcagaatcaccgcttcccaggggtggtcttccataaggcggcgaatcaccactgttgccagtggccagtcagtaccaggatacacacctgatgatggcgatcaatgccttgaaacaggcaacaagctctcttttgctactgtgaaggaggctttcatcagcctgaactctgtgggtgtcagaagtgagctaattcttctagctctaccagcagtcttgggtcaagctattgatccaatagcgcaacttatggagactgcatacatcggtagattagatcttcaacataccactgttgagcattgcaacctcatttgtggcagaggatatttctaggagtgctaccaagcatcctagttcaggcaaattggagctgacatctgtatcatctgccctgatcttagctgctggaattggtataatggaagcattagcattgttcctaggatcaggattgtttcttaaactaatgggcgtgtcacctgtatctccaatgcacagacctgctaaactctttctttcattgagagctctcggagcacctgcaaatgtgattatgttggcagtccaaggtatctttcggggattcaaggatacaaagactccggtgttttatataggtttgggcaatctttctgctgtagcccttcttcctctacttatatatggctttaagcttggcataactggtgctgcaatttctacagttgtgtcacagtacattattacagttcttcttctttggtctctaagtaaaagagctgttttgcttcctccgcgaatagatcaattagagtttggtggatatctaaaatctggtggaatgctgttgggaagaactctttcgattctgctaactatgaccattggtacatcaatggctgctcggcaaggcccaacagcgatggctgctcatcagatttgtttgcaagtatggcttgctgtatccttgcttgcagatgcattagctgtttctgcccaggcgctgatagcaagctcttatgcaatattggactacaaaaaagttcaaaagacagcaatgtttgcgttgcagataggagtgtttagtgggttagctttggccattggattgtatgcctcatttggcaatatagctagactgtttaccagtgacccagaggtcctaacggttgtcaaatcttgtgcactgtttgtctgtgccagtcagccaattaatgccctggccttcatctttgacggtctacattatggtgtatcagattttgaatatgtggctcaagctactatcgtggtgggtgttacgtcttcactcgtcctgttatgggctccgtctgtattcggcctggctggagtttgggctggtttgactacactcatggggttgcgtatggctgcaggcatcctgaggttgctacagaaagcgggcccttggtcgtttctgcacgaggagccataagctgaggtgtatcaactaccagcctgcgcagtttggagctgctaacttactgctgggagtttacatcactgcaaagattatccgagtgtcatggaggactcgctgaagatgttacccctgttactcctccggctcagaacaaaatctgacttcattgcatttcttaaaatcagtctgctagatggcatggtttggtttggattggtttggtgaaggcgtgaggcccatctgaacatcggtgcggcctctatttttttttggcgaactcctttgtatgctatagcagctgtgcagtttctgtagaagaaaagatacaaggatcatttatagcatcgatatatgatgtatgcaactcctctgaattgtactcggtgtaaattattttagaaccgttttgttgattaggtac

SEQ ID NO: 37991 - DNA, 3229 bp, Zea Mays
ccgctttgctcacttgcatctaggcttctagctgtactcctcggccggtcggtcccacccatggacagtgacaatgattgcggctccgacgccggcgccgagtgggtctgggtacgccgtccgtcggaggttgaggccgctgccgcggcggccggatggctggcggatgaagaggcgcggccgctcaaggtggtcttcggctccccggctaagtacttcaccgacgcagcgccgatcgggaacggccgcctaggcgccatggtctggggctgcgtcgaatctgagaggctccagcttaaccatgacactctatggacaggtggacctggtaattatacaaatcccaatgcacctgctgttctttctaaagtaaggagccttgttgagaacggaaagtaccctgaagccacatctgctgcatatgatctatctggtgaccaaacacaggtctttcaacctcttggggatattgatctggtctttggtgaggacatcaagtacacaaattacagacgagagctagatcttcacactgcaacagtcaccgtcacatatactgttggggatatagtctacacaagggaacatttctcctcaaacccacatcaagtcattgtgactaagatctctgcaaataaaccaggaaatgtctctttcacagtgtctttaactagtccactagaccacaagattcgtgtaacacatgcaaatgaaataatcatggagggtagctgtccaggccaaaggcctgaagagatcaagactgctgctgatcaacctattggaattaaattttctgcgattctttatctgcagataaatggtgccaatagcacagtggaagtattgaatgataacatgctgaaacttgattgtgccgactctgttgttttacttcttgcagccaccacttcatttcaaagtgcattcatcaaaccttcagaatctaaactggatccaacagtgtctgcttttacgacattaagtattgctaggagaacgtcatattcacaactaaaagcctaccacattgatgattaccagactcttttccagcgtgtttccttgcaactatcacaaggctctaattatgatcttcggaggagtaggctagttcagtcagcagagactagttctcagggtgctaatgtatcggattatggttttcaaatatctggctgcaccagattgacatcccttaatagttttgtgaagcctacggtagaaagaattgtaactttcaaagacaatgaagacccttctcttgtggaacttctgtttcagtttggtcgttatctactcatttcgtgctcaaggcctggaacccaaatttccaatctacaagggatatggagcaatgacacttcaccaccatgggatgcagcaccccatccaaatataaatctacaaatgaattattggcctgcgcttccttgtaatcttagcgagtgccaagaaccactgtttgactttattggttccctctcaatcaatggagctaagactgcaaaagtgaattatgaggctagtggttgggtcagtcatcaagtcacagacttatgggcaaaaacatcaccagatgctggtgatcctgtatgggctctatggccaatgggtgggccttggcttgcaactcatctctgggagcattactgttttactttggacaaagtgagccgcactagaacaaaatatagtaatatacattacttatttactttcgtgtatcaaactaaaatgagaaaattgtttttccatagttagatattaaaagagacaaagagtagtttcatggtcatttttattttgcgacctcttgatgacacttccattcttctgggcaatatcttgtgctactattagttgagtctcatctgctgtcatcctgggatggcatgctctctatttggtcaaggtacttgtcttttcaacactaaaagcacaatacaatgaacactagaaagggtgttaggaattgagaatcatctgaactacatgtgttagatgtagcatctagcaccagaaagatgtatgttttcatgtgtgccaacttgttatgtcaatagtgtgctgaagatgctcaatgattcacatgctgcacttcagtgatatcctaaaaactgcactagtgtcatttactaatacacaagctttactgattgtaatatatggatagtttattttgattacatggtgaagtttcggtgttaatgcccttgactaggagggaacgcatgtcgatagctttgaactgactgttttcttttaacaaattgcatgctcacattccctgaatattttaaaatttacataaaattgaacaagatcagatgcgagttattccactttcgttgcagcattttttagagaaaacagcgtatccactattggaaggatcagctaggtttttgttggattggttaattgaaggacacaggggatatttggagaccaatccttctacatctccagaacattattttattgctccagatggtaaggaggcctgtgtgagctactcaacaactatggacatctcaattataagggaagttttctcagctcttatattgtctgctgacattttaggtaaatccgacactaatgtggtgcagagaataaaaaaagcactgccaaatctcccaccaatgaaagttgctagagatggcacaatcatggagtgggcacaagactttcaggatcctgagattcatcacagacatgtgtctcacttgtttggtctttatcctggacatactatgtcacttgaggaaacacctgacctctgcagagctgttgccaatagtctttataaaagaggttcccagctgcgttgtcggaaatgctggtacagagcactgggaccgacttgtaccttctccctgctctgccccgcaacaagtggcctcaaggctacgttaaaggtctgaaggcccgaggtggtgttactgtaaacatcagctggaaggaagggagcctccatgaagctctgctatggtctagcggcgggcagaataccctttcaaggctgcactacggggaccagattgccaccgtcagcctatcatcgggtcaagtttacaggttcagcatggatttgaagtgcttgaagacttggcccctgtgatagcacacatttgctgaaatgaaagatacgattgattgtgcaaaaattcatgaaaacttctggctgtcctgccctttggagaggttgtcaaaaaagtttaag

SEQ ID NO: 37992 - DNA, 1809 bp, Zea Mays
ggctgcaacgctcccttcaccagccgcaggagcatcgccgctgctgctccactgcaacgccgccccttccgtctccttccgccaccgcaggcgttggcagcggccggctgctacacggcacgatggccgcgtcgcgcagctgttgctgccggtcgcgcgccgctggctgccggcagcagcgcctcccggagtcaatggcgcgcgcggaggcattgcggcgtcggggtcaggggcaggggcagtggctggggaggcgccgtacagaggcaacgaggggcaggggtcgctgtggatggtcttcctcgccacggcggtggtcgtgtgcggctccttcgagttcggcacctgtgtcgggtattctgcgccggctcaagctggaattgtgagcgacattgggttgtccaactccgagtatggtgtctttggatctgttttgacaattggagcaatgattggtgctgtgactagcggcagcctggcagacattcttggacgcaaaatgaccatgcgatttgcagcagttgtaggcatttttggctggcttactgtatattttgccaaggatgctatgatgctctatgctggaagagttttgctggggtattgtactggagttctttcctatgtggtgcctgtgtatatatctgaaatagcaccaaagggtatccgaggaggccttgcaacctcaaaccagttattcatctgttcagggtgttcggctgcttacattattggagcacttgtttcatggcgctgtttggttgtagtaggattgataccttgtgctgtcctacttgttgggcttttcttcattccagagtctccaaggtggctggtgagatggccaacatagggaaagaaagagaatttcatgcttcattacaggagtttaggggggaagattctgacatttctgaagaggctactgagatcaaagattatataaaatcagttcgtcgattgcctaaggccaagattcaagatttatttcagagaaaaaatatgtatgcagtcacggtgggtgttggcctgatgatttttcagcaactgggaggaattaatgccttaggtttctatacaagctatattttttcctctgcaggattttctggaaaacttgggaccaccttgattggcgttattcagattccaatcacattctttggggcccttctgatggataggagtggaagaagagcccttcttttggtctcttcatctggaacatttcttggctgctttctgactggactatcattctattttaaggtatactatgcggcgtactcagttggaatgggcccagttccttgggttatcatgtcagagatattctcaatcgacatgaaagcaatcgccggagggtttgtaaccctggccagttggattggttcctttgcgatttcatactcattcaacttcctcatggattggaaccccgcaggcacattctttctgttctctgcagcgagcctggtcactgtgctgttcgtggcaaagctcgtgcctgaaactaaaggaagaacactagaagagatccaaacattgctcaaagccacatgagtggcttccattcgctcagtaggtaaagatccagttaaaaaaatgctgtaaatattcgcctcttgtaaattattgtgcatggcaggtgaatgatttcgcctcttgtcgattctcctatattttagtctctttgatatatgttatttaggacaaagatacggtctacaacatatgcttatcttcaactatttcattttctgagttttctctctgctactatacatcatcagtttcgacggttgtctt

SEQ ID NO: 37993 - DNA, 350 bp, Zea Mays
cagcaagcaaacccttaccccgtgcgccgccgccgttggaaaatttcgccgccgcgggtgaggtgagagagtcggcagagtagacctagcgttcctcgctgccactgcctcaacatcgtgtctgggggtttcctcggatcacagggaaggtatcggcggcctcggtgtgcgtgattggttgacggagaccgcggaattgctcaacgtcgcgcatcttccccacaacgccgtggtcgggattactcggatcgccgtgggccggagaagaacaggtggttcaggaggagccacacaactaggagtttgatctgatctaggtggcgtctcccaattgacttattggcgccaag

SEQ ID NO: 37994 - DNA, 2429 bp, Zea Mays
gaaatttgtgcctctccgctggctggcttgctggcattgggaagggccctattactcgaaccgaggcatggaggacgaagaaaacatcgagggagaactgttgctcgtggagtcacaactccacgacatccaaggacaaattaaaacattactcgatcgccaagaggagttgtatgaacgccaggcacagttgaaggctttgctcgaagcatctaaattgaccagaaatacaacaattaacacatcttcagttgctccggaagattggtctgggagcttcccatgggatctggaggctgacgataccaggttcaatatatttggcatttcctcctaccgatcaaatcaacgagaaataattaatgcagtcatgagtggaagagatgttctggtcataatggcagctggtggagggaagagtctatgttaccagctcccagctgtacttcgtgatggaattgcactggttgtcagtcctttactttcccttattcaggaccaggtcatgggactgtcagctttaggtataccagcatacatgctaacttcaactaccaacaaggaagttgagaagttcatctataagacacttgataaaggagaaggagaactaaagatattatatgtgacacctgaaaagatctcaaaaagtaaaaggttcatgtctaagctcgagaaatgccatcatgccggtcgtctttctctgattgcaatagatgaggctcactgctgtagccaatggggtcatgattttcgtcctgactacaagaatcttggcattttgaaaattcaatttcccagtgttccaatgatagctttaactgcaactgcaacaagtaaggtccaaatggatttaatggagatgctccacatcccgagatgcatcaagtttgtcagcacagttaacaggcccaaccttttttataaggtgtctgagaaatcgccagttggaaaggttgtcattgatgagatcacaaagtttataagtgaatcatacccaaataatgagtctggaattatatactgcttttcaaggaaggaatgtgaacaggttgcaaaagaactgcgcgaaaggggtatttcagcagattattatcatgcagacatggatatcgttaatcgtgagaaaattcatatgcgttcgatttgttattcatcacagccttagcaagtctatggagacatactaccaggagagtggtcgggccggacgggatggattaccttcagaatgtattttgtattatcggcctggtgatgttccacggcagagttcaatggtgttctatgaaaactgtggcctgcaaaatctttatgacatcgtgcggtattgtcagtctaagaggagttgtcgtcatggtgcattctttcgccattttggagaggtccctcaggactgcaacggaatgtgcgacaattgtgcttccactattgagcagaaggatattgatgtcacctaccatacaaaaattatagtttcacttcttcacgatatgcaactttaatgatcaaagagctacactactacagctggtggataagttcaagtcaaagtggaaaggtttaggtagtttcaatgaagctgttgatcttagaaaagaagaagttgagcagttgatagttaaccttatactcgacaatgttttgaaagaagaatttcagcacacagcatattcaaccaacgcttatgttaccttaggagcattgtggaagccagcactacaaggaaacagagtagtcaagcttgagattgctattgcttctaaagatagagatgttagatccaagggcgcaaaacgaggtcgcatgagtgatttggaagccaaactagatgaactgcgtagggatctgtcatccacgggtagcgatgccatatttccccatgcagttcttactgcgcaacaaatttcactactgagcagccagaagccaaccactccagctgagctagaaaaggttatagggaaggtgaagacaaggaagtacggcagcaagatcattgagctgatgaggtcacatgacaattcaggaagtggccgaggcaaggaggctggcgatgaacacagagctaagaagatcaaaacgaaggatgaggatgttgtttgtgttgagagtagcgaggaagaatagaatatgcccttcacatacttggctttttagtctatcatctcatggttaattattttgccaatcatttcctccgacgtcatctttctgtaatttagactttcacggattaatgcacagtcatatttcttacagagaaagcctcgagcatccttttgaccggttcatagtcttttgcttcggtagctttgtatcttgttgatgatcggattaatgtgcgaatacttgggattaatgtgcgaaaactttgtgccaagtgtttgaatgtactatacacatgctgaggaatatggtaatcggta

SEQ ID NO: 37995 - DNA, 1840 bp, Zea Mays
ataaaacaggcgcagcgcaggagtaccctgccttcagcggctcagccccttctcctctcccaccccgcgcctcgcctcgccggagctcggccgccgcctccgccgccgctgtccggttccgcagcagcagacaccgacgcgtccgcacatccgtggaatgccctcagatacgccgccccgcgctgcgtcttcctgagggctgaggccgagaggctccgacgccgccgaaggccgaacccgtgcgtcccacgggtccggaggagggagagggaggagcggctgctcggcggccgccgaggaggagactagggggatgggggccgcgagagggttggcccgcgtgcggcgggaggcgctcgccgcgtgcatgacgtgcccgctttgccggggacttctcagggaggccaccgccataaccgtgtgcctccacacatgcctgaccacaaccttcaagatatcagaaataaggtatttccaattaaaaagataaatgttgattctccaaaggctctaacaacattgccagcaaagagaaaacagaggtctatttcttccttggtggttgacactccaagcgtagtaaagcagactggtttgactggaaagagaaccaaagctaaaagaagggcagcagcttctcttgcaacttctcccgttaataatggaactatgaaattaccaagtaaatctgaaaatggggatcagaagactgataaaagctgtccatcacaatctaccaaggcggcaacaagtgcaaacaaaactgaaaatcaagaccaaaagaagaccaagaaaatttcggcaaaacagtcgaccagagcagcaacaccagcaaagaaaaaacagcgaaatacagatgcacaagtttcaagtaagccatcttccgaaaaaagaaagaacagcaagacagctgacaaagatgggctccgtaaatcttcaaaagtacctaggtcaactcccaaaatccatgccgtcaatgaagagcaaataaaagagaaagagggtgaaccccctacaaggaaaggagaagcagacaacaaagtggttattcctgggacaagtgtgagagaacattcaaataactcaaatcttaaagagaaaaatgatggcacttctccagaaccttcgccattaaaagataaaacagcaacagaagattcataccgaggatcgctgggtagtgcaaaaggtttgcatggtccagtaactactccggtgtggttctcattaatttctttgcctaaccagaaagaagatccacaactgcctcagttaccaaagacttacatgagaatcaaagacggcagtttgcagatttcctcgatacagaggtacatcatgaagaaactggatctagctaatgaaaatgaggtggagatcatctgccatggcgaaccgatctgcccctcgagcacgctgcgtgggctgatggagctgtggcatcgtagacagccgacggagcccgtggaggcgtcggtgggtgcgccagccgaggagttcgtcatggtgctgggctaccgctgccaccgccggcacccttatttggcgcccggcaccaccgtcgccgtgcctccagagctgccctcctgatcaggtcggcaaggttgactgcaccgccgtggagcctcaactgcactgcactgctccgctcgctgtcgtccaatccccagtcagtctagccgtttaggatggaacagaggaaagaaattactcctacagttttttttacacatttcttagactttcttttggatcgtactcgtttcttaaacttttgtaaagatagatagagagggaggagagaagttagtgtaccagaagtctgtggcaaatgattaag

SEQ ID NO: 37996 - DNA, 2929 bp, Zea Mays
gctacctactcactaaaagtacctgatcattgcaacttatatttatatattttggatgacgaacaacttagaaatgatatcaaggttatatataatatcatatcttgtgtttgttcccgtaaaaaataaccaccaatatctttactactctataagcctttattgtaggcctccacacccgtgcgccggttctgcctctcgatgcccgtctgcccgcgcgccccactccctcttccctggcgcgagatggatccgccgcgaatcgcccacaaatcatggcagtacttctctggttcacgcatctgtcggtccacaaatcacgcatccgtcatggcagcgacagacagacaagatttaacttgcatccatggcagccgccgcgcatctgtcggtccacaaatcacgcatccgtcggtcccaaatcacgcgccagggaaggtgcttcccaaatcacgcgtcagggaaggtccttcccagatcacgcattcatggcagccgcgcccgtaaaccgcgcctcccccacgacgctcttccatccacagcgtcgcccccttccatccatggcagtcgcgctccctctgcgagcctatacgtgcggggatgttgggaggcgctaccaccaatcgagcggcattagccccgacctgaagcacacatggccggaatccagaggatatcgtgcccccgcccccatccggagtctgccccgcatcgtgcgatgctcgttgctgagctcccgatgaccgcccgatggtgtcgaaccccgcaccgtcgtcggcaccgcgctactcggcgtactcgctaccgtcgacccacctccccggagaggacatcctcttctgcatcgacgccgacctcgaggtccacgccaagatgaagtccgctgccgtagcatcctcgggatccacgtccactgcgtcgccgcagtccgtaggagctgatggtgccccggcggtggggacccggactgtggtcgcccgagaaccacccacgttgagactgacgcatcccaagccagataaggatggataccctcacatcttcgattatttcgccgtccaaacacatgatttcctggttcccctttggcttcctccagatcttgccttcgcccgcatcgaccatcgcgccgctgccgtgacctaccatggagctctgcctcgccgcgcgcgccgggacgatggcggccgcgtgccggaggatggcaccgacgataggcgtgccgaagaagaggcacgacggtggcactgtgcgcgtacgttgcgtggtgacgacgcccatgggggagaagacggagtaccgggacggcccgctggagcgtgcgttcatggggctgttcgcgcgaagatggagaagtacgcggcgaagaagtcggcggcgcaggcgaaggagaagagggcggtgtgggagtgggactacgagagcttcgtggacgtgtcgtggcggttccggcggctgttcccgccgacgcggtgggcctgcgagttcaacacggcgctgaccgtgcccttcttccgatggctcgtgggcccctcggaggtggaggtcggcggcctccggcagcgcagcgaggtgcgcatcgagaagtgccggtacctggagagcagcggctgcgtggggatgtgcgtcaacatgtgcaaggtccccacacaggacttcttcaccaacgagttcgggctccccctcaccatggacccaatgcatatttcgaagacatgagttgcgagatgatatacggctaggtgcctcctccgttggaagaggacccggcgtcgaagcaagcttgctacccgagcctctgttccatgttgacgctgtgtgccccggcctgtcccaagcttcaataggtccatacatgcatgcgcagagtttgccggccggacttgggatggaagaattatcatttgtgttttttatacagaaatgtagcttgtaaactattagtaaagttatatacaagttttattctgaaccaggacagagcactctgtaacaaattcggtgcatttccgttcctttcgctgatcaaatgcctttgttccctatggttcttgtagagcggttgtgtcgtccgagcattgatctgaaccagcacagtttatcagggacgtagcagtgagttggttatagagaactcagatttgatggctaaacataaaagcgacttagaaggattcaagttatatgtatactaaagtggtgaggactcgcaagaagttcaatccactgccagaaggttagatttgagtctcaattattttcaagggaagagatcatgctgataattcactccatgggtacgaggttttcaaaaatccgagcattagtgatgtcctgtgcacaacaacagcagaggctcttgcaatggggaaattcgtgatttgcgcagaacatccatcaaatgagttttttcatgtcatttccgaactgtttgacatacaagacttcagaggagtttgttgcgagagtgaaagaggcaatggatagagaaccctaaccgctaacccctgagcaaagatacaacctttcgtggaggcagcgactgagagattcatggagtactcagaccttgacaaggttctgaacaatgaggctgctcagcctaaacaaggctggcaaccgaagccattcctggtacccgggactactataagcagcactgtgtggatattagtctcttgcctccttaagtagcaccctgtatatggctggtgatatggctggtgatgactaatcgtaggtatatatgtacataatacaccatgtcgctcttatgtcgactaatgtttggagtattgtaattgtagcacgcatgacgacctttggccattgttttgtactctgtaataaggttctttctccttaaatttggagttttattgcagaaatttgtagtacatggatatcaaaagttcataactccagaaga

SEQ ID NO: 37997 - DNA, 209 bp, Zea Mays
caggagaagaataggtggttcaagatgaggcctagaacgaaatgtacgagctaatctaggtggcgcctcccagtcaactttatggcaccgaggaataatatttagtttgctttattgttatcatttatttttgtaagacttcagctatgtaataatgatacttgtgacatttatctttatatacttcatcattatatgtgatgttcttc

SEQ ID NO: 37998 - DNA, 1015 bp, Zea Mays
cctatctcaaaatctctacaaagaaaatccagccgccgttggcttcttctgtagtgtgtatctccttcacgtcacttcctccccatcacgtttttcctctacccaggtcgagctcgccctactgtgcttgcctgtgctcgtcggccatctccctggtggccgacctcgcccctgccccagccacagcttccccttcggccctgctgctgcaagcactcagcctctcctatggcacacgccccacctgcgacaccgtcgacccccgttaaccggtaaagaagcgaggtccgtgcgacgtttgccaagtgttcgatggaaggtccgaaccgggaacctcgcctttctcgcggatcttcgggtcggtttgtgaattggtacgctagttgatcacgtgatgcggaagtcgagctgagtcgaccacaagatgctgttaatcgtgggtttcttcgcaaagtgatactgatgaatgaacttgaagatttcatgatcggatcaagcgccaggatgtgagatgctctccaagtggacgtcgtctaacaacactaacgtagtgttttatcccaggcaagccccggtgcatttgccacctccttctgttttaaaaacttttatcacttacctgctgcattaggtgataggagttgtgtgaataaacaattgatgcattaccattccttggaatttgattatactccttgctacctgttttataaagagaaccaatgaggcttagccctgcctagagaactaaaacttgattctttttaaaagaatgttgtgtaacactggtatgggtttgttttatgaaaaaggacttgtaatggtgagagcatcatctgcagtgatgaattcatcattcaagtatggtacctctgtcaggtacatggttttgggaaggaaataataatatgagaccagacgttgagcaggaaaggtcgcccgtctgtgtcgattaaggaccgtaccgaaagtaggcttgctgatctaggaccctttaactggccacatgcctcgt

SEQ ID NO: 37999 - DNA, 1900 bp, Zea Mays
agaagagagaagagggcgggcatcggccagtgggggctctgaggccgagggaggcgaggaaagcggcgggtgccgggccgcccgcgccggtgccgagccgcccgcgccggtgccgaggccctcaccagtcaccaccccctcccctcttccgtctgtcccccgcttgccgccaccgccgctgcccgctcgcgatccttcccctttttaacgctcccgcggccccgcgtcgtgctcccttttgtcgccgctgccttcgtgcccgtactcgcgggttctcctcgctcctcaatctccgcgcctgggcgcggcgttcgccgccggatctgggcgcgggacggtgccccggacggtcgatggcgcgggcggcgctccggttgggcgaccgcgcgctcgcgctcctcgtcctcgtgtcagtggctctgcttccacttgtcagttccgacgatggacacaaacactgcgagggtgttgtcaggggctgggcggattcctccacggggcgcgtgaaggacggggacaaactgagcctcaaggatttgctcttcttcctccacattcctaggactggaggccgcacctactttcactgcttcctaaaaaagctgtatacaaatgcgcaggaatgcccgcgttcttatgacaaactacggttcgacccaagccatcctgattgcaagctggttgttagtcatgatgactatagcttaacttccaagctgccaagggagagaacatctgttgtaacaatactaaggaacccagttgaccgtgtatttagcacatatgagttttcagttgaagttgcagctagattccttgttcacccaaacttaacttctgcaaagttaatgactacccgtgtgttaaaaaagtctcgtgctgtcagtactttggacatctggccttggaagtacttggttccttggatgagagaagatctgttttccaggagagatgccaggggtatcgacaaagttcatagtagtaagaaggttaatgcatatgatgtggaggatatggttatgccgttacatcagtacatcaatgatccagttgcccatgagatcattcataatggggctacctttcagattactgggttaacgaacaattcatactttgatggagcacatgaggttcgacattgtgccagaaagcatccagatcttggtcgtattgtgcttgaagttgctaagaataggctggaccagatgctgtatgtaggacttacagaggatcatgaagagtcagcgaggttgtttgctcatatggtaggagcacaggtgcttttacaatctgggacattgagtttggatctcaaggaagatctgcacagtgagactggatttgatttatttggtgatggagtatgtgcactccctgatcaaaatgaatactcacacccatccatggtggagcccggggatgaagaagcaagcgaacatctgaataacacacatggttggcaaaataatgaagccctgaactctaccagcgacgaacaaggaaaaggaaatatgactgtgggtaaactgatggaagcttatgaaacttgcatcgctaaactgcggaagtcccaatctagccgtcgtaaaatatcactaaagaaagtggaggaagcaaacttctcaaaagaggcacggaagctggtccccgaggcaattttgaaacaaattatctcgctgaacagccttgacatggaactttatgaccatgctaagaaaatctttacccaggaacatctgatgctgaaagctcagcaatccatggcggggcagcacagacagttggcggaacaagagggaggaggaaggaaacacgataggatatgagacgaaccgttctcgtactgcggtggaactgtggaaatgaagaactgtactcattgccagtagcaagc

SEQ ID NO: 38000 - DNA, 254 bp, Zea Mays
tcgcacccacccacacccacccatcgacgacctcctgtcggggttccgaactgaacacaggcgggcgggtccatgcagggcgccgatccagcggatagcgacgctgcctcgagccgatccaacggccccaagaccgccagcgagtagtcctcatctccgcaccgcagtggcgtgcccatcccgaattgcgcgggccggcagagctgcaactgcaactccccccctcgtctgcctgtcccgacgccgacgccgac

SEQ ID NO: 38001 - DNA, 2256 bp, Zea Mays
ttctaccgtggatgcttttcagcaatcttggatatcatcttgagctggaaagcaagaagaaacatgtctcttgttgttaagctacgatacatcttgaagttactatcagctgcttcttgggttgtgattttgcctgtaacttatgcatacacttggaagaatccaactggtcttgcaagagcaattaaaagttggcttggtgatggtcagaatcagccatcattatacattttggcagttgtgatttatttggcaccaaacttgctgtccgctacactatttcttttccctgtaattaggagagctcttgagagatcaaatcttaaagtcgtaacattcataatgtggtggtcgcagcctcgcttatttgttggaagaggaatgcatgagggcgcattctcccttttcaagtatacaatgttctgggtcttgcttttggccactaaattggttgtgagcttctatgtggagatcaaaccacttgtgcagccaacaaaagatataatgaaggagccaatacgaacatttaagtggcatgagtttttcccccatgcaaataacaacattggtgttgtcattgcgctttgggctcctattattcttgtctatttcatggatactcaaatttggtatgcaattttctcaacgctaattggtggtgtctatggggcttgtcgccgtcttggtgagataaggacattggggatgttgagatctcggttcgaatccctgcctaaggctttcaatcaatgcttgattccatctgacacaagcaaaaggagaggattccgggctgctttctccaaaccttctaagacatctgaggataccagagaacaagaaaaaatagccgcaagatttgctcagatttggaatttaattatcacaagcttccgtgaggaagatttgatagacgacagagagaaggacttgttacttgttccatactgcaaagatcgtgatatggatataatccaatggccaccattcctgcttgccagcaagattccaatagcattggatatggccgcagatagtggtggaaaagatcgtgatctaaagaagaggatgaaatcggatccatattttacttatgctatcaaggaatgctatgcttctttcaaaaacatcatatatgaactagtgatcgattcacgagagagaggttacatacaaaagatcttcgatgcggtggatgagcacatagcagaagagactttgataaaggagctgaacatgagtaaccttcctaccctaagcaagaagttcattgagctgcttgacttactggaaagtaacaacaaagaagatcatgatcagatcatcatattgttccaagacatgcttgaagtggttacaagggacataatggttgaccagctcagcgaactactggaattgatacatggtgcaaataataaaagatctgaaggaatgacatcacttgaccaacaagatcagttgttcacgaaagctattgattttcctgtaaagaaaacccaagcatggaatgaaaagataaaaaggcttcgacttttactcacggtgaaggaatcggctatggatgtccctacaaacctggatgctaggaggaggatatctttctttgctaattctctttttatgtcgatgccagatgctccaaaagtgcggcaaatgttgcccttctctgtcttgactccttattataaagaagatgttcttttctcttcacaagcactagcagaacagaatgaggacggagtttccatccttttttatttgcaaaaaatctacccagatgaatggaaaaattttcttgaaagggtgcattgtgagagtgaagatcaactccacgagactgagcattctgaagagcagcttcgcctttgggcatcataccggggacaaactttgacaagaactgtaagagggatgatgtactacagacaagctttagtccttcaggcttcccttgatatggccagagatgatgaccttatggagggttttagagcagctgacctgttatctgaatctgatgaatcaccactattgactcaatgcaaagctatagctgatatgaaattcacatatgttgtatcatgccagcaatacggtattcagaaacgttctggtgatccacatgcacaggatattctgagattgatgaccacttaacaaagtaatcgaggttgaggtggaggcggttgaagtcgtggagggagcagccactgctacccgaaggcgggcagttcaggtggacgatctttctca

SEQ ID NO: 38002 - DNA, 5707 bp, Zea Mays
cgaaccgggctcaccggccgagccggaccggacgcgccttcgttgaaaccttcgcagggccatctctggtggaatagaggacggacactatttcagattgcttggtgctagtttatttttccaactcagggtggacttctgggtctatctttctcatcatagaagcaaacatttgtggaagctgcttatagctatatatgatatgaaagtttgggaaccatcaactgcaaattggccactctttaacgggcattagacccttagggacacttcaggaatgtcacattttcatcccacacagcatgcgggtgacaatgattttcagatgtggcagcagcagatgatgttcaagcagttgcaggagtttcagaggcagcaacaactacagcaatctgatcatggagccaggatgcagccatcttttggccagtttcatgctcctgcaaaacctttacctgctgatcaattgtcgacaatgtcaaatgaaatggccaacaatgaggccatgaattctgcatggccacataattttacaggtggtgatcccagtttgacaagcaactcccaaatgttgaataatggtagcacaaattgggatcagattgttggtgctcctggtgtaggcaatttcatgaacagttcaatgtttgcgaatgctcagaatcaatcgatgagaccaatgggaatagctacccaccaagtggatcaatctttttatccaatgcatcctaccagcagcagagggcatggaaaccagtattcccaatttttagggattcatgctgattctcagagtgcagtggcaagggttggtccagatcagtcagaaaagacatccagaccattcaactcttcaatgaatgaacatggtcttcatatgcaaggtcctgccagttcgatgcataattttcgtggaaaagggggtttcttgaataacagtctgatgcaaagtcaaggtgatagtatcagggcaggcagtccggttacagtgaatcaactacaacatggtattcaaacccaagattttcatggtaggtcaaaccaagttgaccttcaagtgggcatgcaagataaatcagcaatgcaggtagggcaagcaagtcgtggggctagccttgaccccaccgaggagaaaattttatttgggggcgatgaggatggcaactggggagctttgttgaggggcgacaatgataatggcaattctttggacaatgataattatggtggtggctactcatctctacagagtggtagctggagtgcccttatgcaggaagctctccagtctacaaccagtgaaaacagtcccaaagaagagtggagtggcttgagtttccataaaactgagcaggtgatggctaacaatgcaactttatcaggccatgatgataataagcttactaggttaagcggtgcaaacctagaaaatgcacgtccttcaccaacatccagctacgctgatggaacaatgaataacccaaatctcgccagttttcagcatgccataaggcctccattcgagcgaagggaccatatgactcatgaatctcctaatgctcctgttaacaatcatcaatcaacttctgaagtcaacaatgggtacattcaacatggcttaaaacaaattcaatctgatggaaggcaagaacaagtgcacctagcaaatggaatttggccacatcaaaagactgaactgctcagaaataattcacagtcaactggtatgcatgctacaccacctggtgcacatggattttggatttcacaacaaaatacagctgatcacaatatgaatagagagtccagtaataaccaaaatgactggaaagctaacaatgtgcttggacaagacatgcacaatagccaaaatgtcttcaatagcaatgagaactcttggaagtcaactggaggtaatgttaattcagtccagagacttcagcagaggaagtctgatgtaagcactactaatgaaagttcagatggtaaaagtattagcatgatgagctcaagcatgtcaatgatggcacaggatcattatcagatggtcactagtcggagtggcgagcaaattggcatgaaccgtaatatggcgcatagagctccagaaatctctgaatcaccaagaaaaagcacagaacaaagaccaggtgatttcaaccaggaatatctaaatgcaactcctaacgaaaggcaaacacacactttaaaccatggacaacacataagtgattctgcccccagaaggcattctatatttgctgggaaggaatccgaaaatttaggtcagtctagtcagcaagcaatgggatcttacatgttgcaaaatcgtgctatggggagctctggaatgaacattggcccatctccaggcaatccagtgtcaaataatctgtttccacctcagatgcgaaataatctgcagcatcattttggcacaaactcccttgtttccaataatatgccttcagtaagtgagaaaatgatgatggcacaggaacaacttcaatctcgacatggtctccctaatagctctagtgcattaccttttggaggagctgatactggtctgtctcagaacagagcagttcaaaacagtcaacatatgcttcagcttcttcataaggtggataactcaagaaatagcgatgtggctgctgacatacccaacaacccccttggcgttgtttctgcccagcaacaacctaaccattctttgcagggatttgggttgagactggcaccaccatcccaacgccaatcaaattcgggtaatttatggtctagtcagactaatgttgatggcaagcaatctgaccactcagcacaagatgatgaccgcacaccacaaccttccacgcctagccagtcattgactcctcagcatcaaaactctcaaccttcaccatttcacagttcagaaacagaaaataccgggcaaccaattgcacgctttccccagttaagtccaggtcaacattatcctgtcacagatgatagatctggtcctgcacccatgctgcagcagcagtctcagcaaagcaacttcgcaacagtattcaagaatgtatggacaaacatatcagcacagcgcctaggtggtatgcaagctaacaagattacacccaacatccttcagtctatgatgtttccaaataattcttcagcttccaacttatggagctctcagaaggcagatgatcaagggcagagggcatcaactccatcagatattgcaacaacttcagctaactcacagaatcaagatccaaaacgagctgctgataatgatgcagggttagcatcttcccagaaggcaaacctagagtcgaaaggaactaccgtaacaggaggaaatgaatccttgcagaagcctttttcagatgggaattccatgaatgctgtttcatcctttgcacaattgcatcagcaaggcatccttggtgctaaacatggggaaaacccaggagccaattttcaggctatgaattcttcccacaatagtgttaataatagtggtggcattgttttacatggaagcccagcaccttcaaacattcagcagcaaaattactctcttctacatcaaatgcatgccttgaggcatacggatattgatccaggcagtttagctggaaagacgacaagacctgatgttggttctgatgcttcacagattgactggaaatctggccagaggtttgctcatgtagacaataaccaaaccaaatcagctgcagataacgttggaagccctggtgtcccagggtcattcacttcagacatgaaaatactgagttttgcttcaaggagtgaggagagaaatgtcaatataccttctcatcttccatctggagagcgcccgtttcctggtatggttactgcacaaaatgataatcagaatcaagttcagcctatgggcacaagtgcaacatcaaattctgttgaaagcagtgagaggccgaggataaaccctcaaatggcaccttcgtggtttggacactacggaaactatagaaatggtcagagtgttgctgtgcttaatgctcagaagcccacggctttgccatataattttccgaaagttccttgtaacaatgaaaataataactctgctgaaaatagagttgaatctggccaatctgttacgcctgggcatcatctcccatcaacaagaatggaagctttggttccttccaatgtaaaagtatctccaatgatgagaaggcctaagaagcgtaaagctatggactctgcacttgtttcttggcataaaataattgaaagcccacaaaacttgaggagcatcagcacatctgagatggactgggcttgggcagctaatcggttaatcgagaaggatgaagcagaaacttcagacgatacttctttacattatttaccgcggaagaggctaattttgacaacccagttgattcagcaacttctcccttctataccagcaaccattctgagagctcaagctgtgtctgcttttgaaagtgcgacatacactctatcaatgctgacactaagggatgcatgcagcatggcatcatcatcattatataactcttgctcccctgtggaggatgaaaataacccatctgaacaaacaagaagtgctaagaaaatggaagacaaagtgtctaaggtcgtggaagtctttgttggaagaatccggaagatggaaaatgactttataagtttgaacaagagggcctcgatgttggatgtgcaactggagtgccaagatctggagagaatttctatcgtaaatcgtttgggaagatttcatggccggaaccatgcagcagcagtcgagagttcatctgcttcagaaatgactccccggagaatttttcctgaaagacatgtcatgtcttttgcagtccctggaaatcttcctgaaggagtacactgtttatcactctagtggaatgatcttcaattactctctagccactcagatgatctcaggttgcgccccgtgattcccagtgctccttatccatgcaaaacatggccaaacagaagagtcatattatcaagaggtaactagagaaccggaagcgtcacaataccacgatgagggcaggccaggggacgtgttccagccgatcaagtctgtgctggctgtggttgttgtcccttatatcaagtataggtccatgtatattgtggaaagtcaaggaaaaaactgtggatctcccatcatttttctctgatgaagagtaattaacttcagatttttttagagaagtcgatgcatactagcttagtacatctagcgagtttcttcgctatttgtcagtctctaagaaatccctgatgatggagtgttggcaggctagagtggagataataatgtgagcctttctctgggttctttggttcctttaggatgggatgcaaattggctagtgtgtccagtctaactgaccacccttgttaggcagcagttaattactagttttatgtagtgctgaaagcattcatggaacaagtggcgggtaaagtgcttggaaattcttgtaacttgtgtacccgtgatgtttaaagcgctaacgggctattgtaaatttaaagtgccaatattcctgaggttatattttgtttcatgcaaattggctagtgtctccagctgtgtcagtgtgttaaggtaactgaagctgagctggttgctcagcccatacaaaatgtaaca

SEQ ID NO: 38003 - DNA, 2125 bp, Zea Mays
atggagcagttccccgacggggcgcacgtgcggctgcggagccgcgtgcacgcagggtacctccacgccgacgaggacggggtgggggtgtccctgcgccgctggcgccgcaggtcgatgaacgtggcgtggaaggtgcaccgcatcctgcacgacggctccaccagcgtcctcctccacagcgccgcctatggccggtacctcgcggcgtcccacgacccggcgccgccgggccacctcggcctccgcgtcgacctgggcgactacgaccaggacgtggaccccatcctgtggaaggccgtcggctccggggacgccggctacgtcctcctgcgccacgtctccaaccgcctcctccgcgccaacggaaggtaccgcctctggcaccgtggcgtctccgtcgacgacgtcgacaaccagagcacgatgatgcattggaaggtcgagaccatccccaccagccccaggccgccagcacttccagcgccgactcggaggaaccgaggcagcttccgcggcctgttcctcctgcacgaggagcccgtggtgctgcagcggacggtacggttcgtgcgggcggacaactacggcaacttcccggacaactggggcacgctccagttccagggccgctccgtctttgagctgagagcggagatggcgcgtcgcttaaactatgcgctcttcttcttccgcctcctgatgtgcgtccggggcggccgctacgggcgcctgaccccgctactcatcgacctgcctcgcaacgaggagaccctggacatcatcgtcctcttcatcgggacacaaggacctgaaaattgcatcacttgtgtgctgattgctgaagctctccacatgattttgttaactgacagccccatgaggccgcatgtggacatgtctactcggaccactgcgtttaccattacctacacggctacaccgtcgcctaatttgccaacgcccgccgccgttccgatggaaaccgccgcgccggcgcgcgtccaagccctcgctgaggccggcgtgtcccgcctcccggcgcagtacatccagccgcctgagcaccgaccaaccccctcgccttctcctattgccgcggcgctctccgtgccggtcgtcgacctctcaacctccaccgccgacgacgccgtccgcgccgcgtgcgcggactggggcgcctttcacgtggtcggccacggcgtgccggtggatctcctcgacgcggtgcgcgcggcagggctcgccttcttccgcgcgcccatggaggacaaactccggttcgcctgcgacccggccaggggcgccgcctcggaagggtacggcagccgcatgctcgccaacgacgactccgtgctcgactggcgcgactactttgaccaccacacgctcccggagtcccgctgtgatcccgcccgctggcccgacttcgtccccggttacagagatactattgcaaaatacagcaacagcatgaaggatcttgctcaaaaattgttgtgcatcatctcagaaaatctgagcctaccaccatcttatatacaagaggcggttggagaagttttccagaacattactattagctactattctccgtgtccacaacctgatcttgctcttggattacaatctcattctgatatgggcgcaataacacttctgatacaagatgatgttggtgggcttgaagtattaaaggatggaatgtggatacctgtgcctgctttgcgtgatggcatccttgtgattctcgctgatcagacagagatcatcaccaatggaagatacaagagttcagttcatcgagctgttgtcaatgctgagcatgcccgcttatcagtagcaacattttatgatccatcaaaatcaaggaaaatatgcactgccccgcagcttgtgagtgagaatgaaccacaaaagtatcgggatgtaatttatggtgactatgtctcatcttggtatagcaaaggtccagagggcaagcgaaacatcgacgccctcctgattcagcactagagccatagttttttttcctgctcatgtgttgaggccgagtgggcatagtagtgtgcaaggcggatggaagcagccaaccaacttgacaatgaaactcttggctctgtca

SEQ ID NO: 38004 - DNA, 3137 bp, Zea Mays
aatattattagtggggcaaaaagacacaaatccgaaaccctcgcatcggcctgtacctagccgccgtcgccacagagccctcatctcgtccgtcctcggcggcctccgcggagcagccgtcgctggagcctggagaccaaagatccggccagatctgatgtcaggagggactggctcatccgggcgcgcggccccgcggtacgccccggatgacccgacgctgcccaagccgtggcgcggcctcgtcgacggcaccaccggctacctctactactggaacccggagacgaacgtcacgcagtacgagcggcctgtgccccccgagagccagctcctcccgcctccgcctccgttgccacccccgcctccacggagccgcgaccgccgcgacaggtccagatcccgatcccgcaccccaccccggcgcgaccacagggaccgcgaccgtgaccgtgacaggcgccacgacgagcacgcgtcctccaagacggcgtcttcccaccaccatccggctccggtagccgtcgccgacgatccttccaccgaggcataccgccgccgccatgagatcaccgtcacgggggataatgtgccgactccaataacttcatttgaggctggtggcttcccgtcagaaattctgaaggagatgcgatatctgctctgaggtggagctaatgtcgtatgctgcctcacgtgccctcggccaatctataagtgggactggctgagggcaggtcttgttgatggagctgccaaggtgggtgagttcctgaggctgctcgctccttcctcgaggggctgccctttgcgcgaaggggcacccactcgtgacacccacggtggccgatttgttgctctgcgtccggttcttggaaggctccccccatggatgatggggcctcttctggggcttgacccgtggaggtctggcccaggctgtcaacgtccatccatatataggatcgggtggcagctgctgcaaggggcctcgtggatcaactatccatgcctgagcgcctccacggattctgttagagccttttctacttcgccttgtgtccgcaagtctacacattgtggacacattttattcatacaacgtgctggattcgcaagcccaacacctatccaagcccagtcatggccaattgctatgcaaaatcaagatgtagtagctattgcaaagactggatcaggcaaaactcttgggtatctacttcctgggtttatgcatatcaagcgcctgcagaacagcactaggaatggcccaacagtgctagttttggccccaacaagggaacttgcaacacagattctggatgaagctgtgaaatttggaagatcttcaagaatttcttgcacgtgcttatatggtggtgctcctaaaggtcctcagttgagagatttagatagaggggttgatgttgttgttgcaacacctggaaggttaaatgacatcttggagatgcgaaaggtaagtcttaagcaagtgtcatatcttgttctggatgaggctgatcgcatgctggacatgggctttgagccacaaatacggaagatagtgaaagagatacctcaccgtcggcaaacccttatgtacaccgctacatggcccaaggaagtccgaaggattgcagatgatcttcttgttcatcctgtacaggtgacaattggaagtgttgattcacttgttgctaatagttctattactcagcatgtagagatcataacaccctcagaaaaacaacggcgcctggagcagatattacgatcccaggattcaggttcaaagatattaatattttgtaccaccaagaggatgtgtgaccaacttgcaaggacactcaccaggcagtttggagcttcggccattcatggtgacaagtcccaaagtgaaagggagaaggttctgaatcagtttcgatctgggcggtctcccattttagtggcaactgatgttgctgcgcgaggtttggacatcaaagatatcagggtagtgatcaactatgacttccccactggtgttgaagactacgttcacaggattggcaggacaggaagggctggtgccactggtgttgcatatacatttttttgtgatcaggattcaaaatatgctgctgacctaatcaaaattctggaaggggcaaaccaacgagtgccccgtgatttagaggatatggcttctcgtggcggtggacgaggtaggaagaggaaccattgggcatcccgccctgacaggggtggttcacgttctgaactggattcaaggtacagcagcagagatggactagcatcttctgggaaatcagagagtggtcgcggcagtcgtggaagggatgataatggtagccgtggcaggtacgaccctggtgaaaccgatgggcgatctcgtaggtctactagaggccgcagtagaagccgtagcaaaagtgacagtagaagccgtagcccaagtcccaagaagtcacgtcgtcatgaaggtagacgtagcaggactaagagcaggagcaggagcaggagccgtagaaatcatggcgctagccacagcaagagtcgcagccctgtcgctagccgtaggtatgaaaagactgcttcaggatctgctcggcctaactcggggcatgcagagcacaaaagccctccaagatctcactctagggatgaccatgtgaaccactctgaccacaaggatgatccgcgtgcaaatgcagctgtgcagaatggtaataactgacggagagtggcctgcatcttctgtgacaaccaagacttatctgttatgcaaaatgcagtcattcccatctgcaagtcctgaatacggaaatgcatttgtgtgccattaaatatctcgtagaacatgtgatactgatgcctctgccatcgatgaaccaaaactgttgatgcatgtcatgtcatgttgttaaacttaatgacattgttgtgttctggtgttttacagccagttctgtaagtgatttatgataaaatatattgtcaggtctggaagtggtagtttatgataactagcaaagttatgttgctacggtttctatttataaagtatagaatataaaatacaaagacatgtgttctgttggttaggtgaatgcgaatatgggtttatagcaaaa

SEQ ID NO: 38005 - DNA, 1335 bp, Zea Mays
aagccgccgccgccaccaccgcctcacccaagctttcatttgtcatgctggttgcccccgccttatcgtgtaatgccatgttgcccccgcatcatcatctaagatttcgtttgtcgtccgcgctgcagtctgcttcccgtttcactcttatatttttttgttggacggagttgttttgcatcgtttcgatctgtaccgtactgtttcccctcttgttcataacggcggcgacacaaattcttgcgtgctgcgccgctcacgcaaggagggataaatcgactcgtcaagaaatcgtttcagttgccatgactccagtaggcaatatgattgttgcttgactacagttttgtcttccactacttagcttatttgtttgttttattcttacctcgcccgtattttctttgttttattcttacctcgctcccgattttaagatctaatttggtatctgcacggtgcttaccccgggcttgtcggatgtacttgaagaaggaagccccaatgtctgtgctagatccactatgccattcagtgttgcaggccctgatgaattttgtgattggtctgtgtcaaagcaatggatacaaattttcgtaatagaccatttctttattatgtttggtttgatgattcgtttgattgattgatggcagtgatttgacattacccgcgcttctgatctaacccgtgaagcaaagggaaaattaatggttgaatttcttaatatgagccatctagtgatctttcagctgtctccttttattttgtgcgtgagctcatttcattcatgtggttgatttggcggtgatgatacaaccattcagcttacaacgccagttctgcttctgataagtcatgacagataaagctgattcatatctgagccttgatttgtgtcatgttctgacaaactcataattaggatcatgcattttttcttgctccaaaccttacatcccgttggccactgaagtcaacccaatgtttcgaggctacaatcggctccaactacatgcttgtcaggtgacttttttctgggatggagctcatatttgcaggtgattgattcatcttggggctgagattgaaataggatatggcacatatgataatgatcagagtggtttctgaacatacgaagtagccgcccaagagctttcaacctgccaagtttcagagctagtgctgttacatcgttggcaatgccacaacattttttcacatacatttatttcccaatgcgttgtccttaatgccatgtccttatgtagcagttcatgaacaagattggaaggatataagcactcaacgaccttcgtcgacagagctgaa

SEQ ID NO: 38006 - DNA, 473 bp, Zea Mays
aaaaaaaatcggtctaattgtctatctggagcccgagtctggaccgaattcctcattccccacctcagcccaccaaatgaggtagggtttccgattgcttccgcggttcaatcaccgcctacgtagaacccctccgctccttccagctcgctctctacctgcaccagcctcgcccgcccttcgctcgccgccgccatggggaggggaaagttcaagggaaagcccaccggccgccgcaacttctccacaccggaggagatcgctgctggtacttcaggtcgccctcgcacctttaagaagaaggaggaagaggaagaggaggaagaagaaagagaagagtcagaggaggaagaatctgaagacgagtctgatgacaaacctaaacataaaggtactgagggtattattcagattgaaaatccgaacttagtaaaagtgaagaatataaaggccaaggaagttgatcttggagg

SEQ ID NO: 38007 - DNA, 1128 bp, Zea Mays
ccggacgccattcccacccgcgccctcggcttgtctctccgtccccgcttcactgcatgcatccgctggtggaaccagggcccaacctgcctggggacgtgcccgggcttggcttcgttggtggtcgtgtggatccctgcgttagctgcgcaggttgccccatgtccgcaccctccgacctaaatctcgctcatgtcgtccggtgccatgcgactcgctgttgtgcgctcaggtgcccaacgcggcgtgatgagaccggcaacgtggctggaccggcgacgcggctgcgtggcagatacatgtgagcatgggcactgtcgccacctactcgaccaggggctgctcctccccatctcacgtggaactcctcccttggttgcttctcaaccgcatcagcgaggaaaacaagcacagaactatgcacacttgttctagcatgaatggaggtcgccaagatggatttggcaaacttcatggtggatactagagacgtacaccaagaagaaactcacgctcagcaaagtcattgtcgcaaggtgttgctagggacaacttctattcaatgtttcacattacccagagaggaggaaattctcaaaagaggaatacaaagcattcacgagagagatgaataaagctatgaagcagctgttgtcgtgaccggatttcaacaggtgggcgttggctaacgcggacatgatatctgtgtggctctgccaggaggaaactacagcagcagcaacagcaaccaacagcggcatcgtttcttgggactatttttgatctgcatgtgtgtagtgtgctttcttagcagcaataggagtgctccctactcagtcatttcatgtgagttgattagcaagggtagggtaacatctgagtgttccacattatgaagtggcagcaaatatgtagaatattgtagtttagtgagtcacatcttaggtccaaaaagtccaaacagcatctgaatcttgtaacattcagtgctaaggtgagtgaatctcaatttgttgagttgtatatcatgcttgatcatcatgaggatagaatgaacgtatttaagtgtttctaggcctgcatatgaagcaagctgtggcatatgaagcaagctgtgctgaagtgtcg

SEQ ID NO: 38008 - DNA, 1456 bp, Zea Mays
  misc_feature (1455)..(1456): n is a, c, g, or t
caggtattcacgcgcgccgaggctgccgttccccatcgcgacccttgcaccgggtccacgctgaccctcttcacgggggcggcgaaagatctcagccgcgacgggttcgagcgccggcgagcgctcgcccacctgggcctataaactggccccggctcctcttctcgcgtcgcagagcccagcctcgggatgacgtggcgtatcgcgacaccgccacagctcactcaaccgcgcgggtctccaacgaaccccttgtagaagcttccaaaccctagcgcaggaggaagaggagcgtggaggagctccaggaatggcgaaggcgaggaagcagaagggtgacggtagcggtacgggcggaggcgccaccgttctccaccagaaactctgcctctccatcgacatggagaaccagctgatctacgggtacactgagataaaagctcttctagctgaaaacgacacatttgctctacatgctgacaatatgacgatcaggagcattctggtggatggtgaaactgttgagttcgactattcccctcattggaaaaatgaaactgatcaacctaattggtcttcaatatcatgtttgaacactgttgctgatgctgcatgttcaacatatacttcgtctctaaatcgagaagctacaccaaatcttattgtgtcatctgagagatcaatcaagtcaatgattgagcagcagttagatgaaaacagtgaaaaatatgaagaaaatagtggaaggcttgaaaaacatggtggaaagaccatccaaacttcctatgatcaaattgttaatggctgcaatggttctgcagtggaagagggaatagaaaattctgcagtggaagaagggaaaaaaaaggaaaaggaaaaagagaaggaagagaaaaatggaaatgagaagagcaaggaaaatggaaatgagactgaaaatgaaaaggtgaagaacataaaactggttcacatagattatattttggagaaggctgaaactggcattcactttgttggcaatgtcatgcatagcagtaatcagataaggcgggcacactgttggtttccttgtgttgatactgccacacaacgctatttgacttagaatttacagtcagcacagatttcatcgctgtcagcaacggtgacttgctttaccaggtcttaagtaaggaagatccttcaaaaaaaacctatgtgtataaattgaacactccagttagtgcacagtggatatccttggttgttggtccacttgaaattctccttgacagaaatgacataaatgtgtcacacatctgtttatctcctgccttgtcaaagcttcagaacactattgcatttttccacgatgcatacagctgttatgaagactatcttgctgcaccgtttcccttaggtttatacaagcagatttttcttccatctgaaatgacagtattaccggcaagcttnn

SEQ ID NO: 38009 - DNA, 3100 bp, Zea Mays
cgccgatcgcttcaccgccagcgccagcgcagcattgttcgtagagaggatggttcatggtagcaaaagtatggcggtaccagaacaagggattccccctaatgttgttgaggatggggaacccttcaggcacaccagtgtgggcacttacagaggagcagatgttctttagaggcatgttgtgttgtactcttccacccactctctgccaggttgtggtggaaaacactcgtgtgggatctagctggctcttgtgcaattggtatgccacagctgctcttctcaccgtgtgaggacgagcacagtaaaagctaagcatttcttgattcatcctcccagcttcgttaattactatcaatgatgttgctgcatatttctttggcatcttctttgggaaaacaccgctgatcaagctctctccaaagaaaacgtgggaaggctttatagttaactatcttctgaagcatttccctatgtttagctactcctgctgaaaatgtactaaccacaccttccatggtggagtgcagggcctccctgttggggcacgagatcgcccacccgtcgtctacaccagattatttctatcataccatcagatagtggatggacaaccaagcgtgcaccgtttcatcatttctgattctttcttagatgactaagataagtgtgaggtctgtactcatattctttccttttcttttcaatgcaggtatgatcttatacgagtggagattggcaacaaagatataaagcttgaatacttagtggaggcatttacaacttcaaatgagtaacattccttgatctgaaatgtgtacaataatcctgatgaactactaaaacacttgccttaatctgaaatgagtacaataaaacatatataaggaaactcaaataagtaaagtcttgcttgtccctcacaccataacatgactgatgaactactaaaacacctgcgaggtctgtcagcgtagcctcctcgacaccttctgcttctgctaactccggtgcaaggtacgccgctgccatcccaatccctacccccaggcaagctttgttgattgctttctggttgttgatttctgagctagctatttagaagtcaaaaattgggtgaaatctgattaaccaaactacctggttagaaatcaaattggatgaaatctaattaattttgatatgtgtctcctgagttcaaggatgtcttctacaataattcagccaagaacaagaagcgctaattggaatccaaattgtttgatgtggtgatatgatctggaacttggaccatctttatgctttatggggctaagaagcataagacctgtccgaggcaattgtatctcaacataatcagtttgatgggctccaggagttatatcatcagaaatgtttttttagtatttctatgtaccagcaaaatattgactgaatatttctaaccaggtagatccttgctatacttgacaaactaaaggaggaaagggagcaacaagaaggaaaatatggggaggaagatgtggatggttcatgtatatcagaagaagaagatggtgactgggatgtagatgagccagatgaggaggacatcatttacgtaaaatagcccattgtcttctaggaacttggtcatcattcatccagaacacagcaggttgcgttctgcatacataatattgcctatcaaggtagatttgccagagcagacttcgatcttcttaatctacctgacagtttcttaccatcatttgattttattgatggacatgttaagcctgttctagggagaaagattaactggatgaagacagggatcgttgagagtgatctggttctaacagttagtccacattatgttaaggaactcacttatggcccagataaaggtgttgagttggatggtgtccttcgcacaaagcctcttgaaattggaattgtaaatggcatggatgtttatgaatgggatccttcaacagataagtacaccagcgtgaaatatgatgcaacaacggtaactgaagcaaaggctctcaataaagagaggttgcaagctgaagttggattgcctgtggactcgagcatccctgttatagtttttgtcgggcgtcttgaagaacagaaagggtctgacatactcattgcagccattccagagttcgtgggcgagaatgttcagataatcgttcttggcacgggaaagaagaaaatggaggaggaattaatgcagctggaagtgaaatatccaaacattgctagaggcatagcgaaattcaatgttccattggcacatatgatgtttgctgggtctgacttcattattgtcccaaattcccatctgttcatcacctggaggacttgttgacacggttgaggaggggtgtcaccggattccacatgggttctttcaatgtcgagtgtgaaactgtagacctagctgacgtgacggcagtagcgtcaaccatcacacgggcctagaacagtacggcaccccggcgttccaagaaatggttcagaactgcatggcgcaaaacctatcctggaaggggcctgcgaagaagtgggaggaggtgcttctgggccttggagtcgaggggagtcaagctggcatcgacgacgcagaggagatcgctccacttgccaaggaaaacgtagctactccatgacgcttggtgcctcggaaacacgcgttggtgataggaagcatcttctaggatcctcctggccttgtggctggagtgagttgttcagtcagacacagtttcgcctctacaacatcttcctcctcctggtggtggtccgaactccgaagcaaattccagtgataaaggatgaactaagaggtccatgtttctattgctagaccttttgcctcctaaatagacgatgtactgcgcttgtaacaagaacctcactttcgtgtcaagtaatatcaacaggtttcataatggtagtgaactgcactggaaaaacctgtaaacaatgcaaacaggattcaaaactaaaacaaatctgctattaaaagctgttattcaaaattgaaaaaaacaaaacctgttaattcagtattataactcagcaaacataaataaaaaaaaca

SEQ ID NO: 38010 - DNA, 1848 bp, Zea Mays
agcgccagcggtaggcgagcgagcgagcgcggtgtccacagggccagcaacagtaggccccagtgcccccacccgctccagatccacagccgtcggccgtcgcggcgtggtggataaaaaaccctgcgcgcgcgcatgtggacatgtggtcggggagacggggactcggggtagcgactagcgagccgaggagcgcgcgcgcgcgatggcggccgctgccgtggcgaccgtggcctccccatcccccgctgcctccaggcgtatgctcccctccgccgcaccgtctttcctccggctcccgaggccgaccagccggctccggcgcgccacgcaggtcgccgcggcggggggagaggcggacgtgctgcctggtccgggggccgagggtgaggcggcggttccggggaggctggaggagcagcgggacgagccgctggcgggaagccagctcgacatcggagggctcgccttccagggcgacgtcggcgggggcttcaccggcggcggagcgggctccggggcctccggcggtggcggcgacggcaacaagatgctggaccggggcatcaatacggccatcgttctcgcggccagcacctacgcgctcaccaagctgctcaccgtcgaccaggactactggcacgggtggacgatcttcgagatcctgcgctatatgccggagcacaactggtccgcgtacgaggaggccctcaaagctaacccggttctagccaagatgatgatcagtggtgtcgtctactcccttggtgactggattgcacagtgctacgaaggcaagccaatctttgatttcgaccgtgctcggatgttccggtctggtcttgttgggttcactcttcatgggtcactttcacattactactaccatatctgtgaggcactattcccattcaaggattggtgggttgtccctgcaaaggttgcattcgatcagaccgtttggtctgcaatctggaacagtatctacttcgtggtcttaggtttccttcggttggaatcacctaccactatctacagtgaactcaagtctacattctggcccatgcttaccgctggatggaagttgtggccttttgcacacttaattacatatggtgtggtccctgttgagcaaagacttctatgggtcgactgtgtggagcttgtctgggtcacaatattgtcgacgtactcaaacgaaaagtcagaggcaaggaattctgatagcacctccacaccagatgcttcaaagatagcagccctagagaccttggagagctgattcgcccttccatcgcttcaggggttatgtaaattgtacaattagccgcagcaactctgcaggtgtaaccctttttttggtagatatgtatatattcatgaaacatcaattgtgtagtatgtgccatagaatattacgaagaaagtagcgaacttcattcgtccgttctaaaataagtatatttctagcattcaaaatttatcttgtgttagagtcatttcgaggccatagcccatagctcacttctaacattcaaaatttatctcataatagacatttctaggccatagaccactcgggactaataccttttgctgttttttttttcgtttctagtgtcatgctgctctatttttatatgatatataaataattttataatgctattgatttttggaattgctctattgcgacggagtgaatacaactacagtagctgctggaattagagctagtttagaaatttaaatctcctctaagattgtagagtattaagggacttttagggccagtttgaaagctcgaattctcttcagaattggagagaattcagagaaataaataaa

SEQ ID NO: 38011 - DNA, 391 bp, Zea Mays
aggtgggcctaattacttgggaggttccatcacaggctctgctcctcaaatatcaaaataaaagcagttcccggcaggtgggtcttcaagtggtggtggtgcaacttcatcttcttcaaccactacttcttcctcgttctctatatatatcatatataaccatgaatgctcgtgtgatgcttataaaaatgcaatataaaggtacatcgtattaagtcttgaatacaattttccttcacggtactccagaaaactagggtaggcactagttagaagtctagggttttggggtttaggtaccaaacattgcccaaatcatgccaatttttacccaaggtttctaaatatcattttaagcttatccaaaagttgggtgatttttggagtgact

SEQ ID NO: 38012 - DNA, 1266 bp, Zea Mays
aataaaaaagaaaaacagaaaataagcacatcctcctccatcaccaaattgacgattatatcgaaaatctggacggcggcggactcgattgtagcagcagccgccgggaacaagatggcggcggcgttgtcgcagctggacgacgagatcgtccgcggcatggccatcggcgctgtcttcaccgactatgccgggaagataaactgcctcgacttccaccgcaaggaagatctcctcgtcacttccagcgaggacgactccatccgcatgtacaacatcaccagcgcgacggcatactaaggctgcgtggtagaccttctgtcgcatatgatcagcagggacttgtttttgctgtagcaatggaaggaggtgctattaagttatttgattcccggtcatatgacaagggtccatttgacactttcttggttggtggagatacagctgaagtttctgacatcaaatttagcaacgatggcaagtctatgcttttgacaacaactaacaaccatatatatgttctggatgcatatggaggggataaaggtgtggctttagtttagagccatctcccaatgtaacaaatgaagctgctttcactccagatggtcaatatgtaatttcaggatcaggtgatggaaccctgcacgcttggaacatcaatacagtacaagagattgcttgttggaacagtcacattggtccgattacagcattgaagtgggcccctcgtcgagcgatgtttgcaactgcatcaactgccctaactttctggattcccaaccaatcgaattaggatcaggtgcatggagaaagaagggatgtgacttcatgtatgttaacgtagcaaatgttcatatcttgttcttttgtccaaaagatagatgccatgtatgaaatcacttcattaccatctacggaaacattgacatgtttccaggcagatacttgttgtagtgctcccttatttatatgtactatactaatacacctgcctgttaaattgttgtaacatagttctaggcagatacttgtagtgcctccttccttattttattttatgtacacttgcctgttaaattatcgtgttcttgaaagaccggggggtgttcggtttgaggaatcaaactattcaaaatgaggtggtgcattatggatccattattcaaatttagtgggatgaccacatttctaatattagtactaactatgaagaatgaggtgataatgaatcaaattatttcattctaaaaaccaaacaaaaaa

SEQ ID NO: 38013 - DNA, 1245 bp, Zea Mays
gcaccatcttcgactcaggcctcgaccaccaccaccaccagtccacaagaccaccaaacacccttttttgcttgtcgtgccctcctccttcctcccagcttctccggtcatcccagagtacggccattctctatcccgtcaaccacatcagggcaacctgccaaacaccgcacttgcgcaatccatccaaacccccccggcaactccccaattccctctcccggagtcatcgacatgctttcctcctccaacagctcagctcccgccgcgctgtctcgcgggatacctctacaagaaccatgccctgcctattgtttcttctagctccaccgcctcgcccctgtctagctgactcgagtaaatggctggtggctggttgttttgcttttgcagctatttggaagcgtgatgctgaaatcatgtgggttttgctgggtgcggttggcaactctctgctttcgttggttctcaagaagatgctaaaccatgaaagacctgcaccagctttgcggtctgatcctgggatgccatcgtcccatgcacaatccatattctatgctgcgaccgtcctagctctttcattgtactactggcttgggacaaattatctgaccatgattcttgggcctgcaactctgtcgttggctgcctatctgtcttggctacgtgtgtctcggggccttcatacactaaaccaggtcatggtgggagctgttgtaggatctgccgtcggtgctctttggtttgtgctctggcattggcttgtgcaggaggcctttgcttcttctgtgcttgtcagagttgctgtcatccttggatcatcagcattttgtgttagctttgtcgtctacatgattcgtcactggctcaaggatgagtaatgtacttcggagctgcaatgggagatggacagataggcatggtgattttggaaaagtgaatccgttccgattcttatcagaatcgcttgaaaaaatggtgacaaatgggttttggcggagcgattcacgagtggaacaattctcttttccttcagaaactctcggattggggaaaatgaagtttcacaccgattcctaatagtcacatacgcctcgtgtcacactagtaattgtattttttcccagttaatcatttttaagtacaaggaactaaatatgttgtatctagagcaagctcaggagatttatgtcaggaatacaatttttgatgaaaaaatatccttcaacaactcgtttagataga

SEQ ID NO: 38014 - DNA, 1375 bp, Zea Mays
ggcaaacaccacgcgccgcgggcccttcttgcgtcagcatcgcacccgcacttgtccggtctgtgggcctggctgtttgttaggactgcccggcccggtgccccggtagtagtactagtagtatagctagcctagtagggtaaggaaacagtggtcgtcctctaatccgaatcggaaggcagcggatcggctcggaccgggccgggccggggcgtgtggctgcgctgcgtcgcctcgcctcgcgtcggcgattcttccggcgaaccaacggcgccagccacacctgagcgagcggcgcagaaaggtggcgcgtggacgccacgctcgcctcagccttagggatcgagggccctttccgtccgcgtggctgctgctcctctcgtctctcctcccacccgtccaaggcatggagcactgctatgtgggacagccgatctcgagggccgaggcaatgcccgagaggaggtccaggttctggcagatggatgcgcctcctccgccccgggcggaggtcatctgcccccagcctcgccgcgccacccggattcccctcaccgctgtggaaaccctgaacaaagccagccccaagatgaacggatcggactccacttgcgatatacttgatcttatcctcagtaagaatgactcggatggagattcgagcagccaggtgggcttcttatgcggctcacctccgatacgcgctgacaaccctgttatccatgatccacagtttggtaaaagactgccatccttttctcctctaggagggagctcctatggcaaaatgccagcagtacgagttgaagtaggctcgccatcttgcggcgttagcagcagcccaaaagtaaggattgaaggtttcgcctgtggcaactccgagacccactatgcagttacctttgtctgagcattttgttggtatgttcctgattttgcccttggaccgaccgaccgctcgctccttgtgaatcaccgtggtggtgtgcaggatattaagtagtgcatttaagctagcctgattagagttgccttttgcccttctgactggcaatcgaaactgcacaattgcagtgagtagtgagatgtatataagtgaggtccccgcatatttaccttatgatgtatgtgtctagtaaatttagctggagatctggtgtttcatggataagagcctgtgaatagagttgagtttttgcattcagaagtaagatgcaacatggagttttcagttattattatgaatgcatctttgttttgtgtcacatgttgtgatttttttggcctacaagttacctattttccttgcagtttgttttggtgttacacatgcttatttgttgccatctgacagtcaatttcctagaatgcaaaa

SEQ ID NO: 38015 - DNA, 1685 bp, Zea Mays
tgcttctcgccctaccatcgcctgaccgacgcgcccgttttctcctgaaaacagaaggctccggcctccggcatccgccaaaaaggggaaaaaaggagagataacacacacacacacaaaccccaatcccctgcggcggcgatggacccgtcatcggcgggctccggcggcaactccctcccgtccgtcggccccgacgggcagaagcggcgcgtgtgctacttctacgacccggatgtgggcaactactactacgggcagggccatccgatgaagccgcaccgcatccggatgacgcactcgctgctggcgcgctacggcctcctcaaccagatgcaggtgtaccgccccaacccggcccgcgaccgcgacctctgccgcttccacgccgacgactacatcaacttcctgcgctccgtcacgccggaaacgcagcaggaccagatccgcctgctcaagcgcttcaacgtcggcgaggactgccccgtcttcgacggcctctacagcttctgccagacctatgcgggcgcctccgtcggcggggccgtcaagctcaaccacggccatgacatcgcaatcaactggtcggggggcctgcaccacgccaagaagtgcgaggcgtcgggcttctgctacgtcaatgacatcgtgctcgccatactcgagctgctcaagcatcacgagactggagttgctcttggccaagagcctgaagacaagatgcctgttaatgagtactatgaatacttcggtccagattacactcttcatgttgcaccaagtaacatggagaacaaaaatacacgacaacaactggatgatatacgatctaaacttctggataatctttcaaaacttcgacatgctcctagtgtccactttcaagagagagttcctgacacagaaatacctgagcaagatgaagatcaagatgatccagatgaacgacatgatcctgactctgatatggaagtggatgaccacaaggctgtggaagagtcatcgaggaggagcattctaggtataaaaatcaagagagaatttggtgaaaatgcgaccagagtacaggatggtggcagggttgcatctgaacatagaggactggaacccatggcagaagacattggttcctccaagcaagctcctgcagatgccagtgcaatggccatcgatgaaccaagcaatgtcaagaatgaacctgagagctcaactaaattgcaaggccaagcagctgcgtaccacaagccatagctgcgaccatcaagagttgctgggtttctgctaggcaacttcctgcttgatttggacagtccagaaaacagaagtgaatccgcaatacgtccctgccatttcaaatttgacttggttacacctatctgtgacaatgttaatgtaatgagatcccatggcactagtgaagttcccaggtgtccacctgggattgcttgcggttgagagagacgatagtctgatgacccatgtatacatgaagcccatgatctcagttgtacagtcattagccaatacaaatatgcagtggactaaagggtgattcattgcgtgttcttaatggttttgtgtcctgactcgtccttttttttgtgcggaagcaaggtaggcagttgctgtgccgcaaatttgccgagtttgtagaatgctgatgcaaatacatgcgctatctgcct

SEQ ID NO: 38016 - DNA, 1205 bp, Zea Mays
tgttatattgcagttgtgctagtaagcttggatttggtgaatacttgtggagatcctgcagagattccatggggtaactttggggctgaatatgttgttgaatcttctggtgtctttacaacgactgataaagcatcagcacacttaaagggtggtgctaagaaagtggtgatatctgcaccatcagcagatgctcccatgtttgtagttggagttaatgagaatagctatgattcgaagatgaatgttgtttctaatgcaagttgcaccaccaactgccttgctccacttgccaaggttgtacatgaggaatttggcatcgtggagggccttatgacaactgttcatgccacaacagccacccagaagaccgttgatggtccttcaatgaaggattggagaggaggacgtggtgctggccaaaacataattcctagctccactggtgcagcaaaggctgttggaaaagttctgcctgagctgaatggaaagctcactggcatggccttccgagttccaacaccaaatgtctctgttgtggacttgacatgccggattgagaaaaacgcctcctatgatgatgtgaaagcagccatcaaggcggcatcagagggtgcactcaaaggtattcttggctacacagacgaggacgttgtttccaatgattttgttggtgattctaggtcaagcatctttgatgccaaggctggtatcggactgagctcttctttcatgaagcttgtgtcttggtatgacaacgagtggggctacagcaaccgggttctggatctgatcgcccacatggctctcgtcagtgccgccgccaagctctgatgtccgtactcgtttctccagtagtagcttagaaaaaaagactgcaattttgacggccattttctgttagctgttgtttggaataagatcaaatgctggaacacttcgaactcgcgcgagactggactcagatccatggcctgtattttagttgtagaagtgggcaaatttgcaccgtagtaccctggcatggttatatgcggaattgttgattgatgagtcgttgtacggtttgtcgacttgatgatatgttgatgtgggagcccctgaatgaggcggtattaatggaaatataggatggcaatggcaatccgtcgacttgcaccctatttttctttgtttgcacaaatctgtctgttgctcgaaagtcg

SEQ ID NO: 38017 - DNA, 959 bp, Zea Mays
aaataccgtgcgtccctctccgtaatcttctcccacacgtctgtgtgtccctctccatgcgttcctcttctcacgcagcctctcctcgcgccaccacctaccatcgcgccaccacttgccatcgcgccgccaccttccctctccctctcaccggtgagcctcctctctctccctccctctccctctcatcgggtacgccaccgtttgtttctccacgcggacgcgccgcaccaccagcctcccgcctgccacgtggacggacgcgtcgtcggctgcttcgcgccgcccgacaaggccggcagcgtcgacctcgacttcctcgagcctctcgacgaagggctcggccactccttcgacttccttgcgatgcagctccgaaaccctctctccctcctttctctccctccctctccctctcatcctaacctcctgcgatgtagctccacggtgacgagccccgccaccccgcgcctaccgccgacgagcagtgccactccgtgctaggtctattcaacaacaggcagaacagacacctctccaacaccccagatcttctattcaagaacttgctccaggctagagatgaagctcaaaggaagtgacttgtcaaattatcaatgaagaatgtcaggagcatttggtgaagagtgattggcatatgaacttctggaagttgaattttcaagacgtttgaagtcctaagacatttctagatcatgaaaattatgaattcttaagactagctttattgcctggctgtgttgttaactgtgtgtgaaaataaactgttgtttgaaacctattatgtttgctagcacaaagctggtagttttatttgatgttcagcaagacaaataaagctgctaactttattggttgtttgtgttgtcaactgtttgtgaaaataaccagtataaagttgttgtttagaacatgttatttgtgctagcacaaagctg

SEQ ID NO: 38018 - DNA, 1108 bp, Zea Mays
caggctgtcgagtttaggcggcattgttccagcaaaaaaaaatcaaaagcattgcacttcttactactgatacccctatgtcactactaccatacaggttagtgcacgatccttacctttatgttctacatgtctttgggtttctctttttttcaagtgcgttctattattgtttatatgtccaccttcacactgattagctgttccttgttcctacacagttattatctgttatgtacatttttatacctttccaaattagcttattatctttaaaaaattgtattttcttggctactttacatttgaatgaccaatggcaacatcttcaaacaaacatagctaacttagaggaaagaaaacataatctttaaattgctcataagagagaatgtcatttttcagaaaaaaagaaaaacagtattgatgctttagaaaatcttaaactgatgcatgttaatattatcatatcaatgccaacaacatatgtttaagctggtttcatccttcctagcagctctacttgcttcatctcgctcttcactgctattttttaaattggaaggaaaataagagtacgatagaagaacttgaagcgcattcactggtctcttatttaaagtccataaagcaaagttccaaaaaaacaaaaagaaacattgagttgccttcacccggcttctcttgagaaaatacaaggcgttaagaaattctttagaaaggcatattattactacatatagagctaggagtagatcttcatccgaacccctccaacgacgactaggtcggcgttttctctccctgctgtttcagagactgaatttagtcgagtgggttcacctgcagttccggtatgcaaactacacgaatgatgcctacaacaagagtgggaacgaatccttgtggctgcagctgataaaccagagagcatagacttaacctttgtgctcttctcgacaggcttctttgctgttagactttaaccaattcatctcatgtcccaagttcaattttatgtaatgaggattgcatggtattttttggcaatttatctttaatgaactataatgtatagctgaagttggttgcagtttgaaacaatgcg

SEQ ID NO: 38019 - DNA, 1697 bp, Zea Mays
ccccgcgcgtctctctctgctcgctcgcgctccacggagctcgatccctgctgcgcagctccttcggcgccttcccgtcttctccagcgtgtctccctccctgcctcggctccttgctagtctggtgaatcgctccctggtcgccgcacagtcgagctccctcgagctctccggttggccgcgcgcccagcaatggagtctcacggtgctcctattccccgtctatggcgccattgcctagctcgaccaagtcacccatggctgcgcactgtgtttttgtcgacgatgtgctcgtcaggattagcctctgcgcgtccctgctcccctgcgcgcgcacgctcctgccgagctcggccctgtccatttcgtcgcgctcggtctctagctcccggtgcgcgccgttgcaagctcgtcagccaccgttcccttgtcacagaacccccaacgccgtcatccatggtcgcgacctcgccaaatgcgttcatttcttggccctgtgtcgtttggctcgtcgaccttgtgcgctgtcgcgtgcgcttgttcctaaggcgcatcacgcagtagttggatctcgcgcgcgtggttttgaagctctgcgcgttcgtcgtgccgcgtggtgtgccgatattatctcccagcagacctcgccgtcgaccatgttcaagtgattgcttggctcctcgcatcccgcctattcgataaaacactcaaatctatagattgtcgacgcactgctgccatacacggctgtctccgtctcttgcgtcagctcgccagacctgcagctctatatacgtcaccctcccgtatcatcgtcaagcccgtcgaacctcgttcttccctgcccgaccttgtcgaaccctgaatcccagacgttaggcaaaaataagcaaggtccgtgtgcatcgcttatccagtgctcggtcgaagacttcaatcgaaggtcatcgtcgttcgtgcatcccaagaaatcccaagaatcaggtgaagacgaagctagcagggtgatattcaccaagtgctcgacaaaagctcgaacaagtcgtcgatcgtcatcctcgtctacgccaagatccgagaagattaggcgcagaagaaaataaatcagtatgctgccgaagaatacttgatgcggataaaaatgaagcgcaatttgacacagcactcaccctatttccggtgaaatgctgagctgaaaggcgtcgtcgatttctggtttcaagtcggatatcataagggttatagttttgtgctactgatgatggtgttaagttccggtgggctcggcctttttataagtctaagtaacccttctatacttcttattgagaatggtcacttgagctagcatattgttgggggtatgcttcgtagccgaagatcctaaagagagagaacaccttcgaaaggtcttctcagaagcaagcgccgaagctattatctataaagcttcagcacaaagacagatctcaagatgaagggccgaaccgacttaaagatgaattgacttaaagacccatgatgttttgtgtcattattgtagtcgattgtaaaggacgtaaatgtaattttgcgcaggttgcatcccgtgcctataaataggtgaacagtatctcggcactgttcacgcgatcctgtaattgctaacgcattgtactggaatcattttctgttagagacaaaggtataaatgtacc

SEQ ID NO: 38020 - DNA, 2615 bp, Zea Mays
gccatcgaccaccgtttcctgattgcctccatttctgtgggactcgtcggattcactcaccatcgatccattgttttcgtctcttgcggccttgccccacccataaagccgatgggttagctcccccgcaccgcacgcccaagaacaaagaggagccgacgccacggcgacggtcgtcctctcccggccagcaccgtcgcggactgcgttgcatccgtgcctttgcttctctcttcaccccgcgtctctctctcttggcgacgactgggggaccactgccgccgctcaacgccagttttgtgatcggtgaaaatggctgctgctgaagcaagggctgcttggcaacgtgctgcaaaccgttgtctggttcaggaggacaggaagagagctccaaaactagcttgctgtccatcatcggctgaacaacatgatgtcagatggtgggttcagtcacagccaaattttgggatccagaaggatattgttagcaagcggttatgttcgttgggcagggacattcatgagaagcaagtggaagattcagtgccacaacctaaacatgaggaaacattactctgtcaagcagttgacaccagcactgaaaagattggagatgctttggagcctccatggatggtttcgccagccttcacgaagtattcccttgaaacaggcttagaagagatgaagactgttggtagctattctcaagtgtcgaagtgcatagaaactctcagcaattgtttgtacaaggataatgaattcccagattttgaatgtattgacccagcacctttgaagaacccagataaggctaattttgacatagatgcaccttggaaaggtgaaaagactcgaccatggtggcagattgctgacgaggaccagctggcttcactggttgcagaaagagcaacacagcacattgagaattgtgacctaccaaggcctacccagacagtacgcattaacaggacagaaccatatactcaaaaacatataggtgactttgggggaccttcatctcctgcaggaagagtgtcacaccctgttcctggacattgtgaccatatcgagtgtacctatagcacaggaagtacagatgagttggttctgttatatggtaatggagtttgggaacagcatggaagcagtgatacatatagtgtggttcaacatttttctagcagtagcacaaccggattggaaagcaaacaaacactccggaatggctctgagcgagacatgattttggaggcactccgccattcacaaactcgtgctagagaagctgatatggcggctaagaaggcgtacaatgagaaggacgacgtcatcaagcttttgctccgacaggcctcacatctctttgcgtgcaaccagtggctgaaaataatgcagctggagaatattgtcctgcagctcaagaacaaagagcatcagatagcagccatcatacctgaacttccatggttaaccctaaaagagaagcctacacagggtcaggggcagagagattggactaggaggaaaggtagaaggcagaagaaggcagccgggttcttcgacgcgatcttatttgctgttgggttgggtcttgctggagctgggtttcttcttggctggactcttgggtggcttctgccgaagttttaaagttgttggttatttttattttggggtacccagctaggcatgtattttgctgtgtaggatccagagggaaggccaagtgcactctgtgaaaatggtgtcaaatgatcaaatttgttagaccctagcatctgttcatttggaaacaatgatggcgcaatgagtaaatgaatggctgtccgcattccaccaagagcattttttctaaacattctgtttgttgtaaatatgtgtggtgaactgtattactttgatctgttaggttgtgtgaggtacctagatcaagctttataaaaaatgaggctgaggagaagagtctacgggctcggctatgagcagtaacttaaaagctcttttgtgggttttggtgtttggatgacaactcaattaaaggactaacaagtgtgctaagtgttgaacatgtgcttaatgcaaagctaacagggttcaacacaagtgaacaagtgatggtccaaagactgaattatctatagataatgaacactgcttaagtgagactcggtgtgcgtaacttagagacagccgatcaagccaaggatagaggcaagaagagcttcaaggtactgagtgcacgggagaaggtcaaggagaccaggaacccaaagccaggggtgaagaagaagacttgcaaagtcaaggttgatcgagttaagaagagttatggtgcatcaatgatcactacataaggacatgacttacaaccaatgaggtaacatctacagttatgtggtgtaagtcataaggctcaagatcaagctcgagaagtgaacaagcgagttagatctcagatatgccaatctagatcaagtcaagttgacttaatggtttagagtccaacatcgacctcaaacatgccaaattgggtaaaacgatgaaaaaggttaagtatgtaaggtttgagtgttcaaccatgttgcatacacctcttactacaagtttgg

SEQ ID NO: 38021 - DNA, 569 bp, Zea Mays
ctatggaaccaaccataaccgaatgtgtgttgatgtcatcaagatgggaggcaaggttagctgcatgatcacccatggcccatgggtactcattggaattccaaagtttgtggaggcatggaacacaaagacagggatgaaactaagatttcaagggccttctagtctggtttgttccatggctatcacggatgagatgctgtttgctggtactggagatggtcgcatcatggcctggagatttcctgctaaggaaagtaacactgaaccagtgttgatcctcagtggccatcaacggccagtgatttcactgtctatctcggcaagaagactttactctggctcactggacaagaccatcaaagcatgggaccttacaactcggcagtgtgtccaaacactctctgagcataaagctgctgtaacatctgtgctttgttgggatgagaagttattatcttgctcccttgacaagactgtaaaactctggactctgtcagagtcaggaaaccttcaagtcaaatatacccatgctgaggagaatccaagaaatatgattcataaatgca

SEQ ID NO: 38022 - DNA, 5400 bp, Zea Mays
atgctcccaaataattcttaccaagcaagcaccaccctccaggcgtccctccctcttcactgcttctagcatcgctgctaaaaatagtagtgaagggacacccaaacaaacgcaaccagcagcgttcacgacgacgatgcagggatatgccgagaccggggattctaccaatttgatcccctccgtctcgcgaccgccgtcctgcggtggtgctgccgctgcgtcgcgggtttgatgtcgccgctgtcaatctgattcttccgtcgcaatggcgtccaaaagccgctttgttgtgggctctcatgtctgggttgaggacccagatgaggcctggatggatggcttggtggaacagatcaatggggacgaacttgtcgtcaactgcacctctggaaagaaggtaactgctaatgtgtcaagtgcctaccccaaggataccgagtctccacgtggtggtgtggaggatatgacaaggctagcatatttacatgaaccaggagtgcttcaaaacctaaagtctagatttatgctaaatgaaatatatacttatactgggaatatcttgatagctgttaatccatttcaaagacttcctcacctatataacaacgatatgatgggcatttacaaaggagcagaatttggtgagctgagtccccatccattcgccatcgctgaccgttcgtatagacttatgatcaatgatcatataagccaagcaatattggtgagtggagagagtggagcagggaagaccgaaagcactaaaagtcttatgcaataccttgctttcatgggtggtaagcctcaagctgaaggaaggtcagtgcaacaacagatcctggagtccaacccggttcttgaggcatttggcaacgcaaaaaccgtcaggaacaataattcaagtcgttttggaaagtttgttgagattcagtttgatgcgaatgggaagatatcaggagctgctataaggacctatcttctagaaagatcacgtgtgtgccaaatatctgatccagaaagaaactaccactgcttttacatgctatgttctgcaccaccagaagattgcaaaaaatataaattgggagatcccagatcatttcactatctcaaccagtccaactgtattgcgcttgatgggctggatgactccaaagaatacacggaaaccagaagagctatgggtattgtgggtatgagtactgacgaacaggatgcaatatttagagttgtggctgctattcttcatctgggtaacatagaatttgcagaaggaagcgaagacgattcttcagtacccaaagacgagaaatcccaatttcatcttaagacagcagctgagcttttcatgtgtgatgaaaaaggtctcgaggaatctttgtgcaagcgtgtaatggcaacacgtggggagagtattacaaaaaatttagatccacgagctgcagctctgagtagagatgcattgtctaggattgtttattcacgtttgtttgattggattgtaaataaaatcaatagttcaattggtcaagatcctgattcaaagattttgattggtgtccttgacatttatggtttcgagagtttcttgacaaacagctttgagcaattttgtatcaatctaacgaacgagaagctccaacaacactttaatcagcatgtctttaagatggagcaggaagaatacaccaaagaagaaattgactggagttatatccagtttgtggacaaccaagaaattctggatctaattgagaagaaacctgggggaataattgctcttttggatgagacatgcatgttgcgaaattcaacgcatgagacatttgctgagaagttatatcaaaagtttaaagacaaccctcacttcagtaaacccaaattttcacggtctggcttcactgttcatcactatgctggcaatgtcacttatcaaacagacctgtttttagataaaaacatagattatgctgtaaatgaacatcaagttttgttaaatgcctcaaaatgttcatttgtgtcaagtctttttccaccgtgtgaagaatcaacaaaatccacaaaatttacttcaatcggctcaagtttcaagcaacaattgcagagtctgctagaaactctgagtgcaacagaaccacactatatccggtgcataaaaccaaataatgttctcaagccagcaatatttgagaacagtaatgttctccagcagcttcgttgtgggggagttttggaggcaataaggataagctgtctgggataccctactaggaggacattttatgaatttgttaatcgatttggtattctacaacccaaagtccttggtcgaagccatgatgaagttactgctgcaaaaatgcttcttgacaaagccaatcttgcaggctatcagattggaaagacgaaagtatttcttcgtgctggtcaaatggcagagttagatgctctaaggacagaagttttgggactttctgctaaaaaaatacaaagcaaacttcggtcatttctggctcgcaaaaaatatatcgagctgcaacaatgtgctacacaaatccaggcaatatgcaggggaacaactgcaagaaggcgttatgaaaaccttcgtagggatgtagcttcattgaaaatgcagacctgctaccgtatgcactatgcaaggaaaaactatgtagaaatctgttctgcgtcaactaatatccagtctggtttacgtggtatgggtgctcgcatcaaactccgcttgaagcggcaaacaaaagctgcagtgattattcagagtcgatgccgctgttatttagtacgttcacgatatgttaggctggtgaaggccacaattacggctcagtgcggttggagaagaagagtggccagaaaggaacttcgaaacctcaaaatggctgcaaaagagactggtgctctacaggctgccaaaagcaaactggagaaggaagttgaggagcttacatggcggctacagctggagaaacgtattagggctgatttggaagaagctaagtcacaagaaaataagaagctccaattacaattgcaggaattgcaattgcaactcaaagacacaaaggacctattgaaaagggaacatgaagctgccaaagaagcatcagagaaggctgctgcagtaccagagattcttgctgatacagctcaagtcaatgagcttactgctgaaaatgagaagctcaagtcattggtggcctcttttgaggaaaaacttcagaatgcagaacagaagttcgaagaaacagagaaagctagggaagaattagtcaagaaagcaacagatgcagagtcaaagataaatgaactgaagaacacaatgcaaagccttcaagaaaagttgactagcacggaggcagaaaaccatgttctcaggcagcaatctatgaaagcaagacctgataatatgcctttgcttaacatgcatcggaaatcaaatttggctaatggaagcctacattctgacgaacagacgcctcacggcactcctatggagtttggaaggagatccatcattgagagacataatgagagtgttgatgcattgataaattgtgttgttgaaaatgttggattcagtgaagggaagccggttgctgcaataaccatatacaaatgccttcttcattggagaatttttgagacggacaaaacaaatgtttttgatcgattgattcagatttttggttctgcaatgcagaaacaagataacaatgctgatcttgcatactggttatcaaattcatcatctctactgattatactacaaaagagcctcaaacctcctggttcatctgtaacaactccaatgaaaagaccacagactcagacatcattccttggaaggatgggatttcgtgcttcaagtattactgttgatatggatcttgtccgccaagttgaggccaagtatcctgctctcctttttaagcagcaacttacagcttttgtggaaggcttatatggaatgatccgagacaatgtgaagaaagaaatatcttcagtaatttcactagtcattcaggcaccaagaaatgcaaaagctggtttgatcacagatcaaggtagctattggcagacaatagtcaaacatttgaatgacctcttagaaattttgcaagaaaattgtgtaccgacagtttttgctcggaagatctttacacagattttctcattcatcaatgctcaactcttaaatagtcttctcgtgcgtcgggagtgctgttcctttagcaatggggaatatgtgaaacaagggttggacgaacttgagacttggtgcacagtggccaagccagagtacgcaggatcagcatgggatgaacttaagcacatatgccaggctgttggtttcctggtcattttcaaaaagttcaggatctcgtatgatgaaatcatcagtgatttgtgcccagtattgagtgtccagcaaatttacaaaatctgcactcagtactgggatgataaatataataccgagagtgtatctgaagaggtccttgatgagatgaaaaaagtggtgaacgagggatctggccaaggcacttcatcagacaatacatttttgctaaatgaggagataagcttgcctctatctctggaggagattgccaactctatggatgccaaggaatttcagaatgtgagtccaccgcaggaactccttgacaacgctgcattccagttcttgagaagctgaggatgagaaagacagggaggcaggcatagatagaagatacagatagatagaaatgcccggtgtcccccttagctaggtgctgtaaattcagatagttcggtcggtccatgtagccttttgaaatgaaattcttggccattctcgcttcacgtatgggccttgtaaatttagatagtgtgcgctgagcggaggagccagttcaccgacgtcgccaagccgtcgcggatccacccgtcgttgaccccatggacgctaaccccacgcccccatgggggaggaggaggaggccacatcgtacaagcagcagccggagaagatgtgtggcggccagaggaagaaggctgagtcagtgatcgcaacggagaagttatgtggagttctggcgttgtgtggcattgggctggggaattaaggagctcaacctgttggttagcgggttaggataggggatgtccatgtcaggtaaccgtttgaaaatttcctccttttcttctggtttatgctggtggtttgatttcgttggacctacatataggtggtgattttaattagttgatgttgttggatacatgtttactgtacttttgaagctttatcagtgggatttgcattgatgccctggtaaattgcagctgctcttaacgggaatgctgagagattttcgattgacaattccc

SEQ ID NO: 38023 - DNA, 2596 bp, Zea Mays
tctagtatcaatcaaaatattcgggaaggattgcttgaagtattctatggagtttatgaaaaggatcctgacaaagtgcttcaagcaatggttcaaatgggtgtccttgttcctactggagatatgactgttgtcagaagaaccgctcaatttttccttaatagctttcaagagtgcctaacagcacaaaggaaggagagagaaatggcaaccgcagaactgggtttcaaaaagcaattaactaaggaggagaagtttgaaaagaggaagcagagacttgctgcaatcggagaggatcttttggcgattgctgctgatcaaccatttcgcttccctgccacatttacatttgtggtcagagcattctcagttctagatggtactgggaaaggccttgatcctagaaatgccaaggaattgctaagatttaatgacgctggtgttgaaatagttgtgaaggagcggattgaaggggattggaggagcctattaagcattgaacaatttacccatgcttgtttcctattctttggtcgtgataacgtttgcaaccatgaatagtacatattgcttttccaggtgtgtggagagacatgtgtattcctcctatgacgaattccttaggctccatgaagtgtatcaatttgtcttagtatttttattcgtggggatgcctgactcaaatgaactcatgttcaacactgagcaacctacttataattttggagcctataaaatttctaagctaaaaaaggtaataaaaaggaatgatattatagtcacatcatctgaacaacagtgaagggaagggagggatagatggtctgaatgcctataaatgtcgttcccttggtctgcttcttaaatttgaaaccaagatactatagtcaaatacttctaaacttgaagcctgtaaattggaatcaccaagttaaataagaacaggggtaactattcatagctcagatggttgtcatccaatacgtgcgctaaggcacagacaggtgaggttgcatattcaatccccaagacagtaaaccattgaggcatattaaaacacattttccatgaggtttcctaagtgatcctttaggtaaacagaaccatacctagctccatatgaaactatttcccgatttgaagtacacctaagttaaggttcatacattggagctctggcagtaaaacaatagtccttaccttgagacagcttagattagaatgaggtggatggtaatatggcatgagcaacataccacagttcatgcatggaggaaatcatttttactttctttcctagccatggtagttgtgttgctccttaccaaggcactacatggagcatcatatggttcatgatgtaaacatggttttagatctgtctatactcacactcaagaaccagccaaaatgtgatattccacaacctgagagaaatcaaaatgaaatcatgtacaacatagtacatatgatgatgtgcggtgatgcgggtgcatgtgtgttgtgtgtgtaggagaggagggcgcagcttgattcaatccatgtcaagtcagaggctgctgcgaggtttgcacatgcaagtagaatttagatggtcctgcttcgctttcatgtggatttatcttgcaaatggtatgtggatccgttccagaggcaatgagccttgcagccagtttgcagtataaaaaacccaattatgtccactgttggttcgacgcagcgtgtgccgaggatttctactgccaagcataagaaagtgaattgcagataaatggtctgttcgcaactggtgctctcgggcgactccatcactgagcaacccttcgccccggtggctgcggtgtcgcactggctgacacctgctcgcagttgcattacaagttttactgactatgtattttcaggtttattcaatttcagttgtaatgcttctgacagcagttgtatcagtcctcttgttcagcttccataataatgtactaaacttcagtttggtgtctatctcagtgtacctacactcagttggaaaacttcaaccacactgcaacaaggtttataaaaggtttgctatgaggaaaaacaaatttatgggctcaaacaaagtgtgatagtgaaagtcattttgcttccagcttaagaaccaagccaagaaaacagatatcaactgtgacgccacactcaaaagcttgtttggtgagagggataaggttgggatgctggagatctctaagcttttgagccgtggcttcccgaaaatctccaagcttttgtggtccatggagccagggatggctctttggtaaaagacttcgttgtggatggcctcttttatggtccatgttaagtcccaagtcccactaggtggttaagcagaaaaatcttgtgatggcattaagactttcagactttgtttttgggtctgatgcatgtaaaaaggattcccagtgtttctgttgctcttgcgatcctgtgaggacacatatgagagaaatatttagtttgttgatggcaaatcttgtcttatgttcatgcctgtacctatctgatcaagcgttatgatatgatcccatgcgtggtactgtgttctttagagatg

SEQ ID NO: 38024 - DNA, 2232 bp, Zea Mays
ccgcgctcgccttgccgtcttcatctccccgccgacggaagcctgctcccagcaagccccagccgcgtctcgtctccctctcccttgtctccctcacacacgtttctctctccctcctcttcttccttgctgcgctccacctcgccccaggtgctcggccgctcatctccctgctgccgcgtccctgcgcccggccttcgtccccgtcgcgccgatccgcgctcgcccaggtcgcccgccgtcgcccagctcggtgccttccctgctcctccaagccggcgtcctctgccctcatcttcttcctcaggtccgaccggtgccctcattcccctggctggcgctcggcttcctcctcctgaagtccctccacgcgccgaatttcgagctccattcatggcacgctccgttccttctcctcgacctccctctgccctcttccatggtcggcgcccccttcagctccagctcggcctccagctcccgtgccacgcgccgtggagctccctgcgcgcgccctggcccctgctcggatttagccgtgccgagtcccatcttccaattcaataccataaagaagctccgttctactgcacttgcagtttactgtgttttagccggccgaggtccttcccatggcgcccctccctgctcccgtgcacgtgcccccctggtggtcggagctcgccaacgccagttgttcctccacacacacctcctgctcccctcgccatggcatggatgaccgctgtatctgctcctgtcgtgctcaagtcgtcacaggttggtgggttgtgcgcgcctagcggtaagttatctgctcctgtcggtaattttgcatcattaattattctgttaaggatctgaatttaggctagagtatcaggttcattttgtgggcatgtgatcaaatgcctactgtgctgacatatgctagtctggccccataattaatataccattacttttttgaatgctaattaggaccgcagcaggtctaatctggccccataattaatataccattactcaggaaatattttggagtaaatgcagagctaacttgaaatggttgttataacttaaaaattatataaatggtgaattgaacattattatgtgttctacagtagtctaatctgctgatgtgtcaatcaagcttattgtattaagttgtatatttactatctagctcattattctgctgttgttacatattgatatattgtttgttacatgcggagtttgaaggagtttaaaacacaagcaaccacattggcatcgcttcagcatcccaatttatgtaaactgatcggctattatgcaaaagaagattctaatgaaaggatgttggtctatgaacggctttatcatggaagcttagataagctactctttggaagatcagatggtcatttcatggactggtctaaacgtttgaaggttgccctgggtgctgccagaggtctagctttcttgcatgatgaaggaccctttcaggccatgtacaacgagttctcaactttgaacatccaaatagataaaggtttcactgctaagctttcaggatatggttgtgttggcttcaataccgaggagatatctaatgcacctgtgcaaaccattcggtggagaccttggagaagggtttactcactcagtttgtctattgctgcaacaagtcggggctggaccgttccaaagtaaatgtaaatggaggcacgattgcccttggacaccctttgggtgcaacaggtgcccggtgcgtggctactcttctaaatgaaatgaagtgccggggcagagactgcagatttggtgttgtcaccatgtgtatcggatctggaatgggggcagcagctgtgttcgagctatgttcggcccggctggaggtatcgaccatcactcgtcactgtaacccgatggtgatcgacgaccgtgagcttccatgttattgcgttctgatacttgagacttttattataactatgtatgagatattgtctcttattagtactggatgatgagatgtgtcttattatgactatggatgagacttttgtgatgtaattgatgagactatggatgagacttttgtgatgtaattgatgagactatgaatttaaatattgttatgtgattgtgtgtgagatgtgttatgtgaaaatatgttgtgttatatagctgttgatatatttgttatgttgtggaatgtggtgtaaaataaaaataaaa

SEQ ID NO: 38025 - DNA, 532 bp, Zea Mays
cgcgcgtgcccgcggctgcgccccgcgcggcctgcagacaggggggccgccaccagcgccgtcgtcgtgccgtgccgcggtgccccccgacggcccgcgccacaaggttgtcggccggcccccacggctagcacaaagccgccgtcgcgcgtccaccggtccgagagaaggatccatccatccatgatccatgcatgcgtcgatcgtcgacggacggagacagcttttcgcctttgtttttgatgaggcgtgccgcgtgcgtgcatgcatgggtcagcgacgaccccggccggccgccgacgtcacccgacgtgacgtgacgtggcgtggcgtcgacgacctcagctgtcagctcgtcgcctctggccgcgcgggaaccggacaccggatctccggggcgacggtctctgctcgtgcactgtcttgctgctcgttggttttgcagctacatagacggccggccggcggggaaacggaagtctcgaacgcgtgaaatgagtcggctcggctagaccatccaattatatatgtg

SEQ ID NO: 38026 - DNA, 2892 bp, Zea Mays
aaaagcagagccgtctgcgttgccgctaacaaggccgccgccgatggacgccttcgtcgccggttcgcgcggccgcccagccctcagcttcctttgccctaagatatcgctattctccccgccctcgcactcctggttccgctggctcgtcggtgcgcctcgcgttctccctcccttcaccgtcgctgctgtcttacgtcccattcacggcgaccatgacgccattgatcttcccagggaagcagacgaaatccgggggttgctgccacgcggtttcgacatcataggggtgctgctcgtggggggagagggttctgatgcggacgtcactcgcgcactggagcaggctcgggcgctgagggagctgctgtttggtgtggcagcgagccatggcttggtaggaggccacatggatgcagccactggggagattcgatttgttgtatctgagagtggatggacgaactcggtggaaggatctgtggttacatgggaggatgagcccgggaggttgttgtgggagaagggatgcctcctgcgctgcgaactgctgctgaagcttccactctatcttaggcctgacgtgaattctgttgtaattagcgaagaacaaagaagaacaaagaacagtggtgagagctgtctccctgagtcaccaggtcgtggagcagcctctttgcatttgcggagggagggtgtggcttgcctcggttaatcctttccctagatgggagcttccgccattgggtctgcccttttcttttttcttttttaaattagcgaagaacaaaaaggtttgaccatgcataatcatgtctaactgcactagttgtttataaaatctgtttttttgctctttttatgatatataagcaattgcgtctggtagttaggagccaactatttgcttcttacgtgaatgagataactttgttacgtttaattttttgaaggcatcgaaggacagttttcttcacttattgaatctacagttgctaaactcagagatcctcatgtatattatttagttgaggggccaattacatctagtcaatcacatcgttctattatcttgcgtggcgatgatttaagctttgattcacatacacatggaaactcaagaacagacagttgtaccacaagtattgtaacttgttcagaattcttcacagaaaagaggtatgacctctcattgacaagagagactgcagatgcaattgcaataactgtcaaccaatcagcgcctagcttgaagcctggcggtacccctgtggtagagtattttcctgcctcagcacctgccagcctcatagtaatcaccttgaagcttgacatactatgctactcatcaatagactttccagtggcggctgctgtatctgaacttgttattccaggattagcagatcagatgattgtaatgaagagaattattgcttcagagataactcaacaagcacagcttcaaccattccattttattccttctggttggcatgttccagtaacagctatatacaatacaagatatggtgagactgaggagaggcaaagtgagctgcgaaaagaactgcatttaaggctaggacttcccttagatcggcctttgttgcgaatttctaatgcattgactttcggtggcatgggaaggaggaagaaaagcatgccaagaagtggtattcaccatgcatatgttgcgacatatgcttcattactctgttttccccctaaattacatgtgggatcttgtggtaactttgtgcaaaaaatgtttcaaagtataatatatataagaactgcaaaatatcatattatactatgtgagaagttaataacttcatctaacatgaagataagaacttatctttgtatatgtaattcctcaggaagtagaatttgttttcatccattgtggtatgttatcacattcaggttcttcgctgcttcgagacatccacagagaacttccatctagtggtgtatccggaggtgttatgtctttgattgatggttcatatgagtattatcattatcttcacgatggtattgatgacaatggatggggatgcgcatatcggtctctacaaacaattgtctcttggtacagattgcaacaatattcatcaatagatgttccttctcacagggagattcagcaagttcttgttgaaattggtgacaaggatccatcatttattggatcttgtgagtggatcggagccattgagttaagctttgtcctcgacaaactgctgggcgtgagttgtaaggttatcaatgtgaggtctggcgatgagcttcctgaaaagtgcagagaacttgccaggcattttgaaacccagggaactcctgtgatgattggtggtggagtcttggcttacacccttttgggagttgattataacggagccagtggagactgtgcatttcttatccttgatccgcactacactggtactgacgatctcaaaaagattgtaaatggcggatggtgcggatggaagaagtctgtcgacagcaaaggccgaagcttcttcttgaaagacaagttctacaaccttctactaccccaaaggccaaacatggtgtgaaacctatattgttcaatatgttaatagtgcagacgtgcaggttcacgaggcacagatatttatgcttgtgatagaggtttatggttgcgatagcagaagttatgatttgtaaaaaaaatttagtgagacattatattgtttttttaataaatttgtagtgagtaaattaaattaaattaacgaatgagagttttacaggcataacactaaaagcagacgttttgcttgagacgtcatgcttaacatgtggagtctgtgtatttggtaaactaagggtctgtctgtatccattggcactgaa

SEQ ID NO: 38027 - DNA, 939 bp, Zea Mays
cccaaacggaagcggcacgattcatcgtgttcaaaacgggggcgaggccccagtcgtcgatgccgatcgagctggcagaggcgatcgaggctaaggtggtgtgtggtactggtagctagcgaaagcaatggcgaccgacctggcgaagggggggagtacccgtgtctgtgtgtgtgtgtgtggtggctccggccaccggggggacgtactgctccagcacaagatctctctggccaattctttaaagcgtcgggggagcggcatgtgcgcggcgagtacttgtgtccgcgcgaggccccatggctccggtgcacggttgcggtaagatacaaagcggcgacaggcgccgtgctgcgtaactgcgacccgctgcctgcctgcctgccagccagcgcgccctgcgctccaccgcgccgcgcggcatgctcgcccgcctgcccggccctcccgcgctccattggccgtcgccagcggccaaagtgctcggccctcggcccggcagcggcagctcgatccgtgcgccgccacctgccgcgacgcccggcgccgaggccgatccgtcccagtctctccagcgagccccgtcagctgccagagctccgtcctgttttctttggcgaaaccagcactcacattcaaagaccgatgatcgatatttttacaccgaataccgatgtaccacccctcgcggcctcacctcacctcacgccccccacatctcacgggtagcgcccgacttcaaaattgcatgttgcgtttgcagccttgcaggaagtggtaagcatctttcgttatgcccgctactacagctgagaacatactcctgcagccgctccgctgctgtacctgtactatgcccatacccatctatctgacatcttgttggtgaggggaatatatacatactatggtgatgtgtgcatatttatatatggtgac

SEQ ID NO: 38028 - DNA, 394 bp, Zea Mays
tccacatgaagtaactaacccaaagataagggaataaaacttctcctacaaaaacaacaagggataaaactctgagtacgcaattactcagcaagacttacccgactaaagaaaagactctcaagggtatgctggcttttgggaatcaaggtaaagctcatcaattatcaatgactcctttttgcataaaagcttactaataatggatccttaagccaagttttatttcacaagttaggttattacctgaatctactaacctgtctctagattttcctaatctagatcattcacttggcctacactagattgcttttaaccaaagctttgttatacttgttatctacgatgcagagcagtgatccagtcttcatgaccgagaagtaacggcgat

SEQ ID NO: 38029 - DNA, 2315 bp, Zea Mays
tgtacaaatttctggatgatagaacccaggaatcaagactataagagttgccgacgtgaaaaaggttatagagagtatacaagagcaggcttcctatcctgctgaccaacaagtgcttatacaccaggggaaggtgctcaaggacgacacaacattggaggaaaaccaagtagttgaaaataattttcttgttataatgctcagacaggtaggctacttgtttattattctggttgacacatgggcacatgacaaatcacgggtgtatgacttggtatgataataaaattattactgagatatgaataactgataacattaactgaataactgtcatagtgcattggattatttgaaagaatttgtgcttcaatttctatggctagcttattagcagtattttatatatggatgcaaaggctgctgtgaatttggaatgtctacgatagcatcagaaatgttctatatatcttatcaattgtaacctttcacagaacaagggatcatcaagtgcagcaccagctaaggtaaccgcgaatcaggcaccctctactcagacagtgcctgctactccacctcaaacgtcagcagccccagatgcaccggcacctattgtacctgtcagtgcaccggctgcaactgctacagcctcagcagctcctgctgttgctgtctccactgaggcggatagttatggtcaggctacctcaaacctagttgctggcagcaacttggaaggaacaattaaatccattcttgaaatgggtggcgggacatgggatagagacactgtactacgtgctctgcgggctgcgtacaacaatccagagcgtgctgttgagtacttatattctgtaagaatgattctttgtcctcgttactttctaggccttacatgcgatgaactttcagcgatttatgtgtgcccaggtacgtttaactagtgaacacatctattatataaagtagattgaagctgcatgcacatatgtttggtttgaatatttcgtgaccttagaagtgaattgccgttttcaacctgcaacatgaggatacaattttgttttacaattgtagacactaatgtccttcatcttctgtttaggggattcctgaacaaatggaggttcctgcaccgcctccgagttcccaaccagtcgaccctgttcaggcggtacaaccagctcaagctggaccaaatgctaaccctctcgacctctttccccaagaaatcttgatgttttgcgtaataactcacagttccaaaacctacttggtttggttcaggctaaccctcaaattttgcagccattgcttcaagaattgaggaaacaaaatccccgggttatgcagctaatccaggaaaaccaagcagagtttatgcggttgattagtgagccactagagggagacgaagagaatgaaatgatgctggatcagatggcagatgcaactgagaccattgcagtcactccagaggagaatgaagctatacttcgtcttgaagggatgggctttgaccgggcactcgtcctggaagtgttcttcgcctgcaacaagaacgagcagctggccgccaactacctcttggatcacatgcacgagttcgacaacgatgacgggctcggagggcctccattgtgatgcgatgcgaaggctgtggacagaaaataggaaaacgttttgggatttgtctcgtctgtccgctccgctccccctacatttctttgctgtttagtacataattctagatttacagaaaagacaaagtttactcttttctggatcatatgttttgtgctacttattgctgttctggccgcattgggccagcatgcagttattcacgggttcaacctgacaagcgctggctgcagcagcgaggtgtttgtaggtttcgcggtgattcgtctacccaaatctggaaccgtactgatactgaagaccgtactgatactgaaggcattatccggcgtaaactgttaattcaaacattattacacgaatgcataaggctgagcacggcttttgggcttgaactcgttagactgccaccaaatagcaaatcatgcatatggtcgcatgaatcaacggtttgtactgtatactttttacacagtggacttttggactattcgtacagtaaagtttaaaattcgcactatagattgtacttttcatgtagtggaaattttggactatttatacagtacattttgaaatgggaatgagtaagctggagtatagccttatacggcctgtttggtttgtgacattaaagcgatctacgactaatgctgtttggttaatgtcgg

SEQ ID NO: 38030 - DNA, 1396 bp, Zea Mays
atggtaaaaccgccactccctaggcgacgcacggcgtgcgtgacgggcgccggcgggtacatcgcctcgtggctcgtcaagctcctcctctcccgtggctacaccgtccacggcaccgtccgcgacctcagtgacaataaaaccgctcatctgaagcggttagagaatgcttccgaaaacctcaagcttttcaaggctgatgtccttgactacgacgctatggcgggtgcagtcgcagggtgccagggagtctttcatgtcgccactcctgtgccttcagggaagatcaccgatccagagcgagagatgctgggtcctgctgttaccggcaccataaacgcactcaaggctgcgtctgctgcaaatgctcgtcgagtggtcgtcgtttcatccatggttgccgttgagatcaacccgaaagactggcccagagacaagatcaaagatgagaactgctggtcagataaagagttctgcaggaacgaagagaactggtattctgtcgccaagatctcgtcagaagaggccgcacttgaatacgcgaagcagaccgggctggatgttgtgacggtcaatccagctgtggtctttggccctcttctgcagccgacgctcaacacgagctgccagttcctcgtctacttcctgaaaggaggacctgatcgaatgagggacaagctttggcacatcgtcgacgtcagggacactgccgatgctctcctgcttgtgtacgagacaccacaagcctccggcaggcacatctgcgctcctcatttcatcagcgcgcgtgacctgctggagctgctgaagacgatgtaccctgatgattaccctttcattagcaaggagagcatctacgacatggagcacccagctccaatgacgtccgacaagctcaagaaactgggatggaaggtcaggccgctgaaggaaacaattgcggaaaccgttgagttctgccagcatgctgggtttctcgaggacgtggagggattccgttttcctcccctgtacaacataatctagtttacaataacgtcagtagtgtaagagcaactccaacggaatccgtaaaatttacacaaaaactttgatttggaggctctctaaaataaatagctcgctggaaagcaagctctgatagatccgtcatttatcgctgttttttttttaatcccgcggcaaggaagatgcaggttctgtttgattgccctagaccagctaggtatggctaggccaggatcctgttcgtttcccaataaagctttatttaggtaatctagtattaacccaatccacttgttgagctggattaggtgtaaattagcttaagcacctcaatacgtacctatgtattgagctcaatactacaatttcagcaacgagcgccaagagc

SEQ ID NO: 38031 - DNA, 3124 bp, Zea Mays
gcagaaccaagcgaagcatggtgaggcagctgccacacatccgaaaagggcgtagcgccagcgacgtgagccgagtggagatcagatgcaattaaccgcggctggagatcgatgagggggaaggattagtgttggtgcgcggcgagggatttcgtcgaacactttggcagcggggcacgcggcctgccgcagatcttgctggtcactgttcccgcgatcgactggaaaggtgtgctagtacattttgtgggcctatgtggtctgttgaaagagaggggaggagacaacacaaccctcgcccctcgtcttcattcgctcgtccgatcaggaaggacggtggatgaaaaagcgccctgcacgcctgaacaatcggcattattgttcactatctccttttgttttccctctcccgttcatctctctcctctttggccttcctttccttgcgacgacgactgggacgagcgccccccgcgcttctgcaggcgagcaccccgccaccagtcggagatgaacgcgtccaggaaatccagccatctctccagcaaggacagtgcagagaccgcgagggatatcatcaccacgtccggccaaatccaacccctcaaaatcccggacgctgttgctgcgctcgcacaggctgctgcaaaggcaaatggtgagaccgagaaatatcttccagggtggccgttgttctcgcctcctaaggtgcagttggacaagtgtaccaagtgctccagagaattctgttctgcaatcaacttccggaggcacacacgtgttcatcgtagatccctcaagatagatagggattttccaaagaatagagaccttctcgctgcattctggaataaactcactgtggatgatgccagcaaaattttgtccttgacaggtgttgttattgagggtgtaactggttcatcaattttgacagcactgtcatcatggatgtgtaaaccagggtatgcttcgttgccagttgcatatgccagagctggcagtgagcttctggatctaattcaagcaaagccttcaatgcatctgcctgtttcatcggatgaactatttagtttgctcgatgaagcaagtgaaaaaacatttctttgcacaaatacagctgcttgtatacagaagtttttatttgatggagaggtagaaaaaattgcaactgagttgaaaaatgttgtttcgtgcgctagttacatgcttgaacaaaagctgcttgaagcatggtgtgctgataagactgctgaagcattaagatgccagaagttgctggaggatgaagaggaagctgctcagaaaaggcaagccgaactgatggaaaggaagcggatgaagaaacttaggcagaaagaacagaggttaaaaaacctcaaggatgaggatgcgacagttcagtcacctgaaatcatggatgatgcgacatgttctactgccattcaaagtgtgaattccatttatgatcctgactgttttgagcaagaagaatcgcagtatcttcaatttccagcactaattactttggaaactgacaatgattttaatgtggacctaccagtagaagatatcagttgtgatttggggcctgaaatggataaaggtgttgtattaaggcaacaagttgtttcaaggcatcatttaggcagaacggagaagcttgctgaaagtagcattttatctggttccgtagttacttcaaagcatgcagctttagcaaggccttcaaattacaaggatccaaatgtctgttctgcaccaagtagaaacaaaacttgtgaattgaaactacggtctgagattgaagaacagtgccaaaaacatgagttagatgtagatgaacgtggcattggtcctagcaaaaactctcgtgtgctaataggatctataattgtcgcaattaaagattgtagtgaacacttgctggacttaggttccaagaatgacccagtacctcccaatgtaaagacaaagaaacatgcatcagtcaaggtggtgcaacaagttacccatgagggaaacagaaatgaaggtgttcctgatagtgataaccgttctagcctcagtgttactacagatgaaatcagttattcaacctgctgcgatgcagatttggcagtggatgaacatttacaatgcaccacgttttccagtgaagaagcgacagcctttctttctcaaagtaaacatcttgccgctattattttcgaacttccatgaagcgtggttaaccaataaattctcctccacttaagcgagttcatttcactatattaacttgacctagcagttctttctttctttacttttttttaaagaatacaagtaacgatctgtctatgctacatgagagtctgaggaaaagaaagcaagtactcaaattaactgatgccattcaaaaagtagacagcattactttggcatattatgtttggcactagagtaaaataattattcatatctttttaatcaggaatttttattgtggttcttccatatttagctcagtagtgaagcttggttgtattttgcaggatggaaagaagcaatagccgccgatcacgtgaaacttgttgtgtcctgaaaactaaaggaatggcagaataaagaaattctgttgagggcaacagcatggaagctccggccgacttgtcgccggatcccacagccctacaacataggtggttcttatctagcctgcagggtgctatgaaagtttggatgtcaagtttgtgttgcggcatgaatggttgtaaaatggcaggtgcattttgcagctgatttgagattgaagcagagggttctagttttacaaggggacagcttgtgtgatgggatctgtttttggtaaggaaaaaaaagagtgatttgaataatggtttggtcgcacaagttcctaatcttttgtactcgttagagtctgctaaacacgaaatgcatgtgtgttgaacatgttgtgcttgcgggttgcggctttcatattgtcccagttctttctgctgtcagttcacgtaactcgcgttcattttgtatcgcttcgtgctgtataacccgtactatttgcaatctattctggaagtctgcagaaactaagtaatttatagattgaactatttgatga

SEQ ID NO: 38032 - DNA, 380 bp, Zea Mays
cttcacacctgtgtctctgcctccactcctctcccttcccttcgcgtctcttcttcccccttccacttcttggccgagcccctcttggtctcggcatcctgctcgatcgaagaatgctggatcaggcatattggaggttgcagtaaaggcggtaggtgcttttcttcttccccgttggtggctagagggactggccggggagaactacaacatattggaggctgcaagttctcgggaggagccgggcttctcttgcggcggcaaacatgaggaagctcttcttcgtctacttcgtcctcctgctggccgctgcagtagttcacggtgaagatgccaaggggaaaggaatgctgtatacataaacacttgcccactcggta

SEQ ID NO: 38033 - DNA, 1504 bp, Zea Mays
gccgcaatccgcaactctgcacttggggttgggctcaaccgaatcgcccccgcgccaggccgttctcgtcgacgccgccgaccaataaggagcctcgcacgccacgccaccaccgccgccgcaacccacgcgatggcgccaccggactccatctccacgtgctcctcccttcccctcgccgctgcgcccatgtccgaaccgacccccttccccttcgctgcgtcgccgcttccaaacccgctcgtagccaccgcctccttcctacagcaccacctctcccgtttggcttcccacctgaacgtcccgcgccccgccctcgctgccgcggctgcgcgcacgccgggcccccagggcgcctccctatctctctctctcgcgcccgatgaggtcgcgcgcgctcttaccggcactcccgtcttcactgtctgcaactccagcaacgagttcgtgcttgtctccgaccctgccaccggcctccgctccctcggcctcctctgcttccgttcggaggacgccgacgccctcctgtcgcatgtgaggacgcggcaaccggtgctaggcaagggggcaaaagtggtgcctattacacttgatcaggtctatatgttaaaggctgaaggtatcgcatttaggttcttacccgaccctcttcaaataaagaatgcactggagatgaaatcgggcttaactgcttttgatggtgttcctgtttttcagtgctgtgcagtcagatctgctggttgtgaagaagcagaagaagcgctactgtccagtatattttcaaaaggaagacatagaaagagaacttacaagggcttccaaaggttcaagagggtcagccttatctaagaaaattatggttggaagtttggaggatgtcctgaagaaaatggagataaatgaaagagattctggctgggatgatttgatctttataccccctgggaagagcctcaaccaacatatcaatgaggtatcagcatgattttgttccacggtgatagctcagagtttgaacagactattcactttaaatgctatgatggtcagccaaacgaaatatcaaattgctgcctgagcttttcctttggatagctattttcatggtcagctttgtcagggaaaattaactaaagtgatagaatatggctgtgaaacaattttcttgttgcttcgattcacaaaattaacacaggttacacaagaagatttgatgaagagtaagttgcgacattggtaaatcaccttgcaatatagtttcatgaaaggggttatacaatagaaaaagagacgaatgtttatggccctattcggatgcatagtatataccatgattttttaaatattttggttttcgaatgctaaggtgtttggacgtcacaaccttgtagttttgaaaaccatgcttttgctaaaactatagtcgtcttgtttttttagaagcttagcttcgtgcttaaactgttgtgtttgtaacctccgtttttggtatgagtgatatatt

SEQ ID NO: 38034 - DNA, 1872 bp, Zea Mays
ctcgcccccgcccgccactcaagcactcccttcccctgaactaactccctcccgcctcacgcccacaaaaaatttctccgcttcccgccctcctccccaatggcctcgccggcgaagcgtgccaagccctcgtcgccggccaagccctcgagttcgccgcctcaggaagaggcgaccgccgccgccgtctctgaggaccccgtcgtcctcctccgccgccgctgggaacttgcatccgtgctccactttctcaggggaatacctccagttaacaaacatctaaaagatgaggatggatggattattgtaactgccaaaaagctaacagattggtggtcgtgggttgctgaaggagcaaaccctttcagaaataattcagggaaagaagtcgagatgtataagcagcaagatccaatcaagcggttgttgatactaaaagcgctttgtgaagtccgatctgagcaagatgatgcggtgtggtatgttaatgatgaaatgaagaaaggaactcatatttccaactttcggaaagataaactaggcagtggcagtagtgggactacatactggtatgacggtgattcaactattggccatagattatacacagaagacgtaacagttaattttaagcagaattggatgggaaagggtggccgtttgacaaaaccagttaccaatatttactgggaaacagttgcaactaaccttgacgagtttcttgaaatatcagagaagttatccagaaagggtcgtgctgaatctgctattgcagattatcttaagacagaagttattccagctgtggagaattttcaaaagaaaaaagagagacgtttaaaacggcaggagaagaaggacaaacttttagcttttactaacacattccaaacccgttcattgcgggaacgtcggcctgtcagctacaattactctgattttgatcgttccattgaggaggcgataagagctgtacagaaaggaaaagtacaaggttcacgtgaggcaggaacagaagagaaacctgcttcacatcatggagacaaaggtgccgatggaagatctgacatcaattctgaaaacaacaaaaatggaggacaggaggatgccaagtacctaagtgacctgagctctggcgatgaggaagacggagactacagtgacaggggtgtcagctccgctgacagtgacggagacaataatgcttctgattcctacaagagcgacatggaggaggatgtgtctgtaccacgcaagagaacccgtcttgctgcccgtttggcaaatgacaagcctcggccagggcttcgtcggagccaacgaaacatgaagaatgatgaagagactatgcatccaggtcaggtcacccctccaccaatggcgaagaaaacactgaggcaaaggcccacgcctgtctccaagcagcctgacattactttctcgagctctgaagatgatcttgcacaggttgttgcagactcagaggatgaaagtgggtaatttggcagaggttcggttgcatgcggtattttggattttgccttgtgggagccggttgaattccacaggtttagcgtcactaggcacttccatagtttcacttctaccggctggccggaatcagacgcagacagcaccggcgttttccccatatccgatgtgttatcttcacgaagtcattgggacacctctgacccacttgtatggtgatttgtacatatgcatttagacactatactgcgatgcatcaccactggagcacccaaaaatcttgctgatgaaatgcttctgatgtgaactatgttatccatgcattcgaagagaaatggtgcttatgtttgctttagacagcttgcctctctaagactctaa

SEQ ID NO: 38035 - DNA, 1569 bp, Zea Mays
aaaaatacacggagcctgcacgcgtgtttctccacatgccctctccttctcggatcctctaccgtaatctcccggcgacgccgccgccatgtcttcccagtcttctgcaggaggtccggcgatccatcatccccactccaactaccacccgtacatctttcagcatgaccctccgctccactctaattcccgccgtcgccgccgtaaccatgatgacccatatcaaccctatctgcctctaccccacgctcactcccacggagccactgccgtcgttaccggcaccgttcgttgccatgtcccccgggatccacttgtgctctcacacctccaggagcgcctctttccgactctccctcaacatcacccgatcgcgggtccacccccgacgaagcgggcccgccgcgcgccagatactccgtgggatccgccgccgccaacgctgcagccggcacttgtcccggtggcgctagagaggcctccggatgtaggacattctgccggggcgttgctttcgcgtgacgagatcgagaggcggtctccatcaagaagggacgggatcgattccgcgcttgaggccaggctgcgtgcgtcctactgcgcctacctgcattgcctcggcaaccggctcgggttgccgcagacaacaattgcgacggctgtggtgttctgccatcggttcttcttccacagatctcatgcctgccatgatagatttttggttgcgactgcagccttgttcctggcagcaaaggcagaagaaacagcatgccttttgaatactgttcttagggcttcatgtgaggtttctcaaaatcaggaattcaatcttcttccttacatgctatgtggtcaggactggtttgaacagtacagagagagtgtaatacaagcggagcaaatgatacttacaacacttgattttgaactcgaagtagcccacccatatgcttccctatcctctgctttgggcaaactaggactcacacatactgttctgtttaatgtggcttggaatctgatcaatgaagggctacgaagttcactttggcttcagttcaagccccatcatattgctgctggagctgcattccttgctgcaaagttcctccactatgacatcacattccatccaaatttctggcatgaattcaagacaagtccatatattgttcaagatgttgtccagcagttgaaggagctactttaggatacaacattcaatgtatttacataatactcagagatcctcttggtttatacgctgtagtttttacaaccacagtgctatgtacaaaaggggaagatgttattcaaaagttgcccttttagttttggggaggtaaaagcaaacaatctttagaagagatgtgacgaacaacaagagataaaaaaggcaaaaaggtgtaagagatgtaaaaagttgatgaaatgttggatcccttaattggttgtccggttgtgattatctgatatatatagaggatggtttatcccaacaataaacgagtcgaaatcgtaaccttcacattatctttagtccaaaattgatttaaaaaccgatctaga

SEQ ID NO: 38036 - DNA, 1226 bp, Zea Mays
acaaaacgtgcctttcctcatagcccaagcccaccgtcagcacgcttacactcgctcgtttcccaacgcgcacccaacatggccgctccgaccgccgccgtcgacactgccgccccgcctcctcctccctcggcagaggccgcggctgcacctgtactggatcaaaaggtctctcctgctgctgcccctcagcccgatgcgcccgcgcccgcgcccgcgccgaagaagcggaagctcgaggaagcggggttccacacctccgaatactacaagatccgtgccgtcgtcgccgatctgcgtgttcgcttcgttcacgaagctactgatttccgcaacacggatgctgcacgtgagattatgagagaaataaatgtggtaatggatctatccaagaaaatgaggctcaagcttggtgctacttctgaacctgtgaaaccattggagaagccttcagttggacttgtgaaggatgagcttgtgaaaccatcagagaagccttcatctggacctgtgacgggggaacctgtaaagccaccggagaagccttcagctggacctgtgaaggacgagcctatgaaaccatcggagaagccttctgctgaacctgtgaagaacgaacccagtgagccagctctagctggagaaaacaatcgagctcccagggtaagccagactacaagttctccaaataatgcaggtattgatgcaccagtagtcaagcatgataactcagaggcacggaagtgaagacgatagaggaagcccaaagtaccgatccatcgagatagcatatcacgcaaatctgctggacaaaaatgcagagtgaccggttgattccataggggctcagatttttcttgcccctatcgggggtaaaattattcgctttgggctaatggacgaagagtcgtggacacatcgagatccaaactagattgtcttcagttgttcatatccattcattcagtactatgttgctaatttcccatgaacaattttatcttcaaatagctactctctaactgcatcattctatacatcacattggcctgcagcctgctgtatgaagttaattgccagtcaatttcaagtcgtgcttgagaagaggtgatggaattgcaagcgagttgtaaggctttctggctcacctcacatttcaaacttcattctatgtgcagtccatggtgtaaaacagtattttgcacaaccatataactctactggag

SEQ ID NO: 38037 - DNA, 1449 bp, Zea Mays
ctggaattgcgcggccaagagcgaggcaaggggaggatgtcggaggcaggcagaaccgtgcgccaggccaatgtgcccacagctcaggaatccccacagctcacacaggcacacagctcctcttggcggcgcctctgacttctcctttttcgtcgcccttctcctttttcgtcgccttcgatcggcggccgcctccttcctccacttccgtcccttcaccgagccgccgccgccactatgaagggacccggcctcttctccgacatcggcaagaaggccaaggatctactcagtaaggactacacttacgaccagaagctgaccatctccaccgccagcgcctctggactgctgtgaagaaaggagggctttattctcttgatgtcagttcagtttacaagtacaagaataccactgttgatgttaaagtggacactgaatcaaatatctctactacattgaccgtgttggacgccttgccatgcacaaagcttgtcacttctgtgaagctgcctgactacaattatggaaaggtggagctgcaatacttccatgagaatgcaacttttgccactgttgttggcacgaagccttctccagtgattgatctttctgggacagtaggtgctcaaggagttgcatttggtgcagaagctgggtatgacactgctacgggaaaatttaccaagtacactgctgcaattggtgtaaccaagccagactaccatgctgcattcattctggcggacaaaggtgacaccattaaagtgtcaggtgtttatcacctggatgagaaacagaaggcctcagctgtggctgagctaacccggaggctttcaacaaatcagaacacactcacagttggtggactgtacacagttgattctcagacagccgtgaaggcaaggctcaacaacaatggaacgcttgccgcgcttcttcagcacgagcttaaacccaagtcactcttgacgatctctggtgaattcgacaccaaggctctggacagaccccccaagtttggcttggcgcttgcgctgaagccctgatcagatcaccccgcagcgattgttggtgaattttgaattctttggttgtttttcgcaaagctgtagccaataatccgttccacgaaccttttctgttattctggcaaacgtttggagcactgtggcttagatccggatgggtcgtctacaggaattttacctgcctgcttttattgttggaagcatctggccgtcggtagatgtacactgtgctcgcttctttagcacctaggcctctgccactgtgttactgagtagacgctacggtaatcttttgcatgcaggattagcatgctaattttgtgcggtgtttgatttaccgctctttacggtctaccacttgtttggagctcatttcttctgcgcatatgcatatatggtggtgttgctttgttgggag

SEQ ID NO: 38038 - DNA, 3733 bp, Zea Mays
ctcaggcgtaagcgtactaaaactgaagtgaggaagacggagctggagagaaacggcagtcacgccctccatatgcttgttgggtgcggctgcggcacacacaagcaacgacagctgctgaaagcgagcgagcccgcggccaccactgccactcacgcacacacaccacctccgcacccggcacaccacatgcctcgccgaccatcgcgcactgctcctccttgctagctcttcccagtagcaagcgaccgcgcgcgcatgccgtgaccgtctccggcgtgccgggcggccgcgctctcggcttgaggtgggtgacccaaaaaaaaaagccttcgccttttccggttcccgcggcgggttcttgatccaggcagcggaggttgttgttgataataatggcgcaccaccggcgtgcccggctcttctctgcggctgtggtcgtcgccgccgcgctcgtggcgctgtcggtcgggacggcccagccggccgcggcgctgtcgccggacggcaaggcgctgctgtcgctgctgcccggcgcggcgccgtcgcccgtgctgccgtcgtgggaccccagggccgcgacgccgtgctcgtggcagggggtcacgtgctcgccgcagagccgggtggtgtccctctcgctgcccgacaccttcctcaacctgtcctcgctgccgccggccctcgccacgctctcctcgctgcagctgctcaacctctccgcctgcaacgtctccggcgccatcccgccctcgtacgcgtcgctctccgcgctgcgggtcctcgacctctcctccaacgcgctcaccggcgacatccccgacgggctcggcgcgctctcggggctccagttcctgctcctcaactccaaccgtctcaccggcggcatcccgcgctcgctcgccaacctctccgcgctccaggtgctctgcgtccaggacaacctcctcaacggcaccataccggcctcgctgggcgcgctcgccgcgctccagcagttccgcgtcggcggcaacccggcgctgtcgggccccatcccggcctcgctcggcgcgctctccaacctcaccgtcttcggcgccgcggtcaccgcgctctccggtcccatccccgaggagttcggcagcctcgtcaacctccagacgctggcattgtacgacaccagcgtgtccgggtctatacccgccgcgctcggcggctgcgtcgagctgcgcaacctctaccttcacatgaacaagctcaccggcccgataccgccggagctcgggaggctgcagaagctcaccagtctgctcctctggggcaacgccctctccgggaagatcccgccggagctatccaactgctccgcattggtggtgctcgacctgtcgggcaaccggcttaccggcgaggtgcccggggcgctcggccggctcggcgcgctcgagcagctgcacctatcggacaaccagctcacggggcgcataccgccggagctcagcaacctgagcagcctcaccgccttgcagctcgacaagaacggcttctctggcgcgatcccgccgcagcttggagagctgaaggcgctgcaggtgctgttcctctggggcaacgcgctgtctggcgcgatcccgccgtccctgggcaactgcaccgacctgtacgcgctggacctgtcaaagaaccgcttctccggcggcatccccgacgaggtgttcgggctgcagaagctcagcaagctgctcctcctgggcaacgagctctccggtccgctgcccccgagcgtcgccaactgcttatcattggtgcgcctccggctcggcgagaacaagctcgtgggccagatacccagagagatcggcaagctgcagaacctggtgttcctggacctgtactcaaacaggttcaccggcaagctgccaggcgagctcgccaacatcacggtgctggagttgctggacgtgcacaacaacagcttcaccggtggcatcccgccgcagtttggggagctcatgaacctagagcagctcgacctgagcatgaacgagctcaccggcgagataccggcgagctttggtaacttcagctacctcaacaagctgatcctcagcggcaacaatctgtccgggccattgcccaagtcgattcggaacctgcagaaactgacaatgctggacctgagcaacaacagcttctccggccccataccgccggagatcggcgcgctgtcgagcctgggcatcagcctggacctgagcttgaacaagttcgtcggcgagctgcctgacgagatgtccggtttgacgcagctgcagtccctcaacctcgcgagcaatggcctctacggcagcatctcggtccttggtctgccctgaagacggtcaagaccgtgattctcgtctgcggcgttctggggtcggtggcgctgctgcttgttgtggtttggattctgatcaacaggagcaggaagctggccagccagaaggcgatgagcttgtctggtgcttgtggtgatgatttctccaacccctggacgtttacgccgttccagaagcttaacttctgcatcgaccacatcttggcatgcctaaaggacgagaacgtgatcggcaaaggttgctcgggggtggtgtacagagctgagatgccgaacggggacatcatcgcagtgaagaagctctggaaggccggcaaggacgagccgatcgacgcctttgcagctgagatccagattttggggcacatcagacaccggaacatcgtgaagctactcggctactgctctaacaggtctgtcaagctcctgctttacaactacatccccaacggcaacctgctggagctcctgaaggagaacaggagcctggactgggacacgaggtacaagatcgccgtcgggacggcgcagggcctggcctacctgcaccacgactgcattccagcgatactccacagggatgtcaagtgcaacaacatactgctcgattccaagtatgaggcctacttggctgattttgggctggccaagctgatgaactccccaaattaccatcacgccatgtcacgcattgccggttcttatggatacattgctccagagtacgcgtacacgagcaacatcacggagaagagcgacgtttacagctacggcgtggtgctgctggagatcctaagcgggcggagcgccatagagccagtgctgggtgaggccagcctgcacatcgtggagtgggcgaagaagaagatgggcagctacgagccggcggtgaacatcctggacccgaagctgcggggcatgccggaccagctggtgcaggagatgctgcagacgctgggcgtggccatcttctgtgttaacacggcgccccacgagcggccgacgatgaaggaggtggtggcgctgctcaaggaggtgaagagcccgcccgaggagtgggccaagacctcgcagcagccgctaatcaagcccggcagccagcaagggtgaccgttaccgacggcgttggaccggtttatggtttcgcatggttggcggagcaacaggatcgagcattcgttgtagtgagagtgacgcagattgcaacaggtagaagaaaagaagggaagcagagtagtttttttttttttttgataattcaagggctaggcggctagcttagctttggttaggcgattcttgtacagtaccggatggtctcgcagcccgttttagcaggggaacttgatgaatgaaaacttatcttgcaataca

SEQ ID NO: 38039 - DNA, 1592 bp, Zea Mays
ggccgatcagggtcaccttctccaaagaatacacatggaagaatgatcgatttaaccgccgctgttactgatccgtccaggagcgatataagtcagaagatgattatccctatccgcctccgcttaccttagatgtctccgagatccaaaaacaagaacaagagcgagcagagcgtggcgacaaatcacccgctgccttttatcccgcaaccagcagcagcgaaggccgcgagaggcaggtagtagccgcacgccacatcaacccaccacggatggccggcggcggcgaccgtgacgcatccgacgcggagctccgcgcggggttcgagaccctggccgtgacgcggccggacccttccgcgggggtctacgaggtccgcctcaaccgcccggcgcagcgcaacgcgctgagcccggccgcgttcgcggagatcccgcgcgccatgtctctgctggaccgcgccccctcggcgcgcgccgtggtgctgtccgccgcgggcccgcacttctgcgcgggcatcgagctcgggggccccggggacccgctgtccgccgcctccgccgatcccgtggccgccgcggaggggctccgccgcgcggtcctcgacatgcaggcggcgctcacggccatcgagcggtgccggaagcccgtcgtcgcggcggtgcacggcgcctgcgtcggcggcggcgtcgacctcgtggccgcctgcgacatcaggtgctgctccagggacgcctccttcgtgctcaaggaggtggacatggccatcgtcgccgacctcggcgcgctgcagcgcctcccgcggatcgtcggctacggcaacgctgctgacctcgcgctcaccggacgcaagatcaacgccatggaggccaaggacatggggttggttaccagggtctttgattccaagcaagacttggatgcgggcgtcgcaaagatcgccaaagaaatagctgacaagtcggcatgggcggtgattggaaccaaggccgttctgctgagaagcagggatgcgaccatagaacaaggcctggagcatgtagccacatggaacgcgggtatgatgaggtcgaacgatctgaaggaggccatcagagccttcctggagaagcggaagcctgtgttctccaagctgtaatgatcagataccatcataccatacctctgtgttacttaacaagtggtgctacgtatctggaaatgcaaaggaataaagtgtgctaggagtagacaattgtcagggaaaaagaaaaaaaaaatgcctgttctcgatggagctgtgaaggcatttttccatgtcagttgagcttaccaaagttgttttggtcggtatggatgaaccgggggtgttactgttttgttacctgttccagtctgtacgtagattcatctcttctgcaccgagacaaaatgccaaacaatcatctggagttcaaagtcatctggggctttgagcgaactgggacattcactacagtctgtggtgcacaagaaatgaatctgcgtacaaactggaacaggggcagtgatggtcaaaacgttctacgcagttgttgcagatagagcaatgggagcaacgaggaggcctgta

SEQ ID NO: 38040 - DNA, 232 bp, Zea Mays
ctccaacacttggccgcccctctctccttttcccttgggctggctgccctctcctcccatggcagcccctctccacggcttcctcctccctctagatctccccccgcgcaacaaggatcgagaagaggaggagcacattgagttgaaggggaagagaggatcaaggagatgttcttccccatctcttcttgcagaatttcttggggaaaccctaggtatggatgagatcctt

SEQ ID NO: 38041 - DNA, 1353 bp, Zea Mays
gatgagagagaggagagaagagaattttaggctgcttgccgcactctttttataaagccaaaaggacccgcagcaaggggggtgactgcatgcgagataggattaggaggcagagaataccacggttccgtcgccagggcgtccatccgatccgcgacgatccacaggccacagccatggcgatggcttacaagatggcgacggaggggatggacgtgaaggaggagtgccagcgctggttcatggagatgaagtggaagaaggtgcaccgcttcgtggtgtacaggatcgacgagcggtcgcgcgccgtgctggtggacagggtgggcggccccggggaggggtacgaggagctcgtggccgcgctgccaggtgacgactgccgctacgccgtcttcgacttcgacttcgtcagcgtcgacaactgccagaagagcaagatcttcttcatcgcctggtacgtacgtcaccggcggcgtcgaggatacgggccaagatcctgtacgcgacgtcgaagcagggcctgcggcggctgctggacggggtgcactacgaggtgcaggccaccgacccctccgagatgggcttcgacgtcatcagaggccgcgcgcaatgagagcgtgattggcgttggtgtgatgagctgagcctcccgatgatgccggtctgacgaggcttcgcgtgtgtttgctttccccccggttcttccgagagatggtgcagtgcaggggcgtggtgtgctgatgctgatgggtggagttactggagtagaagctgagggagtggcagcggattaatgaaacgtccatctccgcgacgtagaattccactgaacaatgctccagtgcaccataagctgctgcttcagatttgtttagaaagcaacgcctctctacgtacaattccgaccagagttgttatgggcttgtgaatgatccgttttttttttttgttcgaagaatatatgtcggagtttgtgtgttctaatttcataaaacggacaggtaaagtagtagggaggggcgccagtctcaattcctgaggtatgcagagaataatctgctctccgaccgaaaggatgcaaagtgttcagatctgaagagaacagtgaacacaacagcaactatttggcgaccaacgcagcatgtatgtagggccatactcgccgttgcagtcttcaccagcgatggaatcgccataggcaccaatgcagcatgtatgtagggccaatttggcacgaggaaagtatggtggagcacgggatcaaaacatgggatacgaaatagcagctctatcacttgcactgggatgcaagaaagacgatgttttctcgtagcgttagtttcaactcaa

SEQ ID NO: 38042 - DNA, 2391 bp, Zea Mays
gatcacatcaattatcagcgtgccgtcgagacatgtttacccaacgtcaccagccttgacgtcgagcaaaacgtctaaaaaagaaattaagtcgtccatcagtcaaacttaatagctaaagttaaaaaaaaattcggacgacccaaacgccacccagcggccaccgccacgcccgctccgtttcccgattccccagcggccaaaaccctagaaacctccagccagagggaggagttcaagagagagagagtgtgtgagagagaaagagagggagagccggagaggggctatggagaagctggatgagagcaagttcgagcagcggttagagctcttggcgctccgcatcccccgtgagctcgcctccgcagttacccgcctccttcgctccggatttatctgacatgtcacagcaggcgcttgattcattgaagcaactatgcaatgttgaagttgtaccttacacattgaccctaggttattcatattggagtgcagatcacattttgaagcgaatcctgcctgctggagtggaggtaccctcttcgtttgagacaattgtcatgttgctcatctgaacatatctgatgacttgctagcatataaagatgtcatagcaaaggttatctatgacaaaaattatccaaggattcagaccgtggtgaataaagtggggacaataacaaatgaatttagagtcccgaagtttgagatcttagcagggaaaaatgatatggttactgaaattaaacaatatggtgcaacattcagacttgattatggtttggtctactggaattcaagactcgagcatgagcatatcagattagtttccctgttcaagaaaggagatgttatatgtgacatgtttgctggtataggtccattttcaatcccgtctgctcagaaaggttgtgttgtatatgcaaatgacttgaatccagatagtgttcattatctaagaactaatgcaaagattaacaaggtggaggactatatattcgcctacaacatggatgctagagtgttcatgcaaaaattgatgactgtgcctggcctggaaactagatcagactctcaagttgccactgatgaatcctattctaaagaaggggttccacctaatgaaatttcttcttcaaatggaaaccataatgatgttcgagaggacattaaaaatggtgctaatgaatcctctgcggcaagcactactactaaaaagcgacaacaaacttcagaagaaggtgatgaacctgattgccaagatgcagatgctaataaaacaaaaagacaaaacaaaaagagagtgagaggattagggccactgccatccaagccatgggaacactttgatcatgtactgatgaatctacctgcttccgctttgcagttcctcgattgttttgatggtctcatccaaaagaaatactggacgggatcactaccttggatacactgttattgtttcatccgttcttgtgaatctgaagaatcaattctctctgaagctcagaataaattaagtgctacaatagcagaaccaatattccatagggttcgtgatgttgcaccaaacaaggctatgttttgtttaagcttcaagctacccatggagtgtcttaagggggacagtgaaaatcacatcgaatcagttgccaagtagaccatgccatgctgatattgtgctcctgaagtttttactcatccacctgcagttttttttggagctttaccaaataaatagcaaatgtgctgatgattctggggttagtagttgtagttatatgattatatctgatctggatcaccatccgcaaggagggttaacaagctatttctgatgctaaatgtgagtgatcaggtgtcatataaccattgaagatgttggtggatgaatcaagacgctggtaacatctgattcaaagcgtggtgccatcggtttagtttacaggaagttcactgtcatgtttttttttttgggtttagtttacaggaagttccctgtcatctaatgtattgactttttacatggttttgttattgatttgaagaaaatttggtcagaactcaggaccgtttgtagtacttgtcactcgagctctctgtacccaagtgaaagtgtcaggtgttcgaggaaatgttatgttaaaaacatcgaagtgtctcttagactgctactagtcggttgcccgtgcgttgcgacggtttacaacaatacccacgtaaactatccataaatttttttaagattttatattgattgtctccgctctctgtataatatatttttttatttggctaactgatgttattgtttactccatgcaaatatgtcttggtacaacacggccaatgaagtgagcgattagaagagagttcataacgattgac

SEQ ID NO: 38043 - DNA, 3598 bp, Zea Mays
gacacagccgccgccgtttcttcttctcccatcatctccctcgcagcgccggcgctccatcttccgctccctccctttactcgcgctcggtaagcaggcgacggcggcggtgctcaggtttgggctctcagcgacggtgtcagcggcttcccttcccgcctctcgctggtcgcctcgcgccctcgcctccggtcctccgcgcaccggccggtgaccctacttgattccaagcatggaaactctaccaaatggctcagtaaataatgctgagcttaaccaggaaaatgagaagtccatgtatgctagtgagtctgaagaagcacgggatatttttgtttacagagaagatgttgtgagcttgaagtccaaggaggatgtccgtggtgtagtattggaggtagctggggaatatgattatgatggtagcatcactgatgatgacattgatactgaggaacatgaagataaaactgcttatggagctgaaaatggtgttgccgatggtggcttgcagtgcagtttggggcccggggagcccggtgcctccacatttgttcttgtggcttacgattatatcgaaagcggaggagcttttggggatccatacaaactctacggtgtctcacagagtcagaaactattaccaaacaaaacagaagatgatagcatgtcgatacaactagaaacgaagggagatcagcaatctgttcctctagaggagcagaacccagaggaccttactcttttgtctcgtttctcatatacaaactggcaattaactgactggtgtctttctcagcgatacacttcatgtactaacgataccatgattgattctgataagcatacatggcagatatgtacatgctcagaaaactcagttccactgtctggtattccagaatctcaagctgatgctcagattgatacagatacaggtcacaggcagacagatgttgattctactgcagatgtattgagtatgtcggatggagataattcatgcatagccaaagaatcagaaacaggaactagtgcatcaagcatctcaaatgagggtccacaggacaatgcaacatctagaaaaaagtttaggaaagtattttttaaaaaagacaaaagaacaaaaaaaagagatgacaactttgagcgagctctactcattgcgaatacttgtaccaaagtcgatgtaatctggcaggatgggacaaaggaatgtggagtagccgcaacagcattgatccctatccacagtccaaatgaacatgaattcttcccggagcagtatgttgtggataaagtcacaaatgatgttggtgttgatgattcttctgaaccaaggcgtgtgggtcttgttagaggtgttaatgctaaggaccgaacagcaactgtgtcatggtttaagcctcctctacatccagaggagccaaaggagatcgcatgtaacgaaattgtgagtgtatatgaactggatgtccatccagattatgattattgctatggagatattgttgtccgcttgccgcctgttaaaccggtaattgagtcaaccaatagcaaggaacaaatggaactggataagacgttagattcctcggaaggatttgctgcttcatattctgcaccccctgatactagtgcagacgaacagctttcacagaaggaatcctgcttgcagtttacaagcctctcttgggctggaaatatagttggctttcaagacggtgagattgaagtcatttggggtgatggatcgatttctaagatgatggtgcctcactagatgatggaacagcctctgatggttctagctgggagactgttgatgacaacgaaatggatgtacttcatgattctgcaaagggtgattcgcaaaatgtacctgagaatagcattggaagggaaaatggttcattcagctcccaggatggaagttctgttgcaactggtcccctttcagttgcttttgagtttgtgacccgactggcgagtgatctctttgctcgaggtagaaggcatttagatggatcatcagatgctatggatgaagttgagtctcactggtctaatgagatttcagaaattggtgatgacattgataagtgtaataagaatcatgtggaatcaccagagcatgctgcagtcatagaaaatgattcttctgtcgagaagtctgtagatgtggttatggctgataatcctgtacattctgaatgtttcaaacactttgatgttctgcaatgtcctctagaccaccactaccttgaaaacacaacccagggtacaggtggaaaaaagtgggtcaaaaaggtacaacaggaatggagcatacttgagaagaacctaccagactatatttatgtcagggtatttgaggatcgcatggatctcttgagagccgtgattgttggagcaagtggaacaccctaccaagatggccttttcttctttgatttccaccttccacttgagtatccgctagtccctccgtcagcatactatcattctggtggtttgcgtgtaaatccaaacctgtatgtggacgggaaggtttgcttgagtctcttaaatacctggactggcagagggaacgaagtttgggatccatcatcatcaagtattctccaagtactagtttcacttcagggattggttctcaatgaaaaaccctattttaatgaggctgggtatgagaagcaagttggtactgttgaaggggagaagaatgcagtgccgtataatgagaatacgtacctgctgagcgtgaaatccatgctgtatatattgagacggcctcctttgcattttgaggattttgtgaagagccacttccgcaagcgtggtcactacatccttaaagcttgccacgcctatttgcaaggaaatgttgttggcactctcaccgacgacgcgtgcaccaccgacagaagcaaagagcactcgagctctgttggcttcaagcttgtactagcaaagattttaccacggttgattacagccctgaaggacactggagctgactgcgaccaatacgagcacctcgggagaacagaaaccgttacagaaagctgatcattgagtgatttgtacttgattcttttgctttttctctgttttttggggtttcagaaagatggtgacttcaccaccaggctgttttcctataaatgtacattcaaagtttgttgtttcagtcaaacatttggaaaatttggcccaaatgatttagggggggggggggggggggtttgaagtcactagagataatagttagttagctaaaaattgttagtgttattagctagctaactattaccaaatttgctaaaagtatctaatatctaaactattagttagactgtttggatgtcttggctaattttagcagctaactaatagttttagtgcatttaaacacctcttattcgttacatggaactgaactacactgtacagctgatgtttggttaaacttgtaccagcgaagagttggcaatactggaaccaggcctagagattcctggaacagagatttgatgtccatgtatttacgggtggtattggtttcacgaatatacactcgcgggggataaaaaac

SEQ ID NO: 38044 - DNA, 2408 bp, Zea Mays
gcagaagcggatgaggaagcagtgtaggagagccaccctcgcttcccacctccagtgtctcatccgttccgacgacaaacacctccctttccctgcgctcccgtcttccttccagagctgccttgtctgcacatgcagaagcgccaagagcgagcgcctcatctctttatattgctctcacaccctccgtttctcgctcccacccactgccactgtacttgtgttgtgttagtgctgtgctgcgagaagaaggagaagcagaggaagagcaggtgctgagaagcctgccggcgcgcgttacgacaagcatatatgggggagatcaccaatgtcatggagtaccaggccatcgccaagcagaagcttccgaagatggcctacgactactacgcgtccggcgccgaggacgagtggacgctgcaggagaacagggaggccttctccaggatcttgttccgtccgcgcatactgatcgacgtgtccaagatcgacatgaccaccaccgtgctggggttcaagatctccatgcccatcatggtcgcccccactgctatgcagaagatggctcacccagatggggagaacgccactgcgcgcgcggcggctgcggcaggcaccataatgacactgtcgtcctgggcaacttcaagcgtcgaggaggttgcctcgaccgggccagggatccgcttcttccagctatacgtctacaaggacaggaaggtggtggagcagctggtgaggcgagctgaaagggctgggttcaaggccatcgcgctcaccgtcgacacgccgcgccttggccgcagggaagctgacatcaagaacagatttgtcctgccaccacacctgacgctcaagaacttcgaaggtctggacctcggcaaaatggaccaggctgctgattcagggctggcttcctatgtcgccggccaagtcgaccgcaccctgagctggaaagacgtcaagtggttgcagaccatcaccacgctgccgatcctcgtcaagggagtgctcaccgctgaagacagtaagcttgcggtggcgaacggcgcggcggggatcatcgtgtcgaaccacggcgcgcggcagctggactacgtgccggcgaccatcagcgcgctggaggaggtcgtgaaggccgcccggggccagctccccgtgttcgtcgacggcggcgtccgccgcggcaccgacgtcttcaaggcgctcgcgctcggcgccgccggcgtattcgtcgggaggccggtggtgttctccctggcggcggcgggcgaggccggcgtgtccaacgtcctgcgcatgctgcgggacgagttcgagctcaccatggcgctcagcggctgcacctccctcgccgaaatcacccgcaagcacatcatcaccgagtccgacaagctcagcgccatcccgtcgcgcttgtagatgaggcaaaatcaatcgcctgctacgcctacgcctacgctacgccgccggtcgatcggggatactcagctcgtgcatggatgcatgcatgcgtgctcgacgacgatcatgataccatatataatctaggactgcgcatatatatatattttgttccagaaatgatcgatcacgtactgtactgtaaaatcttatagattattacacgcatggtgtgtgctgcatcttcattagttgttaataatggcgcacatggtgatctctctgtatttgaatatttgatcacaaagtatttgtttcaaatttttatgtgtgcccctatctctgtggagaacaacaaaacaacatttttttttgcttgccatcagaaaaaacgaaacagaacaacaggcagcatcagaacccaatcaaattccaatctcgtcgaaaacaaacaaacaaaccacgtcttcctcttacgttgggaaaaaaaagagataaactacgtatatatactgtgagcgatgcccctcaagtcaggcgatgaggcactaataacaggtactagtagtattttatctagctagcaagcagaggacgacgtcagcaaggccgggcggtctgttagtgcctcatcgcctgacagcctgagcctggcgtccgccggcgtagggcggggcggcggcggcggccgtccgggccttgcgcttctgcaggaacagctgcagcgaccgcttcatggacagcccggcgtccgccgcctggtcgatgtcgaccgccggtcccacgaggcctctgcctcgcgcgcaccgccgcgccagcgccacggcgctagtcgtagtgctgctgctgctgctgtcgccgtcctgctgccggccgtcgccgccgtctacccgcgtcagctgctgctgctgccgccgccgccgtccccggtggtccgccagggtctcctcgctcgccatggatatgatcgcccttgcctgaatgatgcgccaggacggccggcc

SEQ ID NO: 38045 - DNA, 3654 bp, Zea Mays
cgcgcgttgaccttactgccgcgatcgtgttctcgtcccctccgaggcgctgcagtgccgacgtcgccacagccatgatgatcgcgaccgctgcgctgctggcctcgtccgattcagtggaggcgctcctcgcgggcaaaggcggggtgcccgcacccgcagacgagctgtggcagctgaagcagaagctcgacgaggcgcggggcctggcagcggacgccgaggcgaaggagggccgcgacgccggcgccagggcgtggctgcgtgacctgcggtacgcgctctacgtgctcggagactcggtcgacgacttccgccgcgccgccgctcggcggcaccagcagggccggagatcgttacgccattggtttacactaccatcaaacattgacagaaaccagtacaagactttcaagaccagcatcagtagcctcaataaacaaatggatgatattctacagaaaggttccgaactaggacttcaagcaatcaaccaggaagcccagagtgggagctctgaattttcatggggggtgatgcccgatgatggtactctgggtgacattcacaatgagaaaaataaattgattgacgtattgacagagaggaagagtccaaacaaagtcgtgataattgttggggatagtggaatcggaaaaactacactggcaaggaaaattcatgacgatcatcgcaccagaaatgcattcaccattgttttatgggtgagtgttttcagtgacttggatgatattggattactctctgcgattgtgaaggctgctggcggaaatcccagtggagaagaaaacagggtacaacttgaggccatgttggcagccattctcaaaggaaagagattctttatggtgcttgataacgttcgcagcgatcaaatttatgagaattccctagaggctcacttgcatgtgtgtggtcatggaagccggattttgatcaccactcgtgatgggagtatttcgacacagatgacggatgcttacatctaccgcgttaagaaactgacctttgaggattgttggtccttgctttgccgggcttcttgtctaaatgagagcctacatggcgacattttaaggaatatcggaatagcgattatccaaaaatgtaacaagcttccaatggctgtcaagattataggggctgtcctaagaacaaaagaaccgacctgcaaggcctggcagaaagtgtatgaaagcgaaggatggtccttctccttcggggagcttcgagactatgtccatggcttaactggggccatgtatttgggctaccatgatttgcccttgcatctgaagcagtgctttatttatttgtcactgttccctgaaggctttgtcatcagacagcagtttgccagtcaactgtggatttcggagggtttaattgatgcaagagactactgcagtcttgaaaagactgcagagcgttattacagggagttgttatcaaggagccttctgcagcctgaaattgggaacgacgatatgacaagatgcacagtgcatgatcaaattcgatcctttttgcagttctttgtcgatgataaaatttttactggcgatctgaagacgcccagggaaggactgcgacatgtgtggattagaagcaacctactaagaactactgtgggaaaaatattaggagtgaaaagcttgaagacagttattctatacaaaaacccatcggggaatcgcagcttagacgagctgtttaaggagctcagatatttgcaggtgttggaccttagtggtactgaaattaagtatattccaaggacattagattttctatgtcatcttagactgctaaatctttcactaacacgaattacagagcttccagagtccattgagtacctaacaaatctacaattcttgggtcttcgatactgcaattggctacataaccttccaaatggaataggtaaactgcaatatttgcgatatctggatcttcgaggaaccaaattgcatcaggtcctaccaagtttggtcaacctgaagcagctctccacgctacatggtttcgtagtaaaccgtagacccaagcgtgaggatgatccaactgggtggcctttggaagacctaaaatctctagaagcattgagaagcctgcagattctgaagttggaaagagtctcagatcctttgagggtgcaagaagccatgctggaaacgaagtcacacctcaaggaacttgaactatgttggagcaatgatgatagacagtccgaagtacaagaagaaaatgctggaacacttaagaacgtatctgattccctttctcctccacactgcttggaatctctcaaaatagtgagctattacggaaaagttttccctgattggctacctaatctctcaaacctccagcgccttgttcttactgattgcaaattctgtgagcatcttcccaacctgggccagctaaccgaactcaagttcctgactataacagcctgttccaagttagttacaatcaagcaagagcaaacaggtcaggcgtttccaaggctagagcagctgcaccttcgagacatgcccaatcttgaatcatggataggattttcacctggtgatatgccttcccttgtgaaattccgtctggagaattgtcctaagctgtgtaacctgccatctggcatcaagcactcgaaattcctgacaagcatgcaactacaccatattgatagcctgcgaatcattgaggacttgcctgcgctcaaagaattggttatccaagcctgcaatgaacttcaaaaaatctcaaatattccattgcttgaagttttgatagtccttggttgctcgcggttgaaggatgtcactgaagtccaccttagtcatgcccgcattgtagatagagacataagagaacttccagattgggttgctactaatgcatacatgctgcagacattcactatagttggcagagcagaactgcttcaaagattacttcccaaccatgaagactgggaaatcatccgtcacataagcaaagtttatgcaaacctacctgatgaatctccattcttcacctacacaaaaagctctgctgatttccatgtcgatcaaataatcggtgaacgagggaacccatctgtcctattaccagctgatgttccacaccaatcgctgaacatttcacttgctaattctgttgtgagaacctttcgagttggtgtgcccagagtaccactcagacggatttccacgatgaagagggctaataggacaaacagagagattcggcttgtccagactctcttcattttcttcacaacagtgatcttgctgttgcttgtgtttcttgagtgaggcttgtctcataacaagttgtgatcagatgaagaaaccacaataaaatttcgaaagtttaacattctcggcagatgttcatgtcagcacaactgtacatccacaaatagtttttgaaactatatcattctcggcagaattctcattctcggcagaattctaatgttacttctgttagcaatgcataactgtaggaattggtctccataactgtggtttccatagatgtaggattagtttcctttatgctgcacaagcattacttaagggcatgtttggcacagctccagctcatgattctagacaagga

SEQ ID NO: 38046 - DNA, 380 bp, Zea Mays
ccgcgcggaccgcgcccaccttgcgcgagaagctcgccggagacctcagaattcgtgagaccaccgcacacctgcacgtattaaggccacgttcccatcacccgaaacccttgaccaccttccgttatctagaactcaaaagagtcggccgccattaccagggagagctcgaaggggataaatcgggtagtatcgtcccgccgccgctgctgaggtgtgcgtgtggtggtcgcgggtagtgccagaaagcgggaacacacacgagtgagatctagcatcggaagacggctgtggagggtgaattgcccaacagaatcgaagaagaaggccgtggacgcgggcttcaccgtcggggtcgatctaccactccctctgcggta

SEQ ID NO: 38047 - DNA, 2415 bp, Zea Mays
tcttcatcttcctcgcaacgccgacgctgcaacttccgctccctccccgactcgcgctcggcacgcaggcaggcgactgcggtggcgctcaggctcgggctctcagcaacggcggggcagtcccagactcagcggctccctctctccaatcgccttgcgccctcgctccgttcctctgctcaccggccgattctgcgttgcaatattttccagcatagcttgctcacctacttctcaatttagaagacttcaatttctggatctgagcatcaaatcaagaccataccactttagtcagtcctgtctgatggcactggctgcagctccagccagtggtgattcacagagtggtcctcagaggaactatcaggttgttgtggctgccactcgtgacatgggcattggcaagggtggggtcatgccatggaagcttcttggtgatcttaaattcttcaaagaacttacactaactacaactgatcctgccaaaaagaatgcagttataatgggaaggaaaacatgggagagcattcctgttaagtcaaggccactgcctggtcgtttgaatgtcatacttactcgatctggtagttttgattttgcaacagtagagaatgttgttatatgtggaagtatgaagtctgccttagagctgctagcatcaactccatactgcttatcaattgagaaagtttttgtcataggaggtgggcaggtactgagagaatatttgaatggacctgcatgtgaggctatccatctgactgatattcagtcaagcattgagtgtgatactttcatccctccagttgacttttcagtgttccagccatggtattcatctttcccagtggtagagagcaacattaggcattcttttgtgacttttgttcgtgttagaaagtcagtggcagaaactcatgagtcaaatggcaaggaatcaactgagattgataccaagaatgacaaatttgaaatagagaatttctcttttctccccaagatagtatatgaccgccatgaggagtatcaatatctcaatcttgttgaagatattataaggttcggtgctcagaaaaatgacaggacaggaactggaacattgtcaaaatttgggtgtcagatgcgattcaacttaaggaaaaattttcctctgctgacaacaaagagggtgttttggcgtggtgttgtcgaagaactcctttggttcatcagtggctcaacaaatgcaaaggttttgcaagaaaagggtattcatatctgggatggcaatgcttcaagagagtatcttgaccgtattggcttggcacacagggaggaaggtgatctaggtccagtttatggatttcaatggcgacactttggtgccgaatatactgacatgcatgctgactatactggaaaaggctttgatcagctaatggatgtgattgacaagattaagaacaatcctgatgaccgccgaataattttatcggcgtggaatccttcagatctcaagaagatggctcttcctccttgccacatgtttgcacaattttatgtggagaacggggagctatcctgccagatgtatcaacgctctgcagacatggggcttggtgttccattcaacatcgcatcatattctcttttgacatatatgattgctcaagtttgtggagattttgtccatgttataggggatgctcatgtctatagaaatcacgttcgagctctggaggaacagattcagaagatgcctaaaccatttccaattttgaagataaatccttcgaaaaaggatatagattctttcatggcgtcagacttcaagctggttggctatgatcctcaccagaagctagagatgaaaatggcagtgtaacggtggcttagctctggagcccccagccttggaacctcggtgggtgaaatcagtcgaacgaactggtactacataaaaaatgaaccggacatcgcactagcttgtttttggtgatggtgctgaatgttgtgcgggaggcgttttcccccgttattagtagcgatctgcgtgctatatatggtcgctgaagtcaaaattggctctcttttattttttatctactactactactcatttgcgagtgagagatggtctgggcacaccattcaattgcaacggcctactggtgtgttgccccccaatgagggctgtgacgattgcgccactacctcgtgagaaacatgatgtgaccgaaattgctgtgtacctgcatggtagaacaacgcactctttggtatctggttgccttaatacgtgacctggttaattcagtttccagtttggatgggcacaagatagcgatttgctgtggcgttttagttgttgttgctgtgctgggggcagaaagtctagtgccgtgcttgacgaagacggggtcaaagcgcttg

SEQ ID NO: 38048 - DNA, 1352 bp, Zea Mays
taaggtaatggcaggatctggaaatttgcagactttccgcttactgcgctatcttagaggaagaatttctgcagaaggccaagtgaattatggattgcagatggcacttaaaagcattcgagtttgtgggcctagatattggcctcaggtgataaaacttgcacctgaagacaagccatggtggagatctggagacaagacaaatccattcaatgggggagtactctacataaagcgaaaagttggatcttgctcctactctgacgatccaattggatgtcaatcgttaatttcacgggcaatgcatgaggtctgtgatgcaccatctgctagttgcagtaatcaaccaaacagcactaatggtagctacttcagagttgatcagctagtaagcactttctcggccaatccaagcttgattgcttttgcaaaactctgctccgtgtcatggaagagcagatgcaatagcaattttcaggagttctgttctcaagtgctatatgaatgtatgagcaaagatagaccatcactgttacaggcctatatcagtttttacacaacaatagagttaatgtgggagcatttgaagactgggaattttcctttttataattcccttttccttcccaacttgaaggtcgctttggcctacaacgaagcattagttgattctagaatcacaaatggaggaattattcattcgacattcttggagtcacttatgaagcgagtgggagacatctttgcggagctgccaaacctcaaggacaacctccaccgatacttgagcacgggcacatggcctgacacacaaaacgacgtggtggttctctcgtggtacctccaatggtacaatataccacctgcccatgttgtggcttctgcagttgagaaggtcagaccgagagtccctgccggtgtatctatgctcccactgcttcgcctcctgctgccaaccacacaccttgtgggactgatggagatcgagaaggtacagattgtcatggaatgctaaaggatgagcgtggaaaattcaatcaaccttctctgcatgcgggttacttgtgatgaacggtagcaagtattgcttagtgcacttgtgatgaaatctgccagggactaagctgttctgaattaagtttgagacaaaagaatcccataatttttattgtgctttgctttagattcatattttctgcatgaattgtttcgattctacccatgagaagtactccctctgtccttatcagaggtcaaaccctctaagtttgacaagtttatagaaaagagcaaccatataaaaatgtaagtcttatatatatatttcataatatacctaataaattttatgc

SEQ ID NO: 38049 - DNA, 204 bp, Zea Mays
aacctagacacagtgagtgttgctcacgaactaacaaacagagatgcacagataaattattaccttcgaatttttgggtgagccgtgtggatctcttccgtggaggcatcttggtctaatgatgaaactgtcgtgtggaggtcaccggatcttgcagccgcctggtatgagggtggggaagagaggcgaaaggttcggtgtgct

SEQ ID NO: 38050 - DNA, 2660 bp, Zea Mays
tccattggtcagtgtctccccgcccgcctctcccatcttcaaaaaccacccacggcccgtcccctcgacctccccgaaaccccacttctcggatcgagactagggttagggtttcgtcactcccgccccgattcgaaccaatccgcctaggcccccgccgcgccatggccgccggttccattgtggtggacttcccctccatgggcgccgccctctgcttccccaacctcgaatcactcctccgagactccgcctcgggtttcctctccgccgtctccgccgccccggcccccggcgccgccgacctcaccaacttccaccgcgtcttctcgcgcgtcctcagcacctactcagacccgccgctcgaggtcgtctggttcttctccgcgctctccttccacgaccgccctgacgacctccgctcactgctccagctcctctccgccttcgccgcttcctcgcccggggccgccaagccgctcgccctcctcgcccccgtcgtctccgagcttttccactcagataagccgcgcagggagaccgaggccgtcgtcgaggctgtcctcagctacatcagcatctgcagcagtcgccccgccccctcttcgactgaaggcaccaccgccgacgctgtgaggctgctgccggctttcggcgatcttgtcaaggtgtggagcgtgcggcactcgagggagaggtgcccgttccaggtgctgttcccgctcgctggtgacgaggccaggcgggagctcatgaaggaaggctgcagcgttgactacctcgctggggtggtgctggttgaggcgttccttctcaggctctgcctcaaggtgcagaatgcaacaggggtgcctcgctctgagctgcagaaggagctcaagatctgggcagtcagctccatcccggtcttccagagccaccaattcttcggggtcctgctgaacatgctcttgaactctccgctgcctgtttactctctagtggaatctttcctaatttgtggaaactaaagaggagaacagaacggtatatgactattgtgtatcgcaaagctggtgttactatagcattttgctgtcatcatctgcaaggagcatgatttaagatggagttgtgtctcatctttgtgatatgcaaacaggttgaagcctgaactgtggtttgtcctagtatacccttttgtttcggatcatgattatgccttttttatgcggaaatggcaaaataggggtttatgtacaattttacttggttacgtatttgatcactcctataaagttgccagactggttgatttttccgagtagatggctacttcaattttcactgtttagaatctaaaagtatcatatgtcagataccagaccaggagtaacgcctttattgactgagttttgtcagtggcagtttcagttttcttgactcatgtaatttgtgttgtgtttggtttcttggtgactcagagcgctgatgatgaaatcttggtgagggatgttctatatgattctcttatcctggtggattattcattcattaacaatggtgctggagttgatctcttgcctgtatatgtgtcgagattgattatcactcttgatgctgtcaatgatgccaggaggaaaggtgatcaaggtagagcagtgtcatttattaatgccttctcaacctcaaatattcccaattttctcatcaagtgggctacttgtcaagctggctctggtgcactcagcaaaccaatttgcaatacgccccaagctattctcaagtggcttattgaccttgaagataaggggctcaaagtgtttggagattacagttcttgggttatgaggaggtttgtttgcaatgaggtcaagaatgggtatgggaacatggttcagtcagatgcagaccttttctttgttgataaacagagtggtagggaacttatggacaccaaaggcagcgaggatgatgaagctgttgaggagatggagactgcaggtaatgcttttatggctgctgcccagtcaatgaagggggtaactaacggcataaggaagaggaagagctgcggaaacgaagatgcagctgctgtgaagtttgtgaagtacaaggtagaagacagctcagtgaagggctacctgttagcagctaatggcatgagcagtggcagtgaggtagagaacccacagtcggatgatgagatggaagaatccgactgatgcatagaaaatgacagcacccactaatgcttactttggggagagttgctttgaagagtttcttggacaaccgcctttttggagtctggaccagccttgtttcagatgccgcttcttaatgatgtcgtgcagtaccctgttctaggccaataatctgcaggagggcccctctccagctaggctttttttcggatatagtggtaaccgttagctgaccctacttgacaaggagcatgtgatgtctgctatgagctgtatcgtgttctttgttattataatgctatatagtagagacctcaatgtagtcttgcttcattttgcttttgtaatagatgggtacgttgttgttatcccacggaaccagttggaactaatgaactgttaacctttcctgtgtatagcgcctttctgtgcttacttgtgtatggtgtcttttttgtgctgacgaggaagtcc

SEQ ID NO: 38051 - DNA, 3209 bp, Zea Mays
ctagaattttgtggatgatatgaaaatgatcagatttatttggttttttttcagtctatgacatgtctgatagtcaaatgaagctaaatgattttatttcaagccttgttcttgagaggatggtcaagattaatttgagtagggtgacttcataatggacgacgaggaagaagtggaaggagaggaagaggaacaaaagagtgatgaccagaagcgaagaaacaaaactaaaaagaaaaggaagaggtacctccctttgttcgtactaggaataaatgccaatgtactgtgtacacctatcctgaaatgaggatgactatatgttgctttaggataataacatcactgccatcactctcccaaagtcgctatgtttttctgtcatagtttgttgtcctgaccaaattttttaatttgttgtctatttctcttaggttgttctttcaataagctgtatctttctctcgtatgcaatgtaaatttcaggtatttgtgaaatatgagtgttgttttggtctcaaaataaatccacaaaagattttagcatctgtaagcactgttgcacattatccaattatatcagggtggtctagaactgttttgtgttgtttatttttagttgaggtgtgtatctttccccaccattgtatgttacaattttctaactacatctgttatgtttgggtgctcttgcattctcgcaaagtgctatagaggagcaacggtaccaggacgcgtcaaggttgacaaagctatctgggaccacttttgtaattgccaactcttcactgattattttcctatatgttgctccagaataaatgggtgaagccttcgtgtctcctcgagggaaagtcactgacctttcttgggacgtggaccactgacggcccccgtcatcccccatgacggtgatcctagggtgaagccttcgtgtttcctcgagggaaatctaccagtgcgggattgatttagtcagcaccattggacacagggtttagttccattgcctggacccatcaatgaatcatggtgccaaggtcttgatggttcgacttcaaggtactgatattctccaggactattgttagcatcccttgtggtccatctgcattagcagtgaagaaagtcgcatggggacttgcttgatatgttgttattgctcagacatggctgagaaggaggaaacaaagggccgctgccctgcctgccacacacgttatgacaaggatatgatcgtcaagatggccgccacttgtgacaggacagtggcagataaaaatgcggagaagaagcaaaaggcccaaagggttaagccaaaggcagcaccaacagcaacaacaacatcaaccgtagaatctaagaagcatcttgctactatcagggttatccagagaaatctggtgtacataattgggctacctgcgcatttatgcaatgagagcgtacttgagcgtagggagtactttggtcattatgggaaagttttgaaggttttagtttcccgtccgactgggcctccctctcagcaggcatcagcaaacagcagtattagtgtgtatgtctctctgaattatacggtgtacatgcatgatctgttcatacttcatatgaatttagatttatactttcagtactggtcaattagcctgatggaatatcaaataactatctactgattctatgcaattgcatgtttcaagtttctaatgctgccttgtaatactggaacattggtattataagaaagtaaattcaaacttcaatattgttatgtggttttctattgaacctggtgaaaatgtgataattatgtccatatccttgcaagcagttcagtcatttaagtttaatctaggctacttagcagtgtgattttcctgtagcctcttgatttgcatagccgcacagcccgtgcttgaaagtaacatttttatcctcattgctgacattaggatatgtattgtattattggtgtgaaattcaaagaatcagatagatgcaagatatctgtttgtgggataggatcagaacccaatcctgtgtgtgcagatatagataaaaatcatcttttaatgaaatgtctatttttttctcggtttgagtactttatattgttctcctgggatgtgttttttttctttatgggtgatttctcttggaaatcctaggatagtgtttcgatgtattctgaaactttgttgtgccagaaacatgcattgttttatcattaaccagaattgagttagggattatcattaaggcattaaccaaaatggagttaggatgtctttttttgtagtgtagaaaacgttgtgtatactgaaatgtgcatgcttgcaacatgtctaatatagattatatttgagtggtatctttgttgaagaacatgtgaaattagagttctggtggtcttctagaacacacactgctcctcatctttactttctctacataattcttcaatatgttggtatgttcccgtgactccttggtttagctatccttatacatgcatgttgttacataaatcaattagtttttccctgaaggacaggcctggtgcagtggtgagaggcctttccactgagccaaagggcctgggtttgacgcagcctctgcgcaaaaatgtagggttaaggcttgccttggttattacttccccagacccgactcatgcgggagccgtcagcattgggtctgttcttttactgatttgttgcgggtctagacaaatatgagctcataatgtattatctttcaggagatatacgtggagcgtcagaattatatgtgcatctacaagaacagttacaacaattctccatcaggttgatgttcatacatctcagatataaatgtgggggagacggtgcctcatcaatgatgagtaggttgattctcatctagcggcaccattgctcactacaactggtttgcttgagcaacttaatgtcactctcaagaggaccctcctttcgaccgacaccctgaagcaccacacaagctttagaaaagtcggaattgtacttcgtatacataaattacatgatattatatgttcatgtaattctatgttgattctttagaaataatatatatgatattgtaatgtgtgttcgacatcaatttattttatttgagttcgccgtgcgtacgtttggggttgtttctccctcgcttcttcctggcggcgaaagatagagaag

SEQ ID NO: 38052 - DNA, 306 bp, Zea Mays
gtccaatattgagtgtgggcttttaaatagcctacttaattttttgttttcagaaaaattccgatacctaaattcggtaaattccgattgaaaacgggaaccgattaaaacggtcggaaaaatctcatattgttttcaataccgatttcgaaacaaaatttcgaaaaccgatgtcggttccgaaaaataccggtaccgttggtttcggtcgaaaaaaatcgaaaacggttttcggaaaaccgaaattgttttcatccctacttacaacgagttgcatgatagtcgcctagaggggggtgaataggg

SEQ ID NO: 38053 - DNA, 2898 bp, Zea Mays
ccccttgaattggatttgctcccaaatccggcgagaaagcgaccatcactccacgccaagctgcggcgcccggacaagagatttttgacattataaaacgcgacagatttataaaaatcaatagactcaaaatctttttatgcgtagagacgggctattaagctgctgcatctaacgccgtgactcgtctccatcctttctcttttctcttccaccgggtcgacgcagtgcagcgcgagcttcagcgtgtccatgagctgctcgtccgcggccgtcccggcggcagcgtcgcgcaccagctccaggtcgaacagcatcgtccatcgttccattcccatccataccccctcaatcggccgggatgctgggtgtagggacggccgcggcggtgctgctcggggccgtggcgttggtgctcgcggatgccgctgcgaggagagcgcactggtggtacagggaggcggctgaggtggtgctggtcggcggcgtggctttggtggtggtggacgccgcggcgcggagggcgcacgggtggtacagggaggcggcggcgcggctgccgccgggggagatggggtggcccttggtcggcggcatgtgggccttcctccgcgccttcaagtccggttcggtcgcactcgcacgggcgtgtaccaaggcttcatgttcagcagcctgacggtgctgatgacgacggcggaggcgtgcaagcaggtgctgatggacgaggacgcgttcgtgacggggtggcccaaggcgacggtggcgctggtcgggccgcggtcgttcgtggcgatgccgcacgacgagcaccggcgcctccgcaagctgacggccgcgcccatcaacggcttcgacgcgctcacagggtaccgtgccgtaggtgctcttccccatgatttcggcggtggcgcacagcaggtcgtcggccgtgaacgccagcggcccatcaaagtgcaccagcttgccgcccacatcgccaccggactccacctccgccgccgacgaccacataggggcggcgacaccggttctgacgggagaagaaaacggcgcgcggacggacagcgacggagcatgattaatggttctcctcaacggctaataacgattcttcaggaaagttttactcttattaaactccctgacatcgtccaaggaagcaagtgatttcattatgaaagattggtctattttctccaaatttgatcataatggagcttacctccccatgttgccaatcgactctccaatatctcatgatgttgggttaggattgatatcacaagtcggaaacttagttgaatgttcatttcaacatccaaggcatatatgtgctacggggagtggcacagttcaggaagcattcagctgtttgaacaagtttgctgaagctttctatttctggttttctagagcatcgaatcctaagctattccaaaggctatcagctgctgcaggctcaagttcaagagtttgtcggtcacacataaagcaagtggcctcttgcttgcagcatttaccaggactacagtttggttcacaattaagaaaagatcatgctgtacagatgcttttagcgaggcttgcaagcacaacttttggacgcctgtggacggaggtggaggagcatcatgcctgcaacatccttatgttggctgccgctactgtagtaccaccatttgaaaacatatctccgaagatgctggctgagtcaatggcactaagaaaagatggtgggaacatcccctgctggacagtcatactcggaagaaatccgtccaggttgtgcgtgtgttgctgtgccaagagtactcttgcgagaagatgtaacagaaccgaaaactggcatcaagttccccactctacttaaagacaattccaatctgactacagaggtccttgttggaatgggtttcagaagcatgcgaataatgagggttaaagatctgaatctttatgcctttggattatatatacaacctgattctgtttgcaaaaagctgggtccaaagtatgcttgtattccagatgctgagttgaaggatcacccagatttctatgaagatcttttgagggaaaatattgatatgactgttaggctagtagtaagctacaatggcctcagcattggcacagttcgagatgcatttgagaagtctcttgccttccggctgaaaaagatgaatcctaatactgattatgattgcttgaagacatttggttcttgttttaatgaatacattcgtatacctgctggtacaaagatagacttccggcaaacatccgatggtcagctaataactgaaattgatggcaaacaaattggcactgtccacagcaaatatctctgcagaaccttcttcgatatgtatattggtgacccccctgtttcagttgagaccaaacacggcattgcgcaaaatgtggctggactcatgagaagatgctaggaaaacagggaaaccaaaccgaagaactcggaactatttcctccatctatacaaggagagatgtacatagaaaggaagccaggagaggattgattgtatttttagtggtagacagcgactttgtatgctgtaattaacaggcagaaggtttcgacagacaggcctggcatccttagcaaatgcctcctatgcttctcatatggtatggcattttgccatttcctggttcgctgggggcactgtatcatgagcatatccaagagcttctcagaagtctcccctaaattatgttttttttttgaaaaatggcggttccttttaccaatcattctcactaattttttaaatgtcccttagaactgattttcaggagttattttgtacaacaggaggatgtttctctatcccaagtcaaaaaaatggcggggttcagctttgtccctac

SEQ ID NO: 38054 - DNA, 2121 bp, Zea Mays
ctcagagtcagaggctcagagcccagcccaggccggagaccactgtccactgcgtctgtctctgtcccgagctcccgatccatccatctgcatcgtgggaacaagaagaacaatgggtataatgcgagtcgcggacgatgtggaggccaggttggtggtcggggcaggtggcggcggcgggaccgccaccaccacgacggagccgcttctccgccactgccacggcggccgcaaggaggaggacgaccaggggtctaagatccgggacagcccggaggcggagggggcgtccgactgcgggaggacggacggaggctcgctgcggatggtccttgtctccaccgccgtcgccgtctgcggctccttcgagttcggcacctgcgtcggctactctgcgccgacgcagtcagggattgtagaggaagtcgggctatctatctccgagtttgcaatttttggatctgtactgacagtcggagcaatggttggtgccgttactagtgggcgcttggctgattttctcggacgaaaaatgaccatgcggatatcagctactatttgtatattcggttggctctccatacatctggccaagagcgctatcatgctctactttgggagaaccttgctgggtttcagcactggagttctttcttatgtggtgcctgtgttcatagctgaaatagcgccaaagaatctccgcgggggtctcgcaacgtcaaaccagctcttgatctgttccggaagctcagctacctacatcataggagccctggttgcatggcgcaatttggtacttgttggtttagtgccttgtgtcctcttgctagctgggcttttcttcattccagagtcgccaagatggctggccaatgtcggaagggaaaaggaattccacgcctcattgcaaaagctgcgtggagaggatgctgacgagtatattgaatcactctatagccttccaaaggccaggcttcgagacttatttctgagcaaaaatatatatgcagtcattgtgggcgttggcttgatggtttttcagcaactcggagggataaatggtgttggcttctatgcaagttatatcttcagttctgctggattttctggaaaacttggaaccatcttgattggcattattcagattccaatcacattgtttggggccatactcatggataggagtggaagaagggttctcctgatggtattaacgctacaaagctgagctgatgtgcatacaaagaaagattgttaggtagaatgttttgtgagatccttttatcatataggtctctgcatctggaacatttttgggctgcttcctcacaggagtatcattctatctgaaggcacaaggactgttctcagaatgggttcccacactggctctttccggcatactggtgggcaaatattaagtttccctggagatttaccattgctcatattgactgccggcagatattctcaatcaacatgaaagcaactggtgggagcttggtgacccttgttagctggctgggctccttcgcgatttcttactcgttcagcttccttatggactggagctctgcaggtaccttcttcatgttctcttcagccagcttgatcactgtactcttcgtggcgaagctggtccctgaaaccaaaggaaggacactagaggagatccaggactcactaaacaccagaagatagtaatgaatttacttcacactacagaataattaattctaagatggaaaaatgggaatttacaggacacagcagaataattccaagatggaaaacgaatgtaccgtcagacctctgctcatcgatagatatgtatacaagaaacaatatatataattctcacgtcctcccgcttcccctccctttctctcccgcaccacctccgtgtaatacgtagtgtactgtgtaccctatgtaggttaaggaatgctgcagattcagattacgcattatgtaccgtgcccctccagattgtttgagcatgagcagcgacagaaccgacattatgtttatgtaccatgtccctctagatcaaccagcagtacattttttatattcaggatcaacatttatgtatcatgtttttttagggaaaaggctcag

SEQ ID NO: 38055 - DNA, 1039 bp, Zea Mays
aaggaaatggctgttataataataatactacaaaagcaattgcatcgttccgagtagcacttttccaaagctctaccaataaggaaaaaaaaaaactcttctccacgcgtccttcctattctcctcgtcatcttcctgctgcgcgtccctgccagcacagcgccgcctcccctaacggccccaccatctcctcacatcgttatcgtgtcacggcctctcggcctcgcgcccttctgagctgtcgtcgtctccccctctctcgctcggctgtcgccgcggatctccctgcgtcggccgcaacgatggcctcctcatccgccgcggcgtcggccgccgccctagaggccgtgcaggtgctcgtcgcctcgctcgccgatgactccccagtcgcccgtgacgccgcgctcgctgccctccgcgacatcgcgccgttgaacccgatgctcatcctcgactgctgcgccaccgtctcccgtggcggacgtcggcggtttggcaacatggctggggtttttcttgtcatggcatctgcagtcagggctctcgatcactctgacgccgagagcgagttcctccggaaaatcgcgaagattgcaactgctgagattgttacctcaaaggaattcaatgttgattggcaaagagcagctgcttgtcttctggttgctataggttcacatgatccagacttgatgatgggggaaatttttcttcacttctctggaccaacttctgctctgccagccatgttacaaatacttgcagattttgcgtcttctgaagttcaccccacggttgaaggacgtgcttttgcgtgttttacctatcctaggaagtgtgcgagatggccaacggcctgtttttgcgaatgcattcaagtgttggtgccaggctgcatggcagtacctgggagatgccccctctgagcttcctcttgataacgatgttatgtccttcatgaattcagtatttgagttacttataaaagtatggacaggctcacgtgatctaaaggtgcgtccgaattttggctttgagt

SEQ ID NO: 38056 - DNA, 4104 bp, Zea Mays
ctacgccgccgcgtcgtcggcttctccgctcttcacctgctccctctcgacgaactacgaagccatccccgcctccgcaaaccgccccgagcctccgacgtattccctggccagtaggccacttcccttctggccttcctactctctccacgctccacagctgtgagcctgtgaccctccgcttcgacgcggacgccgcaggccgttgacgatacaacgcaccccgccgaaaggggctgggactccttttccgtttccttcgcacatctcctcgctttccgccgagagaacttttttcagtcaatcataataataataataaaaaattcgccgttcggccccgaatttcccctctgtttctgcttcatctgacgcatctgatccattcccccttctcgacgcggatcgaatcacgagcgtgtggcggcggctgtggtggttagggacttagggttggagctcctggaggatggcgagccacggcgccggggtggctgctggatctgacgccccgcacgctgaggttgtcagtatgggtcaaacaaatctatctccatatcctctttcttccagtcatcattcatggtcctctgcaactgggtcagcaacggtttcatggaacaatacagtggacaaacttagccaagatacagtttactatgatccacaaagggatgtatcagattcaggagggaatcaaaatgtagaaagtagcgtgcctcatgttgcccagtcgagtagggggatggcagatgtagcccattctcacatgtcttactctagttcagatcaacatgtctataaccctgtagaatatgccaactattattatagctacccacaagcaacaaatgattcttctgtccagcaaggagcaaaccaacatccaggtgcagcttatcagcctcttacttcatttcaaaattcagggtcttacattgatcctacaagtaacacatattacaatgctgggggtcatcagaccgtgccaggatatggaagcagcagctactattatcagaacaacacatggaatggtggaagcacagggaatacttttgctcaatcataccagaactactcatcatctgatacaaatgcacaacaaagttctacttcagtgcctgccaattctttaccatatcagcagcagtataaccagtggccatactattacaatcaatctgtgccaagtgcttctagcaatccagttgctgggaacagtactacagataacttaactggtaacatgccttctggctattcatatcctagtagccagccacctccaccaggaacaacatcatggaaaagtaattcagttgcttctgttgcacctcctatgcaggttccaggtgttccaggacagcaaagtcaatatggcaaccaggcagaaggccattataaccagggacctggtgtgcaatggtctcaaaatcattatgcctaccagacacagccataccctcagaagactaattccaatcatccacaactaagcaaccatgaagatcaacaggagactgtatattctaacagtccaagcacaaatctttcgtcgaaccatgtttctgaaaattttaaaccaaacttgcaggattctgtgacaatggacacttccagcgaaggcaaaatacaggttcctataaatcctcaaattgccccaggtttctctatggtgataccaaagaatgagaagaaacattctggacttgatttatcaaagaaacctgcctatgttagtgtctccatgcctacgaatgatgctaaagcaactcaagttggtcttgatgctagattacccttttcactccgtaactatgctacgaggaacctcaatcgttgcaagaatgatgcccagagggaggcctgccgaagcataatgaatgagatcacaaaaaaagcttttgctgagggaacccttcttactaagaactgggacactgaaccactatttcctttgcctgaaagtactgtgggcatgactggaacaagcagtgtaaacaatttaagtcccttctcatcagtttccaccccaaggaaacgtgtgaaaagtagatgggagcctgttgtggatgaaaatgttaccaataaggtggaacaaatagcaaaaggattgatcggcagtaatgtccacagtacttcggaccctaaaaatagaatgggtagcagttgggatcataggaagtttctccagtcttctcaagcaccttcaaataaagtcaatcagaggtctgccaagaagcaaaaaatgggtagtaatttgagtcaaatacagaatggaaatgcttcaagtgacagtgagaaggaacatgatctaaccaaatattatgccagtgcaactgcactagcaaattcgcctgaggaaaagaaacgtagggagcatagatccaagcgttttgaaaagagtaaagattcatcatttaaatcaagaaatgtttctgcaaataaagatgctatgactaatttgcgtgcaagaagggcaattttgtcttttcgtactagaacctatgaaggcggcactttggctgttgaggatatggattgggatgcactgacagtcaaaggaacatgtcaggaaattgagaaaagatatctacgacttacagaagcacctgatcctgccaaaataaggccagaagatgtcctggagaaggcccttgcaatggttgaaacatcacaaaagaattatctttacaagtgtgatcaactaaaatctatccgccaagatcttacagttcagagaatccagaatgaactgactataaaggtttatgaaacacatgcccgattagctatgcaagctggtgatttacatgaatttaaccagcttatcaaaagaagccaaacaagatgcagctgttaagcatgcccttgcagttcatgcttctgttttatctggcaattatgttctatttttcaaactgtacaagaaggcgcccaatttgaactcatgcctcatggatctatatgtggagcggatgcgcttcgaagctatgaaatgcatgtctaggtcatatcgcccaactgtacctgtgggatatgttgcacagattttggggttcatgagaactgatacaggctgtgcaaccaatggggatgatggattagaagaatgcgaaaaatggttgaaagcgcatgggatagttctttcagaaggtaacagtggggaattacaaatagacatgaaggcttcgtcttctacactttacatgccagagccagagaatgcggttgcacatggtgatgcatcacttgctgttgatgactttttggcacggactgacgggcatcttaaaaggtgcagcagcgatgagccaacggtggatactccgtagtgtagtatattggtgctgctgtggcagtcgtgccgagatgtggacgcactgcacttctcccgtagaaactgcaaagggggcatgaaatggagctgcccaacgaagctcgcggagctaagagagtcggaacaactgaacaaggatgtggtcatcgggttttgccacttgcgcaaattgatccagtcatccagagttgcaccgcgatgagcttcgttgagaagacagagaagaaagcagcattacccgacatgagcagaagtttttatgtcgtggtggtttgctcacaagggcctgttccgataggagtagattgaaggtattagaagatattaaatttcttagtcttgtttggaagtaaggggattggaggaactgaagatttgaaggggccaaaatcctagaaggggattttagccttggctgatttgatgacccctccaatctctctcaatctccttatcatcaaatcagccctgcctcgattctcttctcccaaacaagccagcccttactagtaaaaattgaatagaaaaaaagatttaatcctcctcaatctccttcaaccaaacaaggtctaacttgcattaagcgtagaaagtattgtgaaaaacagctacagctttgaagcatacatcatacattatcttttccggtgctctttttttctggctgccccttcctctgtgaagattgtgaattactttttcttgcacgtaaatttattttcctatcccatagaataatgaaaattatatactaatgttcc

SEQ ID NO: 38057 - DNA, 707 bp, Zea Mays
tttcttttgaggcagtgtaaccacagatgcctttatccccttccattccgattttttgttgaattcaggttcttgatgatgttctaatctacaaatgtgttagaagatggtcggatcctgtgtgactggcaagatttaccatttaaaaactatgcccccggagaatgaggagaattctatccgacttattacacgttctgatgccacatttgagaagagccagaactgagcacctacaacccttttaatatcgtacaactgacctgttacctagggggaaacactgcatgactgttgttgatatgaggcggagcgagcgattcttgcaggaggagagagtgattctcctagaggtggaggaggatgaagtggtgatagacttcaagccaactccaagtgtcgtgtcgacctctgcctccgctccctgcacacatccctcccggtcgtcttcaaggtccagacctcctccccgctcaagttcctcatcagcacgttgcgtggtgtcatgtcgccgctttcctcagtgtccatacgcgtcgtgcgaggcatcccgcttcatctctaatcacctttatgtgcacatcgtccatatgtgacccccttctccatataatttcaacaagttttactcttttgggctccgtgtaagttcattagtaaaatctctactaattattaatgctgcaaagttaacctgtcattctgtg

SEQ ID NO: 38058 - DNA, 1641 bp, Zea Mays
taaacgtggtaataagcccacgtcgcaatcaactgccatcgaaggcttggagccttggcttaaccagcaaccagcgcggcgacgcgtccgccggctcgcggatcgcctcgtgccctcgtccccgtgccggccccggccccgccccgccccgccccatccacccttttctcttttgtctttgcagcgccttctttgctcgtcgttgaaatatccacagcgaaaactaaaaacattcctccgcgacggctccaggctgcgaagtctcccaccaacgcgcgccgatccggaccgaaggcctcctgcagtcctgctctccgtctccctcgcggcctcgccccgtggatctccgctccggccgacgggcgcgatggcggagccggagcgggagcagcgcccgctgctagaggtagagcaatccgtcacgtccataccggaagatcatgaagccacatgttggggctgtgggctccggcttgtttttgcgggttactcgcctatctataagtgtggctggtgtggagccatcacgcaaagtaaccagaccacaaggaaacctgatagtgtatggttttcccactggaggcgcgtgcgggacagattctttgtcaccgtgctcatcctcttcatgctctttgtgatatgtggtggggtctgggcggtatatcctattgttttcaaaatcagcaacttctgtggcatctttcactgcatggtaacagctgtgttagctgtatttaccatcacaagctactgcttggcctcttctaaatctgcaggcgcgccaacaaatgtacgttggggcagctatcccttggttgggaaaagggatcttgagaactatactttttgtacatactgtaataaaccaaagccccccagagcacatcactgccgatcttgtaaaatgtgtgtggtggacatggatcatcactgcccatttattggcaactgtgtgggagcttcaaatcatcaagtgtttgtcatttttcttatttctgtggtcattagttgttcttatgctgctgggatgaccatatatgcaagctaccagatatggccctctgttgattttccaaacctagcatcatctcgtgattcaatgagcttttggaaaatatggttggagattattactacggttgcaggctctgccttcttcttgtcagcaagaggtctagttctggtatatctagcattcgctagtttatcagtcaatgctggtataggtgtactactgtgccagcagcttagttatatctacgaaggaaacacatatctcaaccatctaagttcaccgaatgcgttgcatggagagaggggtttgcataatattattagattttttgggtgcccttatccaatttccagagttctgttgcgatactcgaatgctggcaagttgcaggataattcagggtcaaaacttctctagaggtttcagtgatacactcttactgttccagcaactgaggcagtgtatggaattagttgttccgagtcaagatggttctgttacctggaatcatgatttgtgaacctcagttgaccatcaacagattagtttgagtaactgaagttgttcagggacgcaacactcatgacagtccatgttctggactctggagaggagttgttcatgag

SEQ ID NO: 38059 - DNA, 2056 bp, Zea Mays
taaacatgtttcagggacgttctacacgattttgttaaaacgcccaaacgttctacactttaattatgttttagcgtttaaacgacgcttaagcgacgttttaataaccatgttgctgacatgtacatcagttactatatttgtgtttggtctatttttctgattcaagttccaaggccatgtcttagtttcaagcactagttgcacggatattcattataccaaaaccttctactcagagtaaaggatgcttgaaaataatgatctgagttactgtaggcccacaaactttttcaggggcaccagataggtccgtaaactttgaaattccatttctggcacactaatcttgagatttggttcactccaggtccatgttgccaattaagcagatcagggctgatgtagcagtccaggtggcacgatcctcccagctggctcacatgatcggtgcatgatggagctgggcctttgctcatatgcagaaagcccaccccaccctgccaccatcgccgcatcctcccttttcctacctgaccgagggtttcgtctggagttcatcgtgcgggagtgaaatcggcagctcgattggagtgtcacacaatgaggcggggtcgttctcccggcgatgaggccacgctccctggtcgattggtggacagagtgtagcggaaaaaagggagccaccacccgattacagtaagtgcttcgaaggcccaatctttgatgttccatggttattggattccagttttgggcaaggaaccatggattggggcatgtctaagcaattttgccaaggctagggtttctgctttgtttgttctaggtccaattggtgccagaatgtgttatgttgttgttcatgtaggtgatgttatgttagtgatcagttcatagtggagatacatcatggtgattttttttgttggtcatggtagtaatcagacatacattgatgagaaagtgaactggatcgatcatgtgacgtcaaaacttggcctccacggtgctttgatctcagtttcaagcttattatacaaggagtccagaattaaaggttttattggctacttcctggaaaggatataaaaaacttcaacctgcgagggtaagacagacacagagtattgtattaagagaataccttctcacacaaatcgagaaaccccccgaacccctatcccaccaatgcacgatggcaccatgcccatgtgagaacgaccgcgacgggggctagaccttagacatgtgttttggtgtagatgattttttaaccccagcttaaaatttgttaccacggggagtcaaactcaggacctgaggaatgctacccagaccacctaaccaacccagctagaggccctttcgctcctggaaaggatatgacagatgacctcacattgatagttttagatgaagacactttgcctggtgttcatactgttttgcaggttgtggccaatgaatgtatcctttggtgtgctgcgggtgcctctgctcttcaggagctcctcactcgccaactcgctaaaaaaagggcgtacccagtgtcgtaggcttcccgcactgtgcggggtcggtctggggaagggtactttaagcgtcaagccttacccgcataatatgcagaggctggggctcgaacccgggaccttccggttacagacgttgcaaatcctgctttatcgttgcctagagttattagcccttccaaagttgacaagaggcagaaaaacaatgaggcaacaaatgatgattgccctaaagaagcagaggacagctcaagtgatgacagtgattttgttgactgattatgacttcgagaatgatgatggcctttttgttgacaatgttgatgagcatgggatagatgaaagatgaaggtattgtcaaagggaagaatatagcaaagggaaccaagagtgcagcaggaaagaccagcattggaacagaagtagttgctcatggtgataatgattgtgcaatggagtacattgactactagaaactattattgtgatataaagctaatctcaatgagttataatgcaaa

SEQ ID NO: 38060 - DNA, 284 bp, Zea Mays
aaaaatatcgttgcatggacataactactcctgacctttacgaatctcgacggagggggaggtacctgcacgattcggtggtggccaggcccaggctttcccgaaatgatggcgtcgatgttgctacccacagtacaagcagcgtttgcggagtagacgaactccggcgagatcctccatggcacaggttcgatctccagagccggcgcccgggaccctggtgacggtgtgtccgattcctttggtggctgcttttagttctctctcggcaagggtacgagcgg

SEQ ID NO: 38061 - DNA, 1907 bp, Zea Mays
gagctgagctctagtgatagactggtaggtcctagctgcgcgcacgtgcactagctaggacgagccatactgcgcgcgcggcattccgtccatcggtcgattggtatggcgggtcgtcggggcgactcggctgcggcgccgttgctggagaacaaggcggcgccggcgtcggcgtcggaggcggaggcgggcggcgggtaccatcaccacaacaacaactactactactacgtggacgggtgccccgggtgcgccgtggaccggcgcaaggcggcgagcccgggcatcccctacgccaacttcatctacgtctggatcgtcaccctctgcactgccctacccatctcatcgctgttccccttcttgtatttcatgataagggacctgaacgtcgctgaaagaaccgaagacatcggcttctacgccggcttcgtaggtgcctcgttcatgtttggtagatgcttgacttcaaccgcctggggaatagcggcggaccgtatcgggaggaaacctgtcgtcgtgttcggcatctcctctgtggtcgtgttcaacacgctgtttggcctgagcgtcaactactggatggcaatcgccacacggttcctgcttggtgctttgaacggcttgcttggaccaataaaggcttatgccatcgaagtctgccggcctgaacatgaagctctagcgctatcacttgtcagcacggcatgggggataggcctcatcatcggcccagctcttggaggctaccttgcactgcctgcagagaacttcccggctatcttttcacctgactcggtatttggaaggttcccgtatttcctaccatgcctttgcacgtcggtcttcgctgctgctgttctagtgagctgcatatggatgccggagactctgcacaggcacaaagttcacgagagtacgagccaggacgttgaaaaggttcaagaaagcggcattaggaagaagaagagcttattcaggaactggccgttgatgtcgtcgataattgtctactgcatcttctcgttccatgacatggcttacacagagtgacaagaagtatggtggactgagcttatcatctgaggacgttggtcaagttcttgcagtcactggtgccagtcttcttgtttatcaactctttctataccctagaatcaataaggttctcgggccgatcaaatcttctcgaattgcagctatcctgtgcatacctatcctctttgcctacccctacatgacatacatctcagaaccaggactgtcaatcattttgaacattgcgtcagcgataaagaataatcttgctgttacgatcattacaggcactttcatccttcaaaacaatgcagtgcctcaggatcaacgaggagctgcgaacggactgtccatgacagggatgtccttcttcaaggcacttgctccggcaggagcgggcattgtgttctcgtgggcgcagaaacgccagcatgcctttttcttcccaggtgatcagatggtgttcttcctgctgaacgtcgttgagctggtcgggctcatcctcacattcaaaccctttctggcagtgccagagcgatgcgatagtagatagctgttctttggaggatgaactatagaagttttggaatgattcaaaatttcatcgtgtatggcagcaataccagtgagacccaggaagaagcaagagctgtgtactggtaaccgtaagcggtgtatgcagtatcgctgcattagcatttgtgcttacgaaatgcacatgtatgtaggtgataaatgactaaatgtggccagtggatcgagttgttgctgcactgtgagtagtggtagtgtaagattcagcgactcgaaattgtgtgttggaaataaaattggtaggtgttagacgcgcggtatgagcgccaatcatt

SEQ ID NO: 38062 - DNA, 3156 bp, Zea Mays
tcggcgcataacagcaccaccgcgccgcgccgccgccaccccctttcccgttcgttcccaggacgagtcgcagcagccggccagccgcacagagtggtggagcctaggaacagaggaggcgccgagccatctccgcagcctgctaccggggaacgggcgggaacggactctaacttagagagagcgcgggcgagagaggtcaaccgcagccggaggcgatggaggtggtggcgctggtgagcggcggaaaggacagctgcttcgccatgatgcgatgcatggactacggccacaaggttgtcgctttggctaatcttatccccctcgacgacaccgtcgatgagctcgacagctacatgtaccaaactgttgggcaccagattgtggtgagctacgcgaaatgcatgggcttgcctcttttccggaggcgcattcgcggatccacaagggtctcaggtacagtgtcacggcaggtgatgaggtagaagatatgtttgctctgttgagcgaggttaaacgtcgaatcccatccatcagcgcggtgtcgtcaggtgcaatcgcatccgattaccagaggctccgggttgagagtgtttgctcgaggctgggcctggtctcgctggcgtatctatggaagcaggatcagactttgctcctagaggaaatgataaggaggggcattgtggcaataattgtgaaggttgctgcactggggctgaaaccttcttcccacttaggtaaagaactggctgaacttaagtgtcatctgctccaaatgaatgagaattatggaatcaatgtctgtggtgaaggtggagaatatgaaacactaactcttgactgccctctatttcgtaatgcaagaattattcttgatgactctgaagtgatactccactctgctgattccattgcttctgttggaattcttcatccacgggcgtttcatcttgagcagaagccagattcatctgatagaattggggatggttctgccgttcaagagagttctagttgtgtatatgaggttgatgaagttaccactcacgatgatgtgggagaaaaacaggccctgagtccagctgttgatgcttacaccaatgttgacctatgtatctcaaagacagggaacaatttgcgttcaatgagctgttggattcaggatccatccagagcttcggaaggcctgaaggcagaccttatagcagttttgagcagaattgaaaatcagctcaaggaagaagggttaggttgggtgaatgttttgtacgttcacctctacatttcaagcatgaaggaatttggattggccaatgaagtttacgtcagctttattacggaaaagaaatgctacctgggtgttccttcgcgcagtacaattgaattgccactagttcaggctgggttgggcaaagcatatgtggaagtcctagtttcaaatgaggtggtaaagagagttctacatgtgcaaagcatctcctgctgggctcctagctgcattggaccttatagccaggcaactctttatgaagatattctttatatggctggtcagctgggccttgaccctcctacgatgaagctctgtcttggaggtccaagagcggaactagaattagcactacaaaacagtgaagctgtggccaatgcctttagctgctcaatctatatctcggcaatacactttctggtgtactgctctgctcagttgacgtccagcgagaaggaagaaattgaacagacattgaagagttcttatattactcgtttggatcgctcaaaaggtggatcatatccaactgttctgtacgtattcgcgtcagaccttccgaaaggggcacgtgtggaggtaaagcctatactgtatgtcccttccactgatgattgggttgctgccgaagagacggagaccggagttccactgccagcaccgagcaaaacctggactgattgtaccgcaccatactctgcgttgcgcgattcgtgttgccaggtccacacaaccggcgggagaatttgttccgccgtggtgtcgatcacagatgacatcgcatcgaagatctgctctgcagctggacagctgcaccacggagaggagaatctgaaaataatggctagattctgtgctttccagatcgcgaagaccctggcagacaacagattttcctgggacagcgtaacgatgttgaggctctactactcggtagatctcgccgtggcggcagatgcagtgtccggagcattttccgaggccttggccgagcttgcccaagacaacccttccatgagaactgacgttcctttctacaacgttgtgcccgtagccggagctggccgctctgcgtgtgccaacgacataatggcgtgcgagttactggcatccaacgtctccagtgcgaagtccataccagccgaaccgttcgctgtgacgcctgcttgaatgcagctttccttcggaaattggaggtgggcgcacgttggaatttctgccagaggagccggtggccagtcaactgccagttggacgacgacggttgaccagcttctctagggctggcggcggtagcttcgtttctgtgctggcggtcgattaaaaaaaaagaccgtacggtgatcatcacagatgcacccatactgtattattctgtttcagcgtcctatacaaagtatacattgggtctgaattctgattagcctgtgctgatgcttgcaatgacattggttcttctgtgtacagactacggacagagtcccggtcagtaacgtgtgtgtacttgttcttcctctgtgttgacattcttgctcgatggtggaacctgtcgcagttggcggaggtgaagccgcgtagctcacttaggtctgccaaacacttcacttcttagattgtttctgtggaaatcgcttctgatgaatgcaaaatcaattaagtcgtccggttttgatgggaggaatcctacgcttcttaaactctaaattgcacatatttctttatttttctccgcatacaaatttgatgttgaatgcaaaatttatcaagtcgtcgtgtcttgatgagaggaacccgacgtttcttaaatcctaaattgcacagatttctttatctttttccacatgcaacattgttgacatctagattctcgttacagctagatcttt

SEQ ID NO: 38063 - DNA, 1792 bp, Zea Mays
tcgatggccctattgcgtaaaacaataaacccgccttccccaccactggtcatcagtctccactccacgcccgacagagcaggaggactcagaaatggcaatcccagtgcgatcggctgccgcgccccgccgcctcgttccgtcgatacctccggcgagctctggacatgttcgaggactggcgtgcttcggtacccgaaccgggcctcgcggtgcaagagggttgtcaatggtggtcgccgactccaccagccgtcgggccaagcaagcggacggcggggacggcgtccttggggcgcctgttctcggagggctcgggatggagggattgggggatcagctcagcgtggtgatgaagttcggggggtcctcggtgtcgtcggccgcgaggatggctgaggtggccggcctcatcctgacgttccccgaggagcgccccgtcgtcgttctctctgccatggggaaaaccaccaacaaccttctccttgctggagagaaggcagtagggtgtggagttatccatgtttctgaaatcgaagagtggaatatggtcaaaagcctacatatcaagacggtggatgaacttggacttccaagatctgtaatacaagacatgctagatgaactggagcaactattgaaaggtatcgctatgatgaaagagctgacgcctaggaccagtgactaccttgtttcatttggagaatgcatgtccaccaggattttttctgcttatttgaacaaaattcgtgtcaaggcacggcaggtacttcttgatattttcttgatttgcacagtgattcagtgagcttttcaggttatgaatgcagcagcctacaagaatttgctatagtatccctgccctatggtgggggtgtcttgaaactttgattagtcattgatatttttactacatatgcacttcgtgatctcaagtttcagctcattatgttagttgattgccactagtattctgcggaaatttcacatttcgataatgattcgttcattgtccttttatgtgtgcgtggaaaatattcttagtattttttagattttgtgattaatttggtattgccataaaattgtaaccttttagatgatggagataatctccgtccacttcaccaaccaggttacacaaaccattttatcctttaaaatgtggacaacaggatttgaacccttatagtagtggagtcacacacccacaactcaattgagtgtttgactatgatctggatttccctttatttaatatctcaatttgatacaggggccatgtaaccagcctagctgcaaatccccagtacatccatatacatcccccattcttctacattatgcaatgatgtgaactcacgttcattattaattttatttgaaattttttgcagtatgacgcatttgatattggtttcattacaactgatgaatttggtaatgcggatatcttagaagcaacctatcctgctgttgcgaagagacttcatggggactggatacaggatccagcgatacctgttgttactgggttccttgggaagggctggaaatctggtgctgtaactactttaggccgaggtggtagtgacttgactgctacaaccattggtatggaaagatgttgatggtgtacttacttgtgatccaaatatctacccacatgcaaagactgttccatacttaacatttgaagaggccacagaacttgcttattttggtgctcaggacttgaaccctgtatagtgtgaccaggctgcttctcagtgaataaacaaatctttcagtt

SEQ ID NO: 38064 - DNA, 393 bp, Zea Mays
cttaaactcagaagctttttccagaaaggagagtcattttgtttttgtttaacaacaataaggggttttcccttaatatatttactagcaataatcttttgccataaaccattcgaattctcgatattccaaagccatttagaaagaagagcatcattcataacctcaaggttcaacactccaagaccaccttgaattttgggagaacacactgacacccaatccgccagatgaaatttcttggactgtttacccccctgccataaaagtctccttcttaacaaatcaattttcctaataacagacttaggggcaggatagattgacagcatatataaaggaacattagaaagacaactattaagtaaagtaagtctaccaccaagactcaag

SEQ ID NO: 38065 - DNA, 2432 bp, Zea Mays
aacccctccgccgcccccgaaaaaacatataaaacagaaccctcgcatcctgtaaatggcgacacgcctcgcctccatcttctctgccgtgcgcagccccacctcagccccgccccacactctccgccgcgctctcccaagcttcagctaccggcgagcgcatccatctcagccccgcatgtcctcctcttcagccgcctcctccgcgccgccggccgccgagaagcctacagtggcgccgttcgggtcctggaggtcgcccatcactgcggacgtcgtatctggcgcggataggcgcctcggcggtatcgctctcgctggagatggacgccttctctggatcgagggccgccccgaggagaaagggcgtatggttattgtaaaggaggaggataatcctgtggatgtcatacctcaggaatttgcagcacgcacactggctcaagaatatggaggtggtgcatttgcagtcgacaagagtgttgttgtgttctcaaattacaaggatcaacgtctatacaagcaaacaataggaactggtggtccacctgtgcctcttacacccgattatggtgcgccaaatgtcagttatgctgatggtgtatttgatcctcacttcgaccgttatgttactgtgatggaagatcgtcgaaaggatagcttgaatcccaccacaacaattgctgctataaacttgagtggcagtgatgttcatgaaccaaaggtgctgatcagcggcaacgatttctatgcatttcctcgcattgatcaaaataaaaagcggatagcatggattgaatggagccatccaaacatgccctgggataaatcagaactctgggttggttacttcgccgaaagcggagacttgaccaaacgggtctgtattgccggtggcaatcggctgctgattgaatctcctagtgaacctaaatggtcaccgaaaggagaactgttttttgttactgacagagggagtggattttggaatatttataaatgggttgaacaaaccaatgaaattgttccagtgtattcactagatgctgaatttacgagaccattgtgggtttttggcatcagctcgtatgattttcttggaaacagcgaccacattgttttcagttataggttctatttcattgcttgacatccctttctctgatttatctgatgtggttgctgcagatgattacttctatattgaaggtgcttccgcgagtattccacggtcgattgctaaggtgacattaaatgaaagcaaaaccaaagtagtcaatttctcaatagcctggtcgtcctcaccagacctcgtacaatatagacctttcttcagcacaccagaacttgttgagttccctacatccaagtctggccagaaagcttatgcctatttctacccaccatcaaatcccaattttcaaggtttgcctgatgaaaagcctcctttgcttgtcaaaacacatggaggaccaactgctgaaacacgtgcaattctggacctcagtgtccagtattggacaagtagagggtgggcatatgtcgatgtcaactatggaggaagcactggttatggaagagagtatcgggagagactattgaacaaatggggtattgttgatgttgatgattgctgcggctgtgcgagattcctggtggagagtgggaaagtagatgggcagcgcctttgtattactggtagatcagcaggtggatacactactttagcttcacttgcattcagagacacgttcaaggctggagcttctctctatggtgttggggacttgactctgttgagagcggagacgcacaaatttgagtctcattatatggacaatcttgtaggaaatgaaagagcttactacgagagatcaccaatcaactttgtcaaccagtttacttgtccagtcattttgtttcaagggttggaggataaggttgtgccaccagatcaggcacgcaaaatatacagtgccttgaaagagaaaggtttgcctgttgctttggttgaatatgaaggagagcagcatgggttccgtaaggcggagaacatcaagttcaccttggagcagcagatgttgttctttgcaagattagttgggaagtttgaggtggcagatgatataactccaatcaagattgagaacttcgattgatctcttggagagtggtgtccggttcgaagttttgttcacgtaacccgattatatgttcagtacattagccgttgcagtaccttttaggaatacgacttcatcttatttttgagggttgatggaaatctcttttttgcgctgtaacgatgaagtcaccttgttttctgttcggttctagaatgaaatagaacggaatgacactatcctttatttggttgatgagtgaaaatagataatttcataactataatacattcatacaaccatatatat

SEQ ID NO: 38066 - DNA, 1738 bp, Zea Mays
ggcacctcccgtttcctgccctcttcttgttcttcttcttttttccctaccctccgccgttgctctgcaaggcacgtcctgcacgcgccagagctaggcgataaactggaaaggagcgcgcagcgcaggcttcgggctcctgtctccgccgcggcgtcctctcgctttttttttttttgcttcttgggaagcacaaaggctcaggtctttcaggacttgcaggctctgcgcagcgcgatctgattgtgaatgaaacctgcaaaggaatagtccatcacaatgctaaggttgcttcccgactgaccacattgcgcttgttttagcctctggttatctcgtctggaaaaaaaaacccagacatctgaccgggtcagacgatacaacccatatacgtacgtcgagtcctcagagttcaattctacctggaccatcgcacccatcttggcccagagtacttccgcgccgcgctacgaacgaggccatccgccgccacacgccgtcggccatgccgcagaggtcggaggcgggcactgctggggagggcgacgaggagcagcggctgcgggctgctctgcgtcacctgcaggcggaggcgggggtgctggagcgcctggtatacaagcaccggaaccagcaccgcggcgccgcctatttccaatacctcctcaaggtgaggagggacctgaagcttctgctcggcgccggcctcgctgaggttctcaacgccgtgttcccagttctcgcatgccgcaagccggccaacacgatcctcgtccccaacaagcagtctaagaagaaacctgttgcaaaccacagccatcaccagaggcttttgggtgtagcccgcttgttatcccagatgtctgaacctgttatgaaggcagcaattcagataacatttttacttgctagatcattcttcgttgatctttgcacggctgtgctttctttgcttgcacgaatgttacttgatgttgtgtctatatacaataaggtcactgatcttactgaaaggaagcaggctgttaagattagcatcagtggagtgcaggctttcagagagtactacccctctatgaatgatgcatgtacagttctggagtgtgtatggataaaagataaattcgttttgcatgaaaaggttaaagatatctctcaggaaacccaagttgagaatcagaagtgctgcggtcctgaatctacagtccagtatgaaacaattgcactgattagtgaagattctacatagcggaagtcctcctggcactggagtacttgcacacgctcggtatcatataccgcgatctcaagcctgaaaatgtccttgtccgggaggacgggcacatcatgctctcggacttcgacctctctcttcgttgtgctgtcagtccaacactgatcaggtcctcaaaccctgacgcagaactgcagaagcgctcaggaagagcagccaaggctactgtgttgagccagcctgtgttgagccgtcctgcatcactcaaccgtcgtgtgcagccccaaccacctgcttcggcccacgcctgttctcctccaagtccaagaccaagagagaccggtaaccaaaaccagaagttgccaccccgatcagcccttggcctgagctcatagcggagcccagcgatgcacggtcgatgtcgtttgtgtgctatattgtttttccgttggtagatttttttgaggggaacctggttaaagttagacaagaaaaatgacttgg

SEQ ID NO: 38067 - DNA, 1321 bp, Zea Mays
gggacagattatcaattgtaattttcaagactgcttcagctcatagttgggcatgcatggatctctacgtttttgcaacaccatataggataacatgggactattattttgctgctcgggagcacactttggagattaaatcatgggaggaagaagcggaattgaaatatgtgaaggagcatggcatttctatttttctcatgccatctggaatgctcggaactttgctatctttgattgatgtcctgcctttgttttcaaacactgcctggggccaacattccaacctagcctttttagagaagcatatgggagcctcatttgagaaacgaacccaaccttgggttgctaacattagaaaggaggatatacaatctggtgactttttggctttatcaaagattcgaggacgatggggtgggtttgagacattagagaaatgggtgactggtgcatttgctgggcatacctcggtttgcttaaaagacgagaagggtgatctttgggttgcagagtcaggctatgaaaacgagaaggatttcgaccttcaggggatcattatggagattgaaagacgtggaatgtcttttgatcagttgctcaccatacccgagcaagacgaatgggtgtacagtgatggtaaatcaactacttgtgtcgccttcattcttgcaatgtacaaggaggctggaatattcacccctttctcggagtcgatccaggtcaccgagttcactattcgtgacgcatacatgctcaagatatttgaagacaacccggcaaggcttccaggttggtgcaacgcaggcacggacaagcttcccttttgccagattctcggagagtacagaatggagctaccagagtacaacacgattgaaccttatgcgaaaatgaacgagaactgtccgtccttgcccccaacgtacaaacgacccgcacgctgctgactacgagattgtctactatgtatctttctgcagctgctgcctttacacagtggcattagagtgttgttgctatgttctgtaaataaaagacactatatatataggtgcttggtagatggtagttcttaccagtaatgtagctgcgatgtattcaggttcacggttttcagtcgatcagttctgaagccacggcgtcggcgaccaatatgaaggttaggatttgtcagctccggaaagttgcttatatgtatcaatgtatgtatgtaggcaacattatggcttggtcataaattgtgaactccgtcaagaaataaatctataatgcaacgtcaggtgattctgatatgtgattaagaaaataaaaaaacaaa

SEQ ID NO: 38068 - DNA, 1102 bp, Zea Mays
gcacatttctcttctggaacataagtagcgtgcaaacttcgaccgggaccggcgatatccgccatggccaccaccactgccgccgctcgctggagcttccccgcccgtctccagctcctcaccagccgccgcttttgcttccccgcctcctctgccgcgccgcccagttctgtagcggggttcagttgggccgacgccctccgcgtcgctggggacggcgggcgcggcgacgagtccgacctctccgggtacttccggaaggtcaagagctgcaaccgcggaatggataaaaaagggcagttcgtgaagttctctgtggaggatcaggtcgtggggtacatccacaagggatttatcgaacacatcagagactttcatgatgtttttaccattgtcatggatgacaatggcagcaacactgtggagcatgtgtctctccagtcatcactaaggactccagaagaccgaacacatgctattggaagtgtcattaaaagccttggagaattgattccagctctacccagtaacgtcatcttatggcatgcctgtgtacttctctctggaacgtgctgctgctccttactttggtataaaagcttatggagttcatatgaatgggtatgttgagaaggatggtcagaaatttctttggattggtaaacggagtgatgtgaagcaaacatatccaggaatgcttgatcatcttgttgcgggtggcctgccatacggaatgtcctgcaaagagaatatcatcaaggaatgtgaggaggaagctggaatcacaagatccatatcaacaaatgctacttctgttggagcggtttcttatatggatattgaaggctttagatacaaaagggatgttctcttctgctatgacctccaacttcctgctgattttgttcctaataatgaagatggtgaggttgatagcttcagactagtccctgttatacatgctgcaaacattataaggaggacagattttttcaagccgaactgcaaccttgtgatcatcgacttcctcttccgtcatgggtacataaacccagattctcgttgttacttagatctgctgcaaagcttgaggagtggagcg

SEQ ID NO: 38069 - DNA, 4883 bp, Zea Mays
cgtcccgtgtgcgtcttcctccacgcatcacacatgccacacgcgcgccagcaatcgcccccggtatctcgcccgcgccccaccaactctgcccttgaacccgcctgccaccaatctcgtcgccgggtatcccgcccgccaccaaaccgcgccccctgtcctcgccctcgacggcgctgccctttgtgatggtgcccttccttccccagctcccccaaatgctgccaagtcccccaccaacgccgcccttccttccccggcagcccgcccccactagctccgcgctccgcgtgccccaccagccacgctagctgccgccgggatactcaccacctccgcgcccccaccaaaccgaaaggcgagatccgccgccagttccacgctccgcgcgtcaagagcagccatcacagtgatgccgcgcgagggagaggaaggaaggccgcgtgagtcgccgcagggaaagctgccaggcatcaccgtaaggtgagatccggttgcgcgtgagggagaggaaggaaggccgcgtgagtcgccgccgagaaagccacagggaaagccgccagtgtgagtcgccgccgggaaagccgccagtgtatgatggttcggtcatccagatgtgggtggcgtacaacgttgtcactcatttcctcctgcactgtaccgactgcaaggcgcaagctcactggcgtgttcgacctcctgaagattatgctatacaaggtgtgcgcaaatggctcatcggcgcttcccgattgggagatggaggccagcatcatggagttctacgctgttgcatcttctaagtggcatcaccgagctggacgacaggaaacagagaaaattgtgcctgaaaaaatttaggagcagggatgagcatttatcagaagtggacacaaagagggagcttgagtgtgggctctgcatgcggtgctttgagtattggtaatagctcttttctcctagcttaaaatcatgcataaagtttgattttttgtaggctccacatttaaacaaatttggtcatgttagcttatggatggcataaaagtactatttctcatgggttctgaagcagaattatagtcaagtacttctcgtgttgaaactatggactgggaaacatgacaaatttgcttttagtaaaattacgaagtgttgtcttttttaaaaatattggtgtcatgtttttttaatgaagcagtttcaatgtatgtggtcggtttggagcatttttaggagacatgatatgtgggatagaaaagctgatggagataacctaaacatagacaaacagccacatacctccagcatggacattccagtagtaattgaagaagctgccaacaaatacaaagcaccatatctctgcaggacaaatcaagataatacactgctaaaataagttgtattagaccattaaagtatgagcatttagctaagagttgccctgtgttttttgttttacccatgataactgtcagtacaagtgtacaacaaattttatagtagtactttggaggacaaaactggtgctggtcattttagatattcgtgcctctcaaataccttaagatggcttgaattcttattgttcatatacattatcgtttttaggcacacaataatgaacctctacagattgtttgtggttatcatgctcttcctcaaccacctcatggtggtgaacttgtattccacacccttgaacatgtccaacctctgaaatactcctggcctggattacccttgttgggttttgtagaggcgatttgaacatttaaagtagatacttgacctatcatgactctagcctgcagtatcattcctccatttctctaatcttgaaacttagaatatagatcaatttacatttggcgactgcagaagaagctcaacactcaagaccttttcttatgatataatattgacaaccaagattttcttctatctttatttttttgctgtttgtgaaattccacagataagacctgtatgctctggcgtgagttatttttctcaatcaacaggaagaagtgaagtgagagatttcattagttcttgaaccaaccaaacatttttgaactgtaaatacagtagggcactgtaacaaaagtttattagaactaaagaaacaccaatattttagctactttaaggcaggtccattcaaaaagttttgtttctcaccctgctcaggctttgtacagtcttttttttgtttgctgacgccttcctaggaaaggggatcttctgcgacgatagcgatgaagacgaagacagtgaccaggagagggaggtgaacaaggagatggttgtctaccttatcgatgcctcgcccaaaatgttcacccctgccaccacctagggcaatgaaaagcaggagacacatttccataccattgttaactgcatcacagagtctctgaagacacaaattattggtagaacttatgatgaagtcgcaatatgtctctttaacactttattagttattgtcaatgctaaccatttcacttattaagtgataattttgcacatatattagtattactcaagacgatattatgaagtacaactgtgtaaatgttcttacaataaataaaatttagaaggtgcctggatttgtttattagacaataatattttaataacagtttgatgaaaaactacaattccagatgatgctccagttctgcaacttctttccgacaaaatgtccactcatatatttacaactctataagggtttagtgtgggcgtccacaccccttcaccatgcccccgcctcagcccccgtcaaccacgcaaggactccagcgtgaaagtcgggcccgtcgccggccttgcatcgtcgcgacacactccgtgcctcccttccatcatcgctcgatcgcggtttcgtcgcactccttccttcgatggcactcctttccatcctcgattcctcctgccccagcaccggccagcctcatcaggtcattcctcctcgctgtgccccctccaccgtattcaaccacctcttcctcggcaccaaacgtagacgcctcctccgcgatgccctcagaccgcccgtcctcgcccaacatctccttgccgcatatgcccgcagcggctgcctcgcatcccgcccgcacgccacctccttgcacccgcgcatggatgccactgcacgcctactatggaagggggacgcctactattgaagctcccatccacgatcccattccaaatccagcttcaaatttgccccaatctgcagtcaaccttccacccaacatcttccccttatatattgttgtctctgctataaaagacttgacagaggcgaggcctccaaaccactaccactctccaccgattcactggagtcgcgagacgttggaggccctgagacgttcaagcctcatctgcagtctcctccaaagaggtgagtctcacttaatgtttggtaccttctgttttttgggaatgtgggttcattttggatgcttccggggcagtggtaaacactttgctctgtatatattcttgcatctctttaatgtaggtccacaaatgatttgagagctgtaggtctacaaatgataatgcaacaaattctgattcatgcatttctttactgtgtggaggccatttaattacgcctatttgatttgagagctcgagtagacaagatcatgtaggctctgaaatctatcttctggaggaccaaggccattaaagtacagggttctttcagcagcaatggcctcactatttcttctaaattaccaagattctcggacatgtacactctcacgatagcaagtgtagacccacagtttatcgtagcaaacaagccaatccatttcactaagagcgtgacaaagtgtcacagagcccttcttcttcgctctgccacccacaccgtggcacctcgccgagctccgcatcgaaactgcgttgttgccttctccgtgctctgcgttgaagacatgcagcgcaagcgtcgctgcctcatcccggcctcctctagacgcaagacgacaagaggatgctgctcgagctgtccccttggatcccacgccgaacgccctgtcacctccgtcgacaacatcaagctcctgtccctcccccacctcactgcaatagattcttcggttgtggaacttagggagagttttgagtcgtggtggtgtataaagcagtcgtcaagcacaagctcctccaaagtaccatcaggatcctacagtagaagagttagccaaaacactcgattgttggccatcaatgaattattatatcacgggttgtaaatatgttcttatgccatgaaaattcaacgaatgtcacgcccttttcgtaatagatcatgttaaaagcatgtgacttttatcgactttacaccgactcaagattggtgtaaacacatgccatacaagaggtttgcggaagctattatcatggcctcaaagaaatataagattgcttacaacaagaaacgttctggatgggcggaggatatctttaagtgggaacatacaattcagactggtgttccaattgacttaagagggtttaataccagctacctcgttctacaagttatgaccatgtgggggaatgacagacgaatgaaatttgttgggaatgcaaatattcttcgaaggaactttgtgattgatctgttaagttatgaggacaattcgtgccgatatgccatccctgcaaacatacaacagagacttatcgatatcgctaaaaaggattagctgattagtgtacggttgtcgacacatttgtctgtaattaaaaattctaaattatctttttagaaataatttgtgtgatattgataatgaaaaacacggattttgcatattatatagtgatgtttgtcgttc

SEQ ID NO: 38070 - DNA, 2104 bp, Zea Mays
cgttgcgtccccgcttccgttactccctccgcgccccgctcctcccgcctgtcctccacgcgacgttccttgtatccccgtcgccttccttgggcagttgggctgagtcctcccgtctctcgcccctgcagatatagttgcggcggggtttccttcttcgagaaagttccgaaccagagggagccgcgcggaaagccggaggcgtcccatgctgctggcagctgatggttaatatgagggacaatgactcatcaagcgacgcacaattggacgagccattaggacgggtatcgatactctcttacggttctgggcatatgctcaacgacatcacatcgtcttgttggtttacctatttgcttgtgttcttgacagatctgggacttagtccaggtgatgccgctattgtgatgctttctggacaattggcggatggcttcacaacaatctttgttggggaattgatggatcgctttggacatttcaaactgtggcatgcaggaggatctattttagtggcaatttccttctcgtctgtttttggtagctgtgttccttgcaaacttatgggaattaatacatctactttggagactgttggatacagcacatttgctgctatttttaatgttggttgggcagttactcaagtcgctcacatgtctatggtaaactgcattacatcaaatccaactagccgggtttcacttgtaagctgtcgtaatgccttcacgatggttgcgaatcttagcctgtatggcgttgctttggtgatatttactctattgcagtcagtgaatgtactagttcagtatcggtggattgcttaggtgtccatttccctcggatcttgctttgttgtcatcttcttgattggaaccaaagagccaggatcaattcggcactgtttggataagagtccttccagaatttcatgggactactggttcaagagagtattgtactaccaagttgctctagtctatactctgactagattggtgaccaatgtttcacaggcatttcttgctttctatgtaataaatgatttagaaatgaatcaatcctccaaagcattggtacctgctattatctacatctgcagtttgatagtatctgtaatattacaggagactagatggtcaagttggcgtcttaagctttacttttcagctggagcagtgctttggatattgtcaggtcttggaattgttcttctaccgagcagaatgcacaacctcatgtatgccatttcaatcgtaataggagctgcgaatgcacttatgacagtgacaagtattagcatggaaggtgttctagtaggagaagatctaaatggttgtgcttttgtgtatggctcattaagttttgttgacaaagtttcatgtggaatagctctctatgttctcgagtcctatcaaggaagtacaaagatcagatcaaatttaggaacaacatctggctattcagttacaagacttggcttgggcttagttccagctgcttgttcgctgctttcagctatagcagcttataccatggagctccctgatactcagaaaggacctttggtggaaccccttctagcataacttcactggtggcagtgttacagtttcaccgtgagatttcacagtaattgctcgatggaatgacactgctgctcgagcctgaagatgttagcgacctggtcaattcgttttgacttcgtatatatagtctgaataaattatgacggaggggatatactgagacacgtttgaatagggattagaagtgacataggggggctaggggcaagaagatctgtgttgatcatactgagctttacaagtcattctgcaatccaatgtaaatataacttagcttcatttcgaaagcatcaaaactgccaactaggcacatgtagcgacgatgggcaaggaaaagaatatctctggtccttgttctacgctataatttcattgtatatgtagcatcatgattgaaaagaaatatcttatatttatattgatgggtgaaatagtgtcgcctatgctcatgtaaattgtttctgacatttagaaattaaatatgcttgagaagagagcactaatctgtctaa

SEQ ID NO: 38071 - DNA, 6411 bp, Zea Mays
tttcgagacccctctccacacttctcgagtcaatcaccacgctagtcgtcgcctttctcccaccgctcggcaattccccgccagtgccctctcgaatcaatcaccacgctcccctgcgacgacgtcctctttgagcacatcctctgccacctctcctccccatccaatacctcacgcatcgtcaccctcgacgacctcaagaccggcaccctaccctgctgctgcgttcctgccatcggcgactcgctcccgcttctccacgacatctccgtcgacaagggcgagcgcgccacccttctcgctggagccagccaccaacgtcgccatcccagttgagtacctaccctgtattgacgcgcagattgtcgcccccgtggcagggaaaagggtcgccgctgatctagactaatcaagtcaggcggacgtctcctgcctccccactgcactaatcaagtcatagcaggttagcagccccaaaaattcccagagacatcgatattctcttagttgaaggtgcagggggtataaagccgacgagaagaataccaaaaagggcagaagatctcaggtttcgcgaagcaatactgaaggccgatttctagcttctttttgcaatatgctttattgggattggatctggaatcattgttgttaataatctagcacaaatatgaattgttggagttgttgccgatagaaccactgaggcactgactctctatctacagtttctgcaattttttgggtggctaggagggggtgttgcttcttagtatcttgtcagcgacccggcaggaaaagaaaaataaatgaaatgaaatgcaggtccgtcctggttttccagttcatatcctcgtctctctctggccgtctcctcacctcacggatcaacaggcggacatagcagccgtcctcgttctgcctcaggttgattccttgttacatctcccatctgcatgcagttccgcaatgtcataggatgcctacatcaacaccaagcaagcaagcagctagctagcgtggttagttatatcttcaaatcagtctacagggatggatctagtgacaggtccgctagccattctcccgtccaagctgcaggagctactccaaatccaagatgagtataggctccagaaggaagtgaggggcagagtggagatgatctgccgggagctgcaaagtatgcacgctgccctccgtaaggtggctgatgtgccgcgggatcagatcgacctccagaccaaggtgtggagacgcgatgtcagagaggcatcctatgacattgaggatgccatcgacacctttctcatgcgcatcagagaccgcgcgccaagtgacccaaacaggtttcgacttgccatgaagaagatgaccaagctgtcaagaaaggttaaggctatccatgaaattggtgctgccatcggagacatcgtgaggaaaatccaggagttggtggaccggcgtgtcaggtacaaacttgatgttgctgcagacaggtcaatcagcatggttagtgttgatcctcgccttgcagctttgtacaaagaagcgacacaactcattggcatcgaccaatcaatgtctgaaataatatccatgctgctctcggatgagtcgggccagcaacacattaagaagatttctattgtcggagctggaggactaggcaagaccacccttgctaaagaaacatatgaaaggcttagaagtgaatacgagtttgcaacttttgtttcagttggccaaaatcctgacttggtgagagttttcaagaacatcctcgttaagcttgacatataccagcaagtggacactatcaacagaacagatacgcgagcgctcatcgatgaaatcagacagcgccttagctatgtgaggtatctcattgttatcgatgatgtatgggatctggagtcttggcatacactagaattggcatttgttgaaaataacaatgggagtggaataatcataactactcgtaattttgctgttgccacaatagctggtcgtgtttacaagttaaggccactttcgtaccatcactccaaagaattattctacagatcgttatttggtgaaggagtatgccttgatgatcaaataatcaataaggcatcagataaatttctaaagaaatgtgatggtataccgttagctctcatcacaatggctagtttgttcatgggaaaaccaacacaaatgtggtctgagctagccaataatgcttttggacataaaggtcgtaacagtcatttagaagaaacgactatgaggatattatcacttagctactctgatttgccattgaatttgaggacttgctttgtatatttgagtagatatccagatgattatgttattaataaaagttctttgatatggaaatggatagctgaaggttttatccaagaggagcaaggaaaacagttatttgagctcggggaagaattcttcaacgagctcgtaagtagaagcattatacaagtggtccaatcaaaatttgataacacagtgcaaggctttcgtattcatagtatggttcttggtcttattcgcctgttgtcatccgaagaaaactttgtttctgtattggacgaagaagggcaaatatctatatcaggcaaacttcgtcggttagccatccataacagaaaagaagagcacaaccttggagacaatatggacctcctcccatggttgaggtcgtttactgcaattgaatgtcctatatacatgatacctccggttttcatcttcaaattgttacgtgttctggatttagagagttgtgggtctatggaaggttatgatctcaagcagcttggaaatttacataatctcaggtttatcggtctatgtaatacatatgtccggacgctcccacaggaattagggcatctaaagtttctgcagacgcttgaattgaaaggaagtggcgttgaagaactaccttcgagtatgggtgagcttgcagggttaatgtgcctcaacgctgactggacaacaagagtgcccaagtggattgggatgcttacttccctgcaacagttggtgatgtacccttgtggtggctactcggcaaggtggtttgtcaaggggctgggacacctgagggaactaaggatgctccgtttgttgataaaagcagatgacgagaagcagcttgcacaattgctggagtctgttttaaaactgcccaagatcgaggctttacatcttgattactatggcggcgtacagttaaacaggcttgttaagttggaacctagtgattttgcctgcagtggacgtcttcgttccttagaattgcagttgttggaattctcaaggctgcctgtgtggcttaatgcttactatcttccacagatccgtgacttgtcgctgttgatgtttgatgtggataaacaggatctgaaaaaccttggggacttcaaggagctccgtcatctccatctgctaattgttaacactgaacgcagagatgctattacttgtgccagtggtggattccggaatttgagattcttcagtatcactaaaccattcaagtttcaacagggagatctgcctaggcttgaaatccttgattttcatttcaatgtgccactccaaagtggtgccaatagtggcctggattttgacttcggtttggaaaatatcccttcgcttcagcaagtcattgttcaaatcaactgtctagatgcctttcctcttccagaggaggtggagacagccctaaggcacgcaatcggcgtccatcccaaccgtcccatcgttgacatcagtttgcctcgacgaaaattagacaaggcagacaacgacggggccgaagggcgtagtaagttggctcattattcaaaatcattatcatcggcacatgataagccaatggatgagctaataaagaggttatatgtggtggacaatgaggcctacgataaaaagatgaagattgtgcctattgttagatctgaagggctggggaaaactactcttgcccaaaaagtatttgacaagcttagtccacattttgactgtgcagcatttgttctggtaggccaaaatccggacatgaggaaagttttcactgacattctcataggtctagacaaccaaaagtaccaagatttccctatgactatattggatataattgagctgattgggttagtccgtaaatcgctcataaacaaaaggttctttgttgtagttgacgatgtatgggatttgaaagcatgggacataataaagtctgcattgatcgaaaacactaatggcagtgcagttctaacaacgacaagtcgtcagatctgggaacatgagaactggaggccatctggggatgacaagtcggattctgacgcagagcagttagagcctcatttggacgtcacaacccccgcggatgtcctcccagcgtcttccccgagcaagagcaaggtggtggcccatgtggaactccgccacgacgacccagattcctctgcatttggaatcccgcaagtagcaggggatactcaacctgagctccgccttttccccgaggcggatgcggatcttaaagggttcttctacgaaaacctatttggatcggaagacaagtgccctgatgatctgaaagatatatgtaaagatctcatacaaatatctgctggtgtcctatcagatgcctatgagaccgtggaagagctcagaggttacgagatcagtgcagaacgcttagtttgggcgtggatagctcaaggtttcgtaaaggagactcagggacagaatgatttggagaaagtcggaaagaagtaccttattgaccttataagcagaaagatgatcgaagcagtggaggttcatgctgatggtatggccctctcatgccgtgcgtacgatttgttgcatggcttgatcgtttcattgtcaacagaagaaaaattcgttgaaattctaaatgactcgcagtcgcaggagagagcttcgaatccgaatacagaagttcaccggctgtccatccaaatccagagaaataatatgctacaccccctgccaaaagcttggatgaaacaagtgcagtcacttgttgtctcgtctgataccgtgccagacctctcagattttcagggtcttcatgccatggacttaggaggctgcgattcattgcaggttgatcatctcaagggtataagtaaaacaacatctttgatatatctggccataggaggaaaatatatcgctgacgtcccgaaagaagtttcttggctcaaaaagctgcggacattggatttaactgcaagtggtctgagtgaattgccacgatgtattttaacgctaactaatttggagcggctatttgttaatagccatatgaagattcctggtaagatctcaaaaatgtcaggtttacaagaactgggcgacatcaatattgttaagccagagttacttaaaaggctccgtaaattaagtaagttaagggttctcagaattgccatgtggtcttgggatgagggttctaagagctctgttaaactatggtgggagaccctgcactcattaatcgggtcctgcaaaaaaattgagagtctctgcatactgaccttctgctcccttgatttcatggatggttccggtgatgataataaatggccgcctcaaactctcaaaaacctcgagataagtcacagcgcatttctggataagctcccaagttggtttgactcactttccaccatctcctcgttgacaatcgaggtcaacaagttatcaaagaacatcactgacactctggcaaagctgtctgctctaagatccctttccctgacatccatagaaaagccagaaccagaagtacgctttgtcatcggctctgctggtagattcgagaatctagaaagcttaaagtttgtgtgtaatgaaatggtaaatttgcttgaaagaccggaatcgaatgctacccaacagttaacagggcttactatcgtgtttcatgcttcacgaacagaacgcagccgaaacaaagatttcaggtttggtttggacaaactgctgtccctacagcacgttcgtgttgaaataaactgttccaatgcgacgcagcggacggtgaaaaatgcagaagctgcaattggggaagaaatatcaaaaatacgcagggatgacgggagtcagccaatcctggaaatacgaagactccaggaagaaagtatgatagcagggaaggaccaaacccaggatgctaataagacaccgtcttcttcgtctactatggaaactacattgcgagcccaacctattggggaatcattaatgcctagtgttgagactgtttcttccaaggtcttcgtctctcagaacagctccaacgacacattttttaataatgtaggtatcctcacaagctccacgaaaataaag

SEQ ID NO: 38072 - DNA, 5121 bp, Zea Mays
cctccgaaaggccttaaccccaaacgaaaccaccctccgcgacaaagccgactactataggctgtcgtagccaacaagcgcgacatcctccgcccccacctcgccgccggcgatggagccgccttcgcctccggcgacccactccgcggccgtccgtgtcctctcccgcactcctccgccgacctccccgaacccctcctccacgggcccggcggccccgtcgcccgcctcccgcgacggggtcgtcgccgtcggcttcgtgggcgccgcggggaccgcccgcctcgcggaccggatcctcgacgcccacgtcttctctcccggtggctcggcggggagcctcgcgggaagggtaaggtaccaccgcgacgccggcaagaggatggtgttccttcacctcacgccgccgccgcccgcgccgctcgaggcggtggcaggatgctgcgatgacggcgaactaccggagatgctcttcatgttctctgtctgccacgtaattatatttctgcaacaaggcttcagatttaacacacaaaccttaaagaagttccgactgctgcaatcttcaaagcatgctctcgctccatttgtcaagccattggtggcagctgcaatgcctgccagaactgttgcctctgacaccccaacaagagcaacccacagggcttcttccgtctcccctccaacacgccgaggaggtcacgctgggcgtcagtcctcggctatctcacttatgtctggaaccagttcaactccttctgtcttgccaggccaatgcattcctgtattgctctttgtctttgaggatgatgcggttgatgtttcaagtgctgcagcaagtcccgatgatataggtgatgcatcttcatcaaatcagggttctacccctgatggactaccaaaacagagcttagcttcaaaaagttctggttcagtaattatgctttcccgggcagcaaacaaatctgagggcagttcaggcaaaaaactgcattcgtcactggagggacagatccgtgtcttgatcaagaagtgcagggtgcttgcaggcatggagcctggacatattggcccaaggggcgtaagtaacatgagtcatcatttacccctgttctcactcgatacctcgagggtagttgcactgttggaacggtatattaataagaaacaggaaccactggacaccattgcaggactatttgaagattctttgtgctccaaatcgccattggatattctttcgctcgaaaacaactaccatccaacaaaccatgatgactttcagttgatcaaggattttatatttcggcagtctgatgcgctgagagggaaagggggatattcaagcaatgcaagtgccgggtctgttgcaggtgttggcatggtggctgctgctgctgcagcagctgcagcatcagctgcatctgggaaaccagttaatgcacctgacctccctacttttgataaatggttgtccataagtacctctattctaactgcactgttgagtggaagaaatgtgctgagatgtcagtctgaaagcaagactcatacaagtcctactgagaagaatggccaacttcctgtaggatctaatgctattgagatcgcattatcgtgcttggaaagtaacaatgggctgaacatgaaattttcttcatcatggtgtcaaagggtgcttccagctgctaaggagatatacctgaaaggtttgcctgccttttaccccacaagaatgcatgaagtgcagctacagaaggcattgcggtcctttggctcaatggttaaaggaccagcagtcagggtattctcaaagaagctagaagatgagtgccgggcaatatgggaatctggaaggcagcaatgtgacgctgttagcctaactggcagaccatgtaagcaccgcaggcatggcgatttcttttcatcagatgcaatggagcaacattctagtggatatgtcttcctccatgcatgttcctgtggccggtcacgccgccttagagatgatccttttgactttcagacagccaacgtgtcttttaattgtttccaaaattgcgatgacctattacctacccttgcgcttccaagaggcagcaatgatggttcattttcagtatcctcttggtgcttggtgcgtcttggaggagcaaggtactacaagccaacaaaaggactccttcaaagtggatttagctccaaggagaggtatcttctaaggtggattgtatctgttcataaggggcaagtgagaaatgacattcgttctaatactattacttcatccgcaagatctggtatgaacccgcagactcccccaatagtcactggtgaagtaaaatctgccataacccaagtcacagcacaaattaaatatgcaaagcttgaaaattctggaaaacaagctgaagttgaaccagtgagcaacttaggcattaattttggtaaaggtctgccaaattttactatgaaaaagcccttttctgaagttgttgctggcaccacatcaaaagataccgagtttcctgctcttcagcagacaaggccaccaaaacctggtggtcgaaaagatgagcagcgtcaaatgaatatagtagaccagactaatggccgaggtcatgtggctgtcagccaagggtctgtagctgaaactgaatcggcaaaagcaagcagaaacaagagtagtgaaaatgctgatgggaagccctttttacagatagggagcaatatagtaccagtgattgctggaaatgagactagagaaactagtcagccagtacaacagtttgttgtgtatattggatttgagcatgagtgtccctatggtcatcgcttcttactgtcagagaaacatatgaaggagatcgagtcttcctgtttgcagtatcaaagacctcatctaaacaaagaagcagaagtcaagcatgcacaaaagttgctccaaaatgcatctggtttaatagcatctgcagtggacataaacagtgcacggaaaaacagtaagccattggaatcatcagggagaaacagccagcagcaatcactgcagctgaggattgatgcagagacctcacagccttctcctcggctttcagatccacagaatgccaaaaggtgggagcattattttcgaagcgttacaattgatgatggtggagaagcattttcactgatgaacagaaacttgccaatatatatgcgctgtccacattgcaaggtctcagaaaggaaggaacatcaagatgtaaagtttgctggtgttgtgtctcaacttcagcggattttcattgtgacacctgatttccctgttctgttggcaagctgcccacttgtacagtttgaggggtcatgtttgccatcaaatgtctctgatcatgatcgagaaggatcattcagtattgggtgccgagttatcctcccacctgagagctttcttactatgaggcttccctttgtctatggtgttgagacaaaggagggaagtaaatttcccctcaaatactttgagcgacaaccagaactcacagcatggcttgttgcaggcacagccctgcaaatcgtgtcggtaggggatgtcactgagaaagaaaccgttatgaagtgatagacatgtcatataaagctttactggctttagcatgttctagtcatatatcagtgatttgctatcggcattgaataggtctgttgatggttatattctgtctgaagttttcacttctactcctgaacttgtgctgctaagctgttgacacaactattgcttgctttcactgtgctggaagcattgtgaaatagaagttccgctgatatctgcctgacctggatggtgtatatagatgcaagcagagggggcaggcccacaggcaatcacgccgttcttgtctttgtacatgaaaggtgccaggaggttaagtttagctggttatgtaaaggtccgctttttgaggacctgtccagtggatcaatcccattcctagactggtttgccttgaggcttggagattttgtagtaagactattagttcaattgagctgtttgtccagttgatgagttgttttattcctaggcttgttgagaaatctggccttggaatatagaacccagaagaaaggatttttctgaatgatgttgtagcaaacggttgcttgagatgcatgatctcctcaaataaacttgactgatctgcctgtatcccttattctttcttgtatataatgtatgcagtacaggtatttccccgcagtctttggagaagaagatggatttgtgaagtgatagcacaaaaaaaaaagtcatcaggcgcttctggtggtagactggagactgggctggagaaatgttggagctggaaggaaacgcacggatggctcctgcttgacaagtgtaaaggcaggcggcaagcagggacgtcgagtcgaggccccggccggctccaagagcttctttctccaatccaatccaatccaatccagaaccctgactgcagtccatggtattgtagcgctaccatttgtccacgtccgatgggtgaagtgaagcatgactgactgactgcatgggtttgaataagaataccggactgatggatggaagtggatgtgaacaaacagctggttggctcagggcaggctccacaccaccaacggccggagcagatggacatggacgtctcacttaggatggtgtggagcatgtgacgtgtaggctggagcttggcttggcttagaggttactagctagctcactctgaatgatctccattcttcaggaggagaaggcagatgcggcagaagcaccagcacactgaatgcaatcattcaatactcatctacagctagccaagatgtgagaagagagcaaggaagaattgtcaagcctcccacgtttccccaatcttctctcttcttttcatttccccacttttaatatgtttattttcctcttatttgcaacagctcctttaattatatagcaacattttttttaagatatagtagtatatatattaattttatcatatctctagtccgaataccacgcaaaagtagctagtaagtaggatgtaccaactagctacagcagtgtataataaagaaaaaagtcgttgggcggtc

SEQ ID NO: 38073 - DNA, 2450 bp, Zea Mays
gtagctgtgtagatctatgatgccaaggcaaaaggccctcatgtgaatacttggagaaaaaggtcccccacaccccccacgcaggtgaatactacaagtagcagtacaaggaagagagccaatctgcccgtgactgccagtgagttgctcgggtgtggtggttagttgaggtcacgatgatgggaggcgggctgatgatggatcagagcgtggtgttccctggcgtccacaacttcgtggatctcctgcagcagaacggcgacaagaacctgggcttcgcctcactcatgccgcagacgtcctccggcgaccagtgcgtgatgggggagggtgatctcgtggacccaccgccagacagcttcccggacgccgtggaggacgacagcgatgacgacgttgaggacatcgaggagctggagcgccgcatgtggcgcgaccgcatgaagctgaagcggctcagggagctgcagcagagccgcggcaaggatcccatggctagcggtgggggcctggccgacggctcatccaagccaaggcagtcgcaggagcaggcccggcgcaagaagatgtcgcgcgcgcaggacggcatcctcaagtacatgctcaagatgatggaggtgtgccgcgcgcaggggtttgtgtacgggatcattccggagaagggcaagccggtgagcggcgcctccgacaacctccgtgcctggtggaaggagaaggtccgcttcgaccgcaacggcccggccgccatcgccaagtatcaggccgacaacgccgtcccgggcgccgagaatgagctcgcctcgggcgctgccagccctcattccttgcaggagctgcaggacaccacactcggctcgctgctctcagcactcatgcagcactgcgaccccccacagcggcgctacccgctggagaagggcgttcctccaccgtggtggcctaccggcgacgaggagtggtggccggagcttggcattcccaaggaccagggcccacctccctacaagaagccccatgaccttaagaaggcctggaagtccaagtgcctccaggacaagatgactgccaaggagatctcgacctggctggcggtcgtcaagcaggaagaggagctgtacctgaagatgcaccctggcgcacgcccgccggcatccactggtggcatcgccagtgccatatctttcaacaccacctcaagcgagtacgacgtggacatcgttgatgagtgcaagggggatgaggctggcaaccagaagacagcagtcactgacccaacctccttcaaccttggtgcggctatcctaagtgacaagttcctcatgccgacgccgatgaaggaggagaccgctgacgtcgagttcatccagaagaggaacgcccccgctcctgctgagccagagctaatgctaaacaaccgggtgtacacctgcaacaacgtccagtgcccgcacagtgactacagctatggattccttgaccggaatgcccgcaacagccaccagtacacctgtaagtacaacgatccgatcactcagagcgccgagaacaagcctctgccagcaccgccgcaaccacaagccttccagccggccttcagccaagccaatcaggcagcgaacaatctggacttcagcctgcctatggacgggcagaggtccatcgccgagctgatgaacatgtacgacaccaacttcatgacgagcaagaccatgagcagtagtgacagcgtcaccatcatggagaggccgaacgcgatgccccagaggatccagatggacgagggcttcttcggacagggcaacggagtcttcgacgacgtcaatagcatgatgcagcaacaacagcagcaggcaccacccgtggtgcagcagcagcagcagcagcagttcttcatccgcgacgacacgccattcatgagccagatgggcgacatcaccagcacggcggagttcaggttcggctctggtttcaacatgtctagcaccgccgccgccgctgattacccaggcgcggcgcagaagaacgacgggaccaattggttctactgaagaataaaacttgtagggctcctcgttataagcttcggattcctccatggatctcccaagttgtcaagtcttataggtcttcgttatataggttttgcagtagctgcaagacggctggaacctggaactggtttatacttgtatgtccggccagccataaacctctcttatttgcaaacttaatgttattcctagctttaagttgttagtctcagtctgctgtccatgtatatggctgttaaaatgcttgtgcttgtttctgtactacctgctgtttggtgtctgaatgaagtgttttcttcagtggttctgctcgacgtgtctgctcactgttgatgaggcacatcatcgctgctgctcttcacacaaacaacatgactgacatattcaaatattttgagc

SEQ ID NO: 38074 - DNA, 2491 bp, Zea Mays
cagccaacagcccaacaccggcacacggtctgcaccgcagaaactttgccttccccgcgtccggctactactgtcggggcgtcgacccatattcactcctctgccctctcagatcccgaactaccaaacccccttctcgccggcggaggaaggcgggggcggagaaaagagatcacgatcgctaatccgtgacggcagcggtcgggatggcggcggcgctagctccgggggtgtcccggaagttgaagaaggtgctggagacgcgtacggataacccggatctgctggcctcgctgggcgcgctctccactttctacgtccagaacaccccgcaggcgcgccgcaatctcaaatcctccattgagcagcgtgcacttgccatcaatcgccacttcctcgacgcctcgctccccgcccacaaggcgctggatcgcgtcgagggggaggtgcacgcgctgaacgactcctggaagaagatcgaggaagcattgaacagttgtagtgcaagtactggggacatcatcagtacaacagagaggttgcaacaggaacttgaagttatcactcagaggcaagaaattgtgtcatgcttcctgcgggattaccaactttcaaatgaagagataaatgcacttcgggaagaggagatagatgacaaattcttcaaagcattgctgcatgttcaagaaatacactcaaactgcaaggtcctgctgcgaacacaccaccagcgtgctggtttggagcttatggatatgatgtctgtgtaccaagaaggggcttacgaaagattatgcaggtgggttcaagctgaatgtaagaaattaggtgatactgacaatcctgaagttgccaacatgaggcaccatgccttattcaggcggtttataagtgctcttactagaggtggacctggagggttcccaagaccaatagaagtgcatgcccatgatcctcttcgctatgtaggcgaaatgctgggttggctacatcaggccctggcatctgaaagagagcttatagttgtcttgcttgatcctgatgcaatgactgacagtggtccaacttttcgacgtcagtctggtagagatggtgattcttccaaaggagaacctgatgtaacttctgtgcttgatagaatatttgaaggagcatgtcggccatttaaagttcgagttgagcaagttttgcagtcacagccaagcctgatagtttctttcaaacttagcaataccttggaattctattgttacacgatatcagaactgctgggtgaagacactgcgctgtgcaatacaatatggtcacttagagatgcagctcagcagacattcttcaatatcctgaagagtcgtggagagaagttattgcgatatcctccactagttgcagttgatctctctcctccaccagctgtaagagaaggaatttctttgctgcttgagctcatagatacctacaatagcatgatggttcctgcctctggaaaaagaccaaactttgaccctgttatttctgcattattggatccaataattcaggtgtgtgagcaagctgcagaggcacagaagtcaaaaggatcacttgcgcggcgtggtagaacaagctctgatcctagtggaaatagcagggattctatatcagttgatgctattctgtctaagaatttatctacgtcgattctgagtgccgaatcttcatccaaagtctacctcatcaactgcttgtcagctattcaggagccattgatgggccaggaggtcgctacaagctatgtaaacaacctgcgctctatgattgaagcacatatttgtgtccttgtcgataaagaagttgactgcattcttaggaaatgtggactatcaaataagatgccgtacataaaggagtatggtagcaaggctgatgcaaggcctctggcagatattatcgagacgtcgccacaaatgcttatggaatgcttgaaggcattctatggtattgtgactggaacagaaggttccttgcctgaatttgagcaactgcaggttccaaggttacgttcagatgcctgcaatggtttggcaagagctctagcagaatcttatgagctcatttacagcgcagtcatggatccgaataacagttatcctgacccaaggtctttggttaagcactctcctgaacagataagaactatactggaagcctgaggtcttcgcacgatgccttatggtacatgttaagtagaggtctttcgtgcatgaaactttgtcatgtaaatttccgactacaagctgtgggttcaattgattacagaaatatggaagcggtgactctctgaactcatgtatcggtatctagtgtctcgttgtcctatattccttttttctttatgtatcaagttattgtatacttcatgatgtaatttgaggtacaacttaagtgcttaaccgactattatgataccaaagctactatgcaagcatggtgaaggcttgtcggggagaag

SEQ ID NO: 38075 - DNA, 2757 bp, Zea Mays
ctccatcgtccccggcgaaccctgccttcccgtccttccgcggttcctccgcatcatgcgacatggcggattcgcgtggaacaactcccaagagcggtgacaatgataacacctccacgcgcccggcgcgcctccgcgtcatgcgcccggaagtcaaggaatttctgacgagtcctcgccggagacgccccaagaagcaaccgcctccgcctccgcccccgccgccacgaaatgtgaagctgaaggagaggaagaacaaggaaaaggggaaggctgcgacggaggaagacaaattcgagcgcgcgcaatacaactgccccttccaggacgagggcgaagggggccgcgacttcgcgccgccggagctggtctggggtaagcaccggaaggccggcgcgctgctcatcgtctacttctgggacaggaccttcgcttggagctccccttccgcgctgctccccttccgctccaacttcacgcgactatccgcccagagcactatgtccagcttcgtctccgctatggattccgcgctgcaggaggttgggcgacgcgtagaggctggcctctcgtgcggttgcttcacctccagcattgccaccaagcaggaggttcaaaactctggtatccggcaaggggcgtatggtgcggccgtagactctgtctacacgagggatgccttccatagcaaaacatttcttgactacatctcagcactgggaaagaaaccactggcgggtgctgatcttcttgtccttgctaccgtaaaagcacagctgagggccttgaatcgctcaaggggctcaagggacctccctgagtttgagatgtttgagggcactgatgagattacagaaatgacacacacagatggagatgatacattgagtcgagggaaaaagtcaaagcgcatgaagagttcatcgaagaagaaaactgacatttccaagcatttagatggactcaaaactggttctgttgctgacagcagaacattggccaagaaggcagtaggtgatgctttgagtgagagaaaatctggacgcacactgagatccacgagtaagaaggaagatgctttagagggtttgaaaaggctggcaaaggatggaattcaggaattaacagggaaaagcaaagacgcccccattcttaaagaaaaaaatcaggggcatggggcaggctctgcacacaagaagggtagaatcacagaggatgggtatcatagacttggagatagcaatgccaaggatcccatttttcctggcaagagaagattgggacataacgaaaactcaataagcaaacgagtgcccatctcagagcatggtaggaagaagaagaaactttctgaactcatggcagagacaggcaagcctaattctgcatctagtggtaagagcaaaactcgagggaagcgttcgttgcatgattcagctgagaaaactgaggatcctgaacatcactctaaggatacattgatgactaggaaaagaaagaagctcaacacattgggggatttgtcttcactgtcagagcctctctctcgtaagaagtccacaaaggttggagaactgatgagcaaagtagctgggagcagcatgttacaggctgcacctgctgtcaaagctaatagtgcagtgtctcagacaaaaccacgaagggctaagtacaggcaagtaaatgctgcagacaaatctccatgtcctgtgaaggtgaatcaggggaacagcgaagccgttagtaaggagtctctatcttgtggagaaatgctatggcagctctctgtagcagcatgtggtcttcagcagagagagaaaatcgttcctacaagtgttaacttctttaccggttttagaaagaacaaattttctagttctgatgtcaatgaggggatgcctgagaaggcagccaacactgagtccactctttcagaacagcccattgctgatcatatgcaggatgactattgggctgacattctcattaatgtggaggagccgctatctaacctgaaaaagaagatagatgagagtaagaaaagagtaaacaagaaggcacctcaggttaagaaacctcctgttaattcattgtcgactgtagaaaatgtagacgagccaaggagtgaaggcaaccaagatacaggaaatgaggaacaacttaggaacgaaaccaagttgttttctgcaaatggatctcaactgaacgccggaaccaaatttggtcaagagatggaaaattgctttctgtctggactggtgctgcacttcagcaggccatgcgctgttccatcacagtgtgaccttatcaagatctttagccaatacggtcctgtcaatgaagtgaaggcagatgttgcaaacagtgccagctctgcccaggtgatcttcaagaggcgcatggatgctgaggcagcgtttgcaggtgctgggaagatcagtgcccttggacctgcccttgtgagctttcgtctcactgacttcccagctagtgcttcaggaaataaagcttcccatgttgcatcaaagagcgaatagtgttgcttgaccagtgagggaaactggatgggggagttagagaaaaaggtatactctactgtatgtggtagttaggttgttgcaggattaagaggaacagcaatgtcatctgggtcttccagtgttgtggaggtgtcatactcactatcatttatgctgcagaccagttcagatgagttgccaataaccattaggtgttgtaaaagcaaggttcaagaaa

SEQ ID NO: 38076 - DNA, 1418 bp, Zea Mays
ctggaactactgctgactggaccagtcttgatatcagggctgcaactgaacagataggaggcaggttccaggaccctccaagccaggcaatttttcaccagggtctcaaccaaacaagcccttgctttttgaggacttctagtccctttcgttgttggttggtttgtagtttatttacggaagtttacaattgatcaacaagacttagtccaaccctacttttcaaatcactatggttaccctttcctacagctgggcaagcgtagaatgtcagtcataatgttgggctcaaagaaggaaaggaatctcagcatgcactttcaatcagaccagaaatcttctgctaaattttgtttgttttcaaaagtccaatctgccagcccaccaccagggaatacactggtttatctaaatgtgtatgatttgacaccagtaaacggctatgtttactgggctggtctaggggtatttcattctggcattgaagttcatggtgttgagtatgcatttggagcacatgactattcgattagtggagtttttgaggtggaacctcggcagtgtcctggtttcaaatttcggaaatcaatatgcatgggaactaccagcctggatcctctccaaatcagagagttcatggagattcagtcagtaaattacaatggtgatacctaccatttgataagtaaaaactgcaaccatttctgtgaggatatctgcaaaaggttgacaggaaattttattccaaaatgggtgaatcgacttgctagaatgggtgctgtttgcaactgcattctaccagagtccctcaagatcaacgcggccggtcatgacccagcttctcgagctgaagatagcgagagaaaaatgctgacaagttccttcagttgcttctgttcaatctctctatgccaaagacatttctcaacatcttcgccgtctctgcgttcctccgcgaacggcacttcttgggataccaagcagtccaattctacccgactgaagaagagctgacagttgaggtcctgtgtatcatatttaactcatgaggcacaaggatccttttttgtcagcaatctcttctacgaccttcatcagagaaggatgaagaggtattgattgataaggtgtttttgcatactcgagcgtcggatccagctgtgcttgaacatctgtacagagattgtgtagaaattatttcttacatttgaatttgaaatacagtgagctggaggaaactccaccctagacttttggaaaaaaacaaactccaaaaaaatcattgatgggtgctgcctctggagtccgaagtgatatttcgcctgtggtagtttgcaaatttggccatttttatacccttgcctatataaagttttatagttttgttttggttgcatgaggattataggagattgagg

SEQ ID NO: 38077 - DNA, 1348 bp, Zea Mays
tctgaattggatcgattgcgcaaaatagcagaagcatattcttgtttgaaggacggaagaagatcagggagtaggatggaagttcatgttatgcgttctggtgttccaactagccacggaagatcaaatagaacgttggttaaagccccgtttctactcataatgtttgcagcagtttcttttggcgccttcagcgcatcaagagcgtatcaacggcaaaaggaactgtgttcctctcagaacccatttctaccatagaggaagacggtgggctctgtccatgttcataggcgagaagagcttcttgctacgttgtatacagatgtaaaacaatcacaccatcctgaataaacgtgccaacctgtgccttctaactttgttgtttcagactttccaaacatgtaaaatcacttttgtattggtttcctgatttcgtctgccttgttgctactacgttcagttagctttgctttaaaactgcttcgagggcaaccagaaacacacaacagcatgtccaagcatttaacagaatcattgaccattcactcccaggcaacatggcaaccagaacaattggcaggatcagcaaccagtaagatttacaagaagcaccacaatagtttgataactgtcagcattacaggaaacatcccacagtctaagatgggagcaaagatgctgaaaggtgctttagatggaactccaaacctttcccaacggagacaagaggtaaccaaactataggtaaccttgcagccaacagcatgactgtctttaatgcagtttgcttgcatttcagactctctcgtcatgcttcaaaagtggatacacttaacttcacagccatacttgctgcaagtagaaactgggaatacaatatgaatagctcgagtcttcaatcagtagcaacagctatgaaactataccaatactacagaaaatttcctcgatgtcaactcatatttcatggaagccttttaagccatctgggtacaatgagagcagatcataaccaccagcatcaggcatcactgtactgcgtactgcctgaacaaaatgccatagtccttctgaaccgctttatgccttgattgcataatcatcttaccaccacaactattaccgataggaataaccacagccagggctacgggtggagttcttttaacattaccgatagttggcacagtgagtccaactaaaatgtaacaggttaaggctacctactgtttcactcttgctaagatatcttgtgtgtaaaactacttaatccccaacttggcaaaatgcagagcattgtgctaggtaggatacaccaggaccacaaatgttcaattgatacaagaag

SEQ ID NO: 38078 - DNA, 2406 bp, Zea Mays
gcccagtccatggcgcgcgggcggtcccctccgcctccgcggcaccacgccacacgccccgagaaccaatcacgtcgtccgcctgcctggctcctcacccccgcccggtcttttaagcccaccacgcccacttgcagcagcagcaccaccacgccaccccaccgtgttccccatatcgtccagttgccgtagttttacgcgagaacgcacgcgcgcatctgccaaaacaaacaaacccacgtcccggccaccgcgcgcgcgcgtgcctcgtcgtcgtcctagctagctagctcgatcgatcctccctcgctcagctgccgtcgacctctctctcgcggagagagagatagagagaggttggggtttgtcggcactcggcaatcgacatcatgaggcgcttcctgcctgctggaggcggcggcggcggcggggagccgtcgtcctcctcgtcgtcgggcgggcaccagcaccaccagcacggcgggctcgcatcgggcgagagggcggcggcgggcctgcggtaccgaggaggcgccgacatatcgctggggcacgggcacgacgatggtggacatggtcgtagcatcgacgcggcggacaggcggaacgacgggtccatggacatgctggcgcggcacagcagctcgccggtcggcttcttctccaacctcgtggtggacaacgggtatccacgctcaaataaagccggaggcggtggtggcgtcgaaggtcagcagcatgatccatcaacggccgccaatgccagtggcagcagtgcccggaagatgaagacgcccgagttcaacttcaccggtgcgcagcagggccagcagctgggcgcggccgcgggccacctctcgcggatctccgaggacggcgccttcccgggcggcatgatgggcgaccgcgcgggccgcggctctgctggcgagagcagcggtgccgccgcggcggcgcgctcgtactcggccggcgggttctccatcgttgggccgtgggaggagtccagggacatcattaccaccctcggcgcatacgaccctcagtttagcggcgccatggcgggtacggcgctagagatggcgggcatggacaggtacgtgcagctgcagcaagaccaggtgccgttcaaagtgcgcgccaagcgcgggtgcgccacgcaccccaggagcatcgccgagagggagaggaggacgaggatcagcgagaagctcaggaagctccaggacctcgtgcccaacatggacaagcaaacgagcaccgcggacatgttggaccttgcagttgagcacatcaggggcctgcagagcgagctgcaggtaataataatctacgtacgtacgtacgtgcgtgcgtgtgcatgtatatgtatgtaggaatatacgtacgttaatgccttttctagagagagtacactgatctgaagacgaatgcgtttcagtttcgactgatcacaagctggtattatattataattatattcttgccagcagcacacaagaggccatctaacttgatgccttttccttgatccgcaggctctgaaacacgaacaggagaagtgtacctgctgccgaaagcgatagcgattcacgacggccgggggatcggaccaagagagcagaaacacgtacgtcgtctatcatatctgtagcggttcatagttgatacgtgcccttaccttcagtgtccttgatgagaggaatgtacatggatgaagacatgacagacagccatctaattttagttacaacaacatgtcggattacctactgctccaccttttccgaagaccgaagcaacgaagacccatgtgagcaactagctagccagtagccagtgcagtgcagtgctaaaatgggcggccctcctagtctgatccgatgatccttggatttcttctgttcctgcttgatgttcaactccaattttagatctcttttaggatctgaaaacagttttgctatttatttaaacaagctgcttaattttattttgatatttagtataattaatatttgttgactgacgtcagaagaagaggctccttttttttttcttttgtataaggtaaaagaaagggcttttaggcttttatacagatataaaggctttggtgatgtttttgtatatatttcttaaacttataattgtttcaataggcattataatagatctgtattatttcagaagagggtatttgcatatagactcagcacaatacttctttataagataggggaagttttgccgtgaaatttaataaactttttttttgaatgtgtcatgtgtttcattaaggatggctctaatgcacaggggttgtatctaataacgtcatatcactattgaccagccggtctgtatctaccactgtcaacatttatctaccagaacttttcagtg

SEQ ID NO: 38079 - DNA, 1916 bp, Zea Mays
aggcttcccttcagcaaacagcctggtagttctattcagccgcttaccgcgcgctctcttgtgcggcaattgggcgaccgccgccgccctaactcaggtgccgaggtcttcgccagtaacttcaacaggtcctcgcctggtccttcgctggcgaggagcatctccaccaggtgcgaatcatggggaagtttatgcatgacaatccaatgctatcatgtagtgaagtaaacagacatcactatagtcttgcggcagttgctgtcggtttgggactaggagttgccgggttatgcaaggcattgtatagtggtctgtccataccatgggtttctccaaggaatttgttttcgggatcagggagggcatactatgttggaggtctgcgaaatcttggcaacaattgctttcttaatgtcatcctccaggcacttgccagctgtgatggttttatttcctttctagataatttgcttgcaactgatggcttgctacctgaagaaaaggctgtaagaatgcctcttcttcttgctttaagttctctcttggaagacttaatcatagttcgagatgaaaggactgtgttgaatccacatggagtaatgcatgctttgagtttgtatgttggtcacttcaatctgaccagacagcagaagcttttctccatcttctgatctcattgagggatgaatttgcccattgttatgtaccacataggagttctctggcagacatcaccctttctgactccaaagtatacaagcaaagggaagctgtcattggacttcgagaatttccactgcttgcctctttcgccagtccttaatgcaaatggagatattaccagtgggtgtagtttggtggattgcctaaagtacttcactgtggtggagcatcttgacaactatcgttgtgaccggtgttggcacatcattgctgccaaatatctttctcttagatcagaagttgatgaggaaaaggttagcaagcttcaatcctgtgtcgactatggcacttgcagttgcagggatatgttccccctggagtcactgccatgttcatcatcttcacgagcaacaaagcagctgattatcagtcagtgcccgaagattctgtgcattcattttctacgcgcttcagtcggtcttgacggcgagcccatcaaacatcagggacatatttctttccctttgcttctcaatctgtccccgtttacgggaggcgcgtcgagtgctggacctttagcaatgaatgcgcaaagagatggccagcaagctctccatctataccggcaactgaatatgcaggctaatgctgacgtgtccagtagttcatcatcaccaccgcagctatcaaggagcaagttatacggtctcgcggccgtcgtggagcactacgggaagtgtggaggagggcactacgcagtctacaggagagtcgcgtcgaatcctgaccctgatgatccaggcaaacctgttgcaggccttggcaagcggtggttttacatctcagacggctacgtgtcagaagttccagaggaggatgtactgcgcgcggaggccacgctccttttctacgagagattgtagccgcttgttgagtagctaacgtgtgcatcataacaaaatctaggacagttttgttgtgaggagtctgatgttcttagcggtaccgtgagcttccaagtagacgaggaaactagctgtggcacaaaaaacaaagcctctcggcatctcgacgtggactgcaggcgtgtcttaggcagtgtggcctactttttttttgggtccttgcaaacgttaaaataattcttcatgcaatacgtcagtgaggtcttcctcttgagaataaatcagatcaccattgttttgcgacattgtaagcagcagatggtggatcgtgtgagttttgttctgctg

SEQ ID NO: 38080 - DNA, 461 bp, Zea Mays
tcgccttatttctagaaatcgaggaaaactgagcagtctttgccgctctcagcagaaatattctactatttctaattaaacaacatttgcaaagaaaagtcaaaaggaatacgaaaagcagtagtctacagtttaatttcattccttgtaaaagaccaaacttcaacacattcttaattaaacaacatcgtcaccttgactgcaccatcatcgtcagcctaggccagggccttggcctccgcgtcgagcaggagcaggatcgtgggctcctcctatagcacctcgctcgatggcgagggggattcgtgtggtggcgagttgggtcttgcttgtctgccagagcctctcttaattcagatatttgttattcaaactgttcaaactaaaagaaaaggtgcaaatatgtaatggtgtccaccttgatatagagtaagataagcagtacacacaaaaagttagtt

SEQ ID NO: 38081 - DNA, 1557 bp, Zea Mays
tagatacgcaatcttcctcgtatcccccctcccctccccaattcggacctcgttccgcctctgcggctctgcccctctctctcacctccccgcgggcggccgcccccaccgcagcccgaaccgcatctcccccaccactggcatccccctaccgcttacaaatacgcgacacatcccacctcgacggtctctttctcgcatcgctgcgccgctccatccgctcggctcccacccgtccgtcgtcgcctcgccgtcgagccaccgccctccttgtcaacctctgttgctgctcgggccgggcgggaggagaaaagatgggggtgtacctcagcacgcccaagacggacaagctctcagctgatggagagaacagccgcgtccggttcggcctctcctccatgcaggggtggcggaccaccatggaggacgcgcatgctgccttgccagaccttgatgaatgcacatccttttttggtgtttatgatggccatggtggaaaagctgtatcaaaattttgtgcgaggcatttgcataaacaagtgcttataaatgatgcaaattcatctggtgatttgccaacctctctccataaagctttcttaagaatggatgagatgatgaaagggcagaggggttggagagaactaactgagctgggagataagggaaacaaaatctcaggtatgatagacgacataatatggcctcccaagggtggtgattcagataagataagggaagattgggataccgaggagggtccaaattcgaactttcctggaccaacatctggaagcacagcttgtgtggctgtcataagaaatgacaaattaattgttgcaaatgctggggattctcggtgtgttatctcacggaagggtcaggcttacaatttgtcaacagatcacaaaccagatcttgaggaagagagggagaggattttgggtgctggtggatttgttgttgccggacgggtcaatgcaagtctgaacttatctagggcaataggtgacatggaactgaagcaaaatgacctcctgccagtggagaggcagatcgtgacagctgaacctgaattgaaaacagtccagctctcggaggatgatgaattcattgttttagcttgtgatggaatttgggcagagggagtaactcacaaaccaggctttgcagtttctgatatgtaactaagtaaagcagaacacctgcaaattgtcatacaaatactgtatcaaatgagtaatcagcttgcgtatctaatctgtatttgtgatgccacacatattttggatttgagctaattccttagaagtagcacactagggtttgcagttgttgatatctaaactgtttatagatatatgtatgttgtatccatgttgtatacaattaatgaatttctaattgacaaacctagtaccagaggctcccacatgagtcgagtttggtgcagggataaactgaggcaagtctttcccctcaaatgcatagagactgcttcgaacccgtgagccgtgacctagtgacttagtgagatagctctcaccactacaccag

SEQ ID NO: 38082 - DNA, 1844 bp, Zea Mays
cttaggtgtcggagcaaggcgagggcgacaccttacctcgccggaccaccttaccgcctaggcgatgccttaaaaactatgcaattgatcaatacccaatcactcttcaaactgcaaaactgcaaaaacaaatcagaactctaaaaagttctcccaaaaatatgtttcctacttccttgttcttgcaattttctcattgagtaccaaaaggactacttgtcccttcaactcctgagtccattcccactcttctttaaactgcttgacttagattgtattagggtgagattctagttgaaattgtattagttgtcgtatacccatatgatcgcttgggttttcatttttctacaaaccctgacataatttatcctaacatcgctttcccgtttgtactctttttttaaagacctgagtgtttggacttgtcatgctaggacatagctattgccacatgtttcttctttccaatctgaccattttgtcgtgcaagattcaagaatgccaaataactttgttggagagatgcttttgtttctctccaccattgtttaaaatttcttttattgttatcttgcagggattataataatccgtatcttccaatcaattattctgccatggatggtacattacagcctgctgttggagctgacggaaggcaagtggaggctcaaggcaatgttcttcttgcatcaattgagaatatgcaatatgctgttactgtagatgttcttcatactgtgttctcatcatttggttcagtccaaaaaattgctatttttgagaagaatggggggacacaagctttgattcagtaccctgatgtatctacagctgctgtagcgaaggaatcattggaagggcattgcatctacgatggtggctactgtaagcttcacctgtcatactctcgtcatactgatctgaatgtgaaggcacatggtgacaagagcagagactatacaattccagctggcgtaatccaaggggtgccacctggtgtacaagctacatcctctgggtggcaaggtaacgttcaagcagctggggcatatgctgccccacccggtgccccttcgcaaagccacggtgccaatggacatgtgcagaactggaatcccggcaactcagtctatcccccagccccaggaccaggaatatatccaggccagatgtactcatctccctcacagtatgcagcgtcagggggcttccctaataccccatccactgctccgccacactatgcagcatcagggggcttccctaacaccccactcccagctcttcctggtgctcctacacaacagttgcacgcttcgcagcagatgctgcctcagcatggaaatcagtcgggaggcgcatccggaactagccaaccggcgccaccagcatcatactaccgttgagttgaaatcttcttttgctattgtacttaacctgttttgtcactgagtttgttattcatcatctaaaactgcaacactgttgtccgtagctgtgtttagatgatgttgggggagaacaacaacatagcaacatgattatattggtggttcttcctctcctaagattgggaaaggagaagatattgcgagtgtttcatattggtggagtttgaaacattgttgctggagatagttttacataagcaaacataatcttcagttataaaggaatataagagccattgctattcatgaacataagcttcagtgtcatcattgtatattcgggatctctctgatggcacgaatacaatagcaagcgcagactcaaatgattgatcctgccgtctatttataggatgtagcatttatataatagcaagcacagtttta

SEQ ID NO: 38083 - DNA, 3393 bp, Zea Mays
ggccgccgcagccgccctagcccggtgcggctcttcgtcgggtccttcgccggcgacgggcacctaccaggatgaagacgaggatagtgtactccagggagtttctgctgtcgcttggcgagttggagcattgcaagaagctgccccctgactttgatgcagcgctgcttagtgagctgcaggagctgtcagcgggtgtgcttgagagaaacaagggctactacaacacatcccagggacggccagatgggtcggtgggatatacttactcttctcgtggtgggaacactggagggaggtgggatactcgctcatctggatcaagtgatcgggatggggaacctgatcgtgagtctcagacacaggggcgtggtgcaaaccagtacagacgcaattggcagaacacggagcatgatggcctacttggccgtggtggtttccctaggccatcaggatatactgggcagttgtcatcaaaggatcatggcaatgcgcctcagctaaacaggacatcagaacgctaccagccaccacgtccttacaaggctgctcctttttcacggaaagacattgactcgattaatgatgagacattcgggtcttctgaattatcaaatgaggatagagcagaagaagaaaggaagcggagggcatcttttgagttgatgagaaaagagcaacataaagcagtgctaggaaagaagagtggtcctgatatcctgaaggagaatcccagtgatgatatattttcaaagttacagacatctactgcaaaggcaaatgccaaaactaaaaacgagaagttagatggttctgtagtatcctcatatcaggaagataccactaaaccatcttcagttctactagctcctgcagccaggccgcttgtcccgccgggttttgcaaatgcattcgctgacaagaagcttcagtcacagtcgtctaacatcacacatgagccgaagctagaggatgaccagtcagcaacagggttcacatctgaaagtaaagagaagggagtttctggtaacgatgctactatgggtccaaagcacacgcttccacctggtagtgttacctcttcagctgaattggcttctagcgttctgaaagggagcgaggattgggatgctgatgtaatggataagtattctattggaaaagaaggcaaatctaaaaatattgatccagttaggaaggatgattcagtagcaatcttagaacagttctttggcaatgttttatcgaaaagcggcagcaacctaccaacttatgttgagaaccagccattgaaaactgatgatgacatgatcacttctgtgccagaatcatccaaatttgctcattggtttcttgatgaagacttgaaacctgcagaagacttatcttcaaagagcctgctctccatgattgtcaaaaatgaaaatccaggtctagaaaatttaaaccatactcctttatctgatgctgctgcccagaatttatccccaagagcacctattgataaacttgattctgcatcagagcttatctcatttacatcctctacgcctgccaatggagttcttgaacaatgcatccattctgatgttccagaggcagttcctattatgacatgtgaggatcttgagcagacgatgttagcacaggttagcaatagcagctcaactcagataaatgctacaaaggagcaactgactgttatggatgaaccagttgccatgcagaaagtaactgtagataatcatgcatcacaacatcttctttcattgttgcaaaaaggaacagataataagggagcaccttccctgggtttccagagagaatcaactgatgaacctctgagtgttgacacaaatttaatggcaaatggtggaatatctggaagtgatccggttaacagtgttgaaaatgttcctacttctgggaaggacttgacattggaagcgttattcggggctgcatttatgaatgagctccactcgaaagatgcaccagtttctattcgaggagccacaactggtggtcctactgagtttgcagagatgggtaaaactctgttgtcatctagccatgaaggatactaccctgttgaacagaccgtacacttcaacaatactaaagatgctgctgtccgtagagaaccaggtattgagcattcagcagtacctggtctaagtcaggggagtgctagttttgacaagaaaggaatggaaattcatctgcctgaagaagataatttgtttaccatgagtgattctctgcttggtcaaaattctgatattttggcatcagtaggatccagcagggttgaagggctattgcctgaaaaggcacttgataacctcagctataggtttcaaagtcttgtgcctggtgatgcagaacacattcaagtatatggtcctgatgcacttggatctcatcctcgtgattctcagaatatgtatcatcttctacagggtaggcctcctatgatagcacctcaccctatgatggatcacattgttaataggaaacagccagctccatttgatatggcacagtcgatacaccatgattctcaccgttctttcccatctaatgtgaatcatatgcaacataatcttcatgggccaggggtccctcacttggaccctgctggacatattatgcgacaacacatgtccatgcctggaagatttcctccagaaggcttgccaagaggtgtccctccatctcagcctgtgcatcacatggctggttatagacctgaaatgggtaatgtaaataatttccatatgcaccctcgccagcccaactatggagaatttggattgatgatgccaggtccagaggtgaggggcaatcatccagaggcgttcgaaaggttgatccagatggagatgtcagccagatcgaagcaacagcaggtgcaccaccctgcaatggccgctggccgtgtgcctagtgggatgtacgggcacgagcttgatgcgaaattgagatacagatgatggatgcctggatgcttcactccgtacagaggacctggagggttgtagcatgtacatctgaacgggtgatggaacggagtgggtctaagatctgtaggagcggaagtctaccgggaaaaggggttatggtgtgctgaatggaagacgtggcgtcgacgtcttagcagccacatgtgtaatgacgttttctgtctactgtttctgacgactatgcagtttccattttgtataagctctgttatgcaaaaggaaaaaaaaagaagaaaaaaaactgagtcagattaacagattggcgacagtgtccgcttgaccctatatcttcaacttgtttgaaaggaaatgaccacgcgtcatgccgagacgtttgtagctgatagcactgtttgagacgttttgc

SEQ ID NO: 38084 - DNA, 2386 bp, Zea Mays
cggtgcgcggctctctggattttgcggaatcgcgtttcgaatcgcgcatttggagtatgttgtagtgttgctaaggaatgggagacgcaaggatgaggctgcaaaggagctacaggtttttttaggcgatgacaatgatgcatttgtatcctggttatgggaccatctgtcctcaaatctgcacctttatgttcatgctaaatctgcctcttctaaggatgatgttaaaagcactcacagtgctgccagaggattgcctgttcacagtgtgacaagcagcatgcaagttaatcatgaacctgaagctgaaacccagaagacagtggtgactcataaaaaaagagattggggtcatcaaaaaagagattggggaacaattgatcgaggtcaatcagaagcagttcctcttagaagcgttgtagccaatgtttctcatgtggatgaaaaggattttcacaaatcacatgcagatgaaaaggcttttcataaatcacattctctaagacgaacccgctcgcctgacatgcataaccacagaaagaggagcagagaggcagatgtgcagtctaccaagaggtcatcccacccagttgttagtgcaccacgtcggcttcttcagtttgctgttcgtgatgctgtcagaactgtgcagccagttacttctagttctgaatcagattccaagcgtattcgttctgtagtgtcaacattggcatcagattccacacttgatatcactcatattaggttacagaaaacaaattcagatttgagagtaccaggtgccacagcagcactaagagctgcagctgaggctgctggagatgctctcaaggatagcttttctagaagtgtttttagtagattgggcagaatgcccacaataaattctactgaacaatcaccttatcacagagaacaagatctcaaaggcaaagaatatgggaatatagataatatacaagcagaaaatcaagttgaatttgacgaaagaaatcaacatggtggcagcgatgtttacatgcgcgatcagagaacagaggaagctactggttttattcccaatattgatgagtatgatcagaacagtgcagttaggtctaatggattgggttctcgccaaagcgcattgcctgctagtggaggtaaagagtcattagtactggggtatgtaagaggagcttctgaaataagaagcagaagattgatagcccaggggccacatgctggttcaggaccaagaccatctgaaaagacccaaaatgtttctggtaacactaacatgcagaagcttccaattcatgtaactggagatgccgttgcatttgatcatcaagtgccaatggagaaggttgctgatgcaaggaaatcacatgtgaagaccgcacaggctaatgatgtatccatgatgactgataagtccaaagatttgatacagccgagttcaatgctgcaggcacagaaggcttctggtgctgctggatcaaatactacaggccaacctgaaggtggccctgattctagaactgtctttgttagtaatgtacattttggttcatcaaaagatgctctttctcgtcacttcaataagtttggagcggtcttaaagacccatattgtgactgatggtgtcactggtcagtcaactggctcagcatatattgagtttttgcacaaagaatcagcagaacaggcattaaccctgaacgggacatcatttatgtcacgcattttgaaggtcgttcggaaaagctccactgaagtaacccagctgcctgtcttgccccgtgcttcttggggatcaccatttgcttcaaggctcattagaactgcatacccaaggccgaactatcccggtgcaattcgtgggcgactatcactcaggggtgctgcccggagtttacagtggaagcgtggtgttgctgattcaggagatgttggaaaacctagtccaactgcacctgggaatcagttggtcaccccggccacacgaaacttcacctacacacgcacggagccaaaaacaaatgcgggagcgatggcatgactgatcagctgtagcatgccgcagcgtcgcagaaagagatcgtgattgatgactgtttcgtagtccattcagctgcttttggtaaatatttaagtagctgcagatcttagtttgtagcaggctggtttttgtggacctcaaccttgagtaatattctgtgaggttttctgtgctgatttttcaccgtcagcacacccgttgttctgctggctgttcggagttcgtggatagagggtaaaatatataaaaagtagttttaaatgaaaatacgaacgcgataggtaggttgcaacatttgttttttttattgatggattatttaggatgtgtttgtttgca

SEQ ID NO: 38085 - DNA, 2740 bp, Zea Mays
cgacgtggtacctctcgctctcttgtacgggttgctgcttgctggctgccttcgctcgcttcgcttccaggcttccacagtccacaccaccaccccactccgcccagctccctcgagcgcgcagcgcggcggtggcgatgccgagctcccggcggactacaggccgcggcggtgcaggcgcaggcgcaggcggcgcgggggcgggtgatgcaggaggcggcgacggcgaccgagtgccgcggttcatgggcaacaaccgcgaccacaacccgcgggagctgcgctcctgggcgcgccgcacggggttccacccctcggctttcttctcgggggagtccaactcctccttcgcctcctccgccgcgccgcagccaccgccgccgcctcccccggcctcctcgcgtcgcccgccgcgcccgccgccggagcgggaccccgatccggacgcggaggatgacctcgatcccgcgcccggccgcggacgcggcagacgcccgcgtcgacgcatcgacctccgcggcgagctccagatcccgccgggcttcggccgcgaggaggcggtgccggggtcggcggagccggacgcgcggaggggaggcgcgcgcggggacgccacccggaggaacggcggcgtcgagagaggccaggcgccggccaatgccggccggaacggcaacggagcgctcgcggacgcggacgcgaggaagaaggccgaggacgcagaggcgaagcggaaggcggaggaggccgaggcgaggaggaagaaggaggacgaggagagggatgccgagctggctgcgtactaccaggagcagtgggcgaatgaggatgaaggagctgcgggcgctgccgccgccgctgctgagacggccccgctgtatgaggcgtcgggactccggtgtggtgtaaccgagaaccccggatgggcacccctcatattttatggcatacaacattacctgtcaatagctggttcgcttgtctttgttcctttgatactggtacctacaatgggtggctctgatgaggatactgcaacagtcatctccaccatgttattaatctctggtcttactacaatactacatacttttttgggttctcggcttccactgattcaaggaagctcctttgtatatttggctccagcgttgaaattcaagcacataatgagagaactacagggggctatacttgttggttcagtatttcagataatattaggatacactggccttatgtcactgtttctgaggttaataaatccagtagtggtggcaccgactattgctgcagtgggtttggcattttttagttatggttttcctcaggctggcagctgtgtagaaatcagcatgccgctcattctgttggttcttctgtgcactctgtacttgagaaaaatatccctgtttggcaaccatatcttccttgtctatgcggtgcccctcagtgttgcaattgtatgggcatattcattcttcctaactgcgggtggagcatataacttcaaaggttgcagctcaaatatacccagttcaaacatattactggattcatgcagaaggcatttagaaaccatgagacgctgccgtactgatgtttctagtgcatggagaactgctgcctgggtgaggattccctatccgttccaatggggcccaccaacatttcattctaagacgggtatcatcatgataatagtgtcgctggttgcttcagttgattcgctttcatcgtaccatgctgcatcgctgctggtaaatttaagtccaccaacacgcggagttgtcagcagagcgattgggcttgaagggatttcaagttttattgctggagtgtggggtacaggtacaggatcgataacattaacagagaacatacacacccttgaaacgaccaaaatggccagcagaagggcattgcagcttggggcagccgttttagtcgtctgctccttctttggtaaaatcggagctctcctagcctctatacctcttgcattggccgcctctgttctgtgcttcacctgggcgctaatcgttgcacttggcttgtctacgttgcgatacacccaagcagcaagctccagaaacttgataatagttggatttaccctattcatctccctgtcaatccctgcatactttcagcagtacgaacccagctccaatcttatcttgccaagctatcttctcccttatgctgcagcgtcaagtggaccagttcgcacagccagcagtgggttgaattatgcagtgaatgcgctcctatccatcaacgttgtggtggctctccttgtcgcgttgatccttgacaacactgtgccaggcagccgacaagagcgcggtgtgtacgtttggacagatcccaaatctctcgaggtggatcctgctaccttggaaccctaccgattgccggaaaagatttcgtgctggttcaggtgggcaaagtgtgtcggcatgtaaaggttctcaaagtcaggggccgcgatgaaaatattctatttattccattggtaccttgttactgtaggatttactatatgagaatatataatatatatagatacagatgctacatagttaggggcctctcttgctgctgttaggttaggataagcacatgtaaagttttggtcatgttagaggggacacgttctatgagctatgctatgtaagtttgtagaaatgctacgttcaaatgaccagtcaccgagtttaaccgttacacacgtccg

SEQ ID NO: 38086 - DNA, 377 bp, Zea Mays
cgtgaacctcgccgatagctccgtgtggggggaaatcgttagcgaaccggtcctgcgaattttccccacgtctctgcgctataaagccaacgccccgctgacccggcaccctcaaccaaccctagtcgcccgagtacttcacgccgcgcgcgccattggcagaggaggagaaagaagggtgccgccagggaagatttctgtgtaaactcaaattgggggggggggggggggcgtagttggtcttggagcttctggagatcaccacgtgcctgcttgtggcctcggcgggtggagattgtattggctgggccgtgaattgctcgccagtcttccgtcgtcgccgccgtaccacggaccaccgcgaccgggagcaacta

SEQ ID NO: 38087 - DNA, 1532 bp, Zea Mays
gtgaattacgttttcactcgcgatatcgtacttttggttcgtcgtgtactcgtgtggaaggcggctgcctgctcccgcggtctcttccgtctcggaggtgggagagagcgatcagcggcgtcgccgggtggatccaaagcgcgcgagaaaatgcagggcggatccagcggcatcgtgtatggtggcctcaagtaccaggcgcggtgtatcgccgacatacgcgcggacgccggctcgaccaccttcctcgccggcaccctcagcctcaaggaggagaacgaggtgcacctgatccggttttcgccggcggagagcgagctggtgtgcgatggcctcttctaccaccccaacgagatttgggacctcaaatcatgccccttcgatcacagggttttctccacagtctacacgtctggtgagggctatggtgcatcagtttggaagatcccggagctcaatgggcaatcaaactcaccacaacttgagcagctctttgagcttagtgggcatacgggcaagattagacgtgtgatctggtggccacttggaaagcatgataaactaattagcattgatgaccgaaatatttttctttggaacatagacacgtcaaaaaaaatagctaaggtgatctcacagggatcaactgacatgcttccaaatttacgtggtggagcttgggatccacacaatcataatttagttgctgcaatatctgattcatcacttcagctgtgggatctacgttctatggaaaaatcaactgcaattgaacatgcacatatacgggatgtggattataaccccaagaagcaaaacattgttgcaacagcagaagaggaatttggaattcgcttgtgggatctcagaatgcttaagtatcctctaaaagatctccctgggcactcacattggacatgggctgttcggcacaatcctgcgtatgatgagctccttctgagtgctggaacagattcaactgtaaatttatggttggctaaagttagcagtgacgatcctgaatctgatagcccttctgctttatccaataggcaagaagtaccattactcaactcatatactgactatgaagacagcatctatggtattgcatggagctcccatgatccatcattattcgcttctttgtcatatgatggaagggttgtcttggaatcagtcaagccctacttgcagagaaaatgaaccttgtctagttttctaaattgtaagctgagtagctttgccttgccattctgtagcctcttaacaagcatttatgtgatgattcggtttactgttgtagcaatggcagaaaaatggataacaagattgttacagaaatcaatttttaggatgttgtatatttgaagtgtccatgaaaaggtcttgtgttatatgatgaggtggggttgaactcaatttgtaaaaccgttcagaatttcagattagtaggattagttttttttttttacttttctgtttcgcattcagaatttcgttctttgcaggtagaattgagcaaatttggt

SEQ ID NO: 38088 - DNA, 985 bp, Zea Mays
aacaattaggcccgactagcacaacaagcggcacgcacggcgttaacctgcccagcgtgaaataattgctacctatttctctcgccggcgacgagcctccgcggaaaccagtgccaagccagagagtgcttctttctccgccagactgctgctccgcgcgagaagagccaccacggagtctgcgtgactcgggacagtggagaaaatcagcggcacagcgtgggtctcgcgacctccagcgaacgaggatggaagaaatggcacatttatgatcggtaatgagagctttcctgcatctctcttggatctacctgctgtggtggagtcatacaaaacatatgatgattctgtactaattaaaactgctgatgttggtcagatgattatggtaagagaagaaaatgatcctgctccagaaggagtcgagtacaagcatgggcttactcctccaatgagggatgcacgcaggcgacgtttccgcagagaaccagacttgaacgcagagctggttaaccaagttgagaagcatcttatcagtatcatgcatggagtatctgtcaaccagaacgccagtgcgacaggaggcgaagaaggtggtgatcgtaagaaacctccagtagctcgtgcagcaaagcagcctggggttcaggagcccgccgcgaatggagaggaagctgatcctgagaggagcgacagtgatgattcagataactgaaatggaggacctggactgggtgcagcctcagtggtccaggcgagccatgccaaacttcgcaatttgaataaatcagaatgtatatatttgtaacaaacaatgtgtttgttgttcgctgaagcatgtactgtcacggtaaacatgatgtgacgctataatgccaaacaagatgatgttactgcatgtactagcaaaatagttataaataacaactgctaagtagcattttattggatttaatttgatttgaactcgttttaaaatcaagaa

SEQ ID NO: 38089 - DNA, 4645 bp, Zea Mays
gacttattcaattttgactctcgtcggctccggtatttcgacttccaaaatagccctaacatttaccgaagctcctcccgccggcgcgctgcgatccaactccgagatgctcgcaccgcttccgcgcctgacgagcgcgctccgcggccactacgacgctgatcaggcctacctcctccgcaagagcgccctccaggctctcaccctccccaggccgcatgacgagtggaagttcgctcggaaaatcgtgcctggctgggacgatgcttccagcgaagtgcgtcaggcgtataaacaatttatcggggccgttgtggagttgttgagcggagaggcagtgtctgaagaactctaccaagttgcgcagactgtatatactctatttggtggcgatgacacggagtatgttggtgctaaaaaagtcctttccaaaaggaatgagttggagagccttgtgggctacactgtacaagactcagttttgaaaaagctagctcagttagctcagaagctcgattcccttcaacgagcaagtgcctatgaatctgtacacagaatagcggatgatgtaaatgaaaatgatagaattgaatttggagcagacttcgatttcaagccacttgcccgtttcattgttgatgtttctcttgacgcacccttagaaagtgctgaattgggcagtggtccatttgaaaaatggcagtatgatgcttggagcacatccacaactagtcattcaactgctgttaggggttctgtgagtttgaggtggctgaaagatcagtgtgctttgataactaaaagtggtggctcaatgctctcaggagatgaacttgcaatgaccttgtgcagagtgctcctatcaaataaagcaggcgatcagatagctggtgaacttttggacctggttggcgacaccgcttttgaaatagttcaagatcttcttttgcataggaaagagctagtggatgcaattcaacatggattgtcgatactgaaatctgagaaaatgacctcaggtaatcaaccaaagatgccaacttatggtacacaggtaactgtacaaacagagtctgaacgccagcttgataagattaggaggaaagaggaaagacgtagcaagcgcagtgcagacagtggcaataatgatattggtgttgatgatttttcatcccttcttttggcaagtgaacggaaggaggcatttgatgacgtgattggtagtggagaagggtcagacagttttacagtaacttcccttcctcaaggaaccacaaggaaacacatgaagggttatgaagaagtgaagattccaccaactccaacagcatcactgaaacccaatgagaagctgattgaaataaaagaattagatgagtttgcccaagctgccttccagggatacaagtcactcaatcgtgtgcagagtcgtattttccaagctacatactacaccaatgagaatattttagtttgtgccccaacaggtgctgggaaaacaaatattgcaatgattgcagttcttcatgaggttaaacagcacttcagggatggtattttacataaaaacgagtttaagatagtctatgttgctccaatgaagaggtaacagcaacattcagtcgccgattatctccattgaacctggttgttagagaacttacaggagatatgcagttgaccaaaaatgagattgaagaaactcagatgatagtgactactcctgagaagtgggatgttattacacgcaaaagcagtgacatgtcactttcaatgctggttaagctgatcatcattgatgaagtacaccttttaaatgacgatagaggttcagtaattgaggcgctagtagctcggactctccgccaggttgagtctatgcaatcaatgattcgcattgttggcctatctgctaccctgcctacctacttagaggtcgcacattttttgcgggttaatccagacactggacttttcttttttgactcaagctatcgtccagttcctcttgctcagcagtacattgggatcagtgaaagggattacacaaagagaagtgaattattcaatactttgtgttatgagaaggttgttgagtccattaagcaaggtcaccaagcattggtttttgtccatacccgtaaggatactgggaaaaccgctagaaccctgattgacctagcagcaaaagcaggggaattggaattattttcaagtgcagatcatcctcaatttccattaatcaagaaagatgttagtaaagcaaaaagtcgtgaagttgttgaattttttgaatctggatttggtatacacaatgctggaatgatgcgatctgacagaagtttgatggagcgcttgtttggtgacgggcttttgaaagtccttgtttgtacagcaactttggcttggggagtaaacttaccagctcatacagttgttataaagggcacacagctatatgatcctaaagctggtgggtggcgagacttggggatgcttgatgtgatgcagatctttggacgtgctggaaggccacagtttgataaaagtggcgaaggaattattatcacaacacatgacaaattggcttattacttgaggttattgacaagtcagcttccaatagagagccagttccttggatctctgaaagataatttaaatgctgaagttgctttgggcactgtaacaaatgtcagggaggcttgtacctggcttggctatacatacttatttataaggatgaagactaatcctctggtgtatgggataacttgggaagaggttatgggagatccttctatgggtgcaaagcaaagaacatttattattgatgctgcacgagcactggacaaagctaagatgatgcgctttgatgaaaagagtggtaacttctactgcaccgaacttggtcgaattgcaagtcatttttaccttcagtactccagtgtcgagacttacaatgagatgcttcgacgtcacatgagtgaaagtgagttgattactatggtggcccattcctctgaatttgagaatatcgtagtaagagaagaagaacaggatgaattagaagcccttgcaaggaaagcatgccctttagaaattaagggtgggccgactgacaaacatgggaaaatttcaattctcatacaggtttatatttcccgtgctccaatcgatagctcctctttacattctgatgctcaatacattagtcaaagtttggcacgcataatgagggcactatttgagatttgtctgcgtcggggatggtctgagatgtcatccttattgttgcaatattgcaaggccgtggaccgcaagatatggccccatcttcatccacttaggcagtttgataaggatctttctcctcaggtattgtggaaactcgaggaaagaaatgttgatctggatcatctttatgagatggaggaaaatgaaattggagctctgatccggttttctcatcagggaaagttggtcaagcaatacgttggatacttcccgtatgtcaacctatctgcaaccgtgagcccaatcactaggacagttcttaaagtggacctgcatataactcctgaatttgtgtggaaagatcgttatcatggcatgtcagaacgatggtggatcattgttgaggattctgaaaatgataccatttatcattcagagctattcacattaacgaagaagatggcaagaggaacacctacaaagatatcttttaatgtaccaatatttgaacctcatccgccacagtactatatacatgccatctcagactcatggctacatgctgaaacactcttcactgtttcttttcataatttgacattgccacagacacaaataacacacacagaactcttggacttgaagcctcttccactgagtgctcttggcaacaaaacgtatgaggatctgtacagattttcccatttcaacccgatacaaactcaggcttttcatgttctttatcacactgataacaatgtactcttgggagctccaactgggagtggcaaaacaatttcggcagaacttgcaatgctccatcttttcagtacacaaccagacatgaaggtagtttacattgctcctctaaaggcaatagtacgagaaagaatgaatgattggagaaaacgtcttgtaattcagcttgggaagaagatggttgagatgactggtgacttcactccagatttgatggccctattgtcagctgacatcatcatttctacccctgaaaaatgggatgggattagtcgaaattggcatagcagaagttacgttatgaaggtcgggctcatgatattggatgagatacatcttctgggagctgaccgtggacccatccttgaggtcattgtatcaagaatgcgatacatatcatcacaaacagaacgttcaattcggtttgttggtttatcaacggcattagcaaatgctcgtgatttagctgattggttgggcgttacagatgacggtctattcaatttcaagcctagtgtgagacctgtacctcttgaagtgcatatccagggatatcctgggaaattctattgtccaagaatgaatagcatgaacaaaccagcttatgcagccatatgcactcattcacccaataaaccagttctcattt

SEQ ID NO: 38090 - DNA, 2458 bp, Zea Mays
agcaagcaacgagaagggcggctttggcaggccgaggaggccagagaagagcagcagcagagagagagagagagagagagagagacgagttgggtgcagtgcagagaccagggcggctttgggttcaataatatcccatcactcacacgccacggcatcattggccgcgctccctccttcctcctcctgctctgctcgtctcctccgagtgagtcccaacagcagcagcaccacaccagcgcggagctgcaaagctcctcacggctgctttctcgtggcgcggtgcatgggagcgcggctctgagaggaaaagaagaggagaaaggcgcgcagggaggatgaagttcatgaagctgggctccaagcccgatgctttccagtccgacggcgccgacgtccgatatgtggcctctgaccttgcaacagatgttgtggtgcatgttcgtgaagtaaagttttacttacacaagtttcccctcatttccaagagcagcaggcttcaaaggttagttcttaaggccaccgaggagacgaccgatgaggtccgcatagatgaccttccagggggagcaaaatcgtttgaaatatgtgccaagttctgctacgggatggtggtcaccctcagtccacacaacgttgtagcagcaagatgcgcagcggagtatcttgaaatgaccgaggagatggagaaggggaatctgatatttaaaatcgaggtcttcatgaactctagcatacttcgcagctggaaggattctatcatcgtcctccagagaacgaaggccctgtcgccgtggtctgaggagctgaaggttgtgggcagatgcatcgatgccatcgcttccaagacatctgtggatcctgccaatgtgacctggtcatacagccataataacagcaagaagggaggagcttgtgctgaaatagtcgagtcggcaggaaaaccatcgatagctcccaaagattggtgggttgaggacttgtgtgaattggatgttgacctgtataggagagtcatggttgctatcaaatccaaggggagaatgtcacctgaactgataggagaggcacttaaggcatatgcggttagatggctgccagactcctacgatgcactggttgccgagggtcacatgaggaggaaccaatgtctggtcgagacactaatatggttgttgccttctgataagagctcaggctgttcttgcaggtttctcttgaaactgctgaaggtggctatactagtgggaggcggggagcacgtgaaggaagaactcatcagaaggatcagcttccagttgcacaaagctactgtgaaggatctcttgctacctgctacctcgccgcctaatgatggtacatatgatgttcggttggtgcatgatcttgtgcagagatttgttgcgagaaccgcgctgtctcataatggcggtttcattgagaagtctgatgagaagatgatcgagctcaactttgagcaagaatcaaccttggcggtgggagagcttgttgatggctacctgtctgaagtagcttcagatcaagccccttcactgcctatgtttgttgaactagcgacagccgtgcccgaagcggctaggccagttcatgacaccctttactatgcagttgatgcatatctcaagcaacacccggacataaataaatccgagaagaagaagatctgcagtctggtggatgtgaagaagctcagcacggacgcgtccatgcacgccacgcaaaacgaccgcctgcctctccggttggtggttcaggtcctcttcttccagcagctgagggccggctcgggcaaagaactcgccctggttgacaacggagaacacgcttgcacacggcctacgcaggatcagtgcgaaccctgcgaaaggcggataccgaagcatccagagtcactagataagcaggtgacgagcctgagcgcgagggagagccgccagcaccaccggaccagcgacagcgagcacaggggcggcggcaggaacagcttcaaagaccagctcgggggcctcctgccgcagtcgcggtccaggaggatcttcgacaagctgtggagcagcaaggggcaaggcgagcatggcggcaaaggctcggagacgtctggcagctcccagagcccaccgttgtcagcaaagcctgcagaagtgaagccctcccctcttcccgctgttaggaacaggaggtactctgtttcatagttttttttggctctcctagtttagagctctgggttaggttgctgtacagaaggaagctaatcactgctgcccatcctttttgtaagcagatcaacctgctgttctcaatgtgatcatccatgctgtagcttttactctagtgtaattccaactgggagcagagattcgccagggcctgcgttcttgaaaatgttattttttgaagtgaagttgtttttgtggcaaagataaaagaaataaca

SEQ ID NO: 38091 - DNA, 544 bp, Zea Mays
cacggtctgtgtggaaatagcggccgggacagcgatttctgggactttcctggaacgagcgcaagtaaaaaaaaagcggtgaaacggacggggcacagaaaagcgagacgggaacgcacagacgttactgcgaaaaagtccgcctccgccgccggtctcgtgcgccggccgaaccagaaccagagaagcacgccgaggcttagccgaggagccgagccggagccggagccggggccggggcagcgaccggctgcgcagacggccgcggcccccaccacgtggtggcactcgaggtgttgtctgtggtctggctgtacgcgtgggcccgcactcgacgttcgttcggaggccggatcttctgcggcggccgattggattcgccaccggcgtgcagggtagccggccacccacacttaataacgacgagtaaatgcatgtttggctcggatatgtgggcaaatcccagctttttcgtctatgatgtctgtggtgtggcgagccgtatcattgcaggtaccactagctttagttggtcatgttgacc

SEQ ID NO: 38092 - DNA, 1287 bp, Zea Mays
ctaactcgaaatcatgaacacaaccatactacgatctaccgccgaaacatttaaatcacatctatataattcatttatcgagtcaatcgagagcgacatgcatcggctcaccataaacaaacccaatcggcgtttgcaagaactacggtgattccgatttgtgcatcgcttcgaacgtcaacgagcgtcgaacgacttgccttctccccgcaaaacacggggttcgtctcctccacaaaacaaaacaagcaacacatacacaattaatcaccggagaataatgtcgatgtgaaattaaacaagaattgtcgtggtctcaccggggtgaatgacgacgatattggggctgcgcaaaacagcgaacacacggcgggcgtcgacggctgtttgctgcgcagcacaaagcagcgagccgcgtggagacgtcggagctgctgcgcaaaacatcgaacatgtagcgcacgacatcttgttgcagaccatggccacggggaggctgctacgcgctgtccttgggaggcagtcgcagcaaggaaaagctcgcggccatggagaaatggagctgcgcattttgtcgagcacctacggcgcgtcgatttggtggggctgcggggaaaaggagataggggcgctgcttcttgctgctcaaggtacaaggggcgagcagagctgctggccacctgtgcgtcagccatggagaggcttcttgcagccatggagcagaagggggcgctgggaggggatgagctgctgttggaattcctgggcgccgtggacagggagctgggcgaccatggaagtcgaaaagggagctgcacggctgggaaaacaggggcgctggtcatgggaaggagcagcgaaggagcgagctcggagaggggcgctgcgcaggcttgggcgccatggctgagtgcgcgaaaatctgggcgccgtccatgggaagtggaggtcggccatggctgctggcggccgagcgagcagagcgagaggaaaaaaaaaaagcagcggcgtccatgcttgctgccgtgaagcagggaggaagaagacctgctcaccggcctaggggagaagggcatcgccgagcaggaccagggggacgacgaccggatgtggggaagaaggaccttgctgcagcgcccatggagcaaggaggagagagttgtgcgtgtgggagaggaggaagaagagagtggcggctagaaaaagtggaggggtgggaatgcaaaatgaccaagggcaagggagagggatccgtatttatagagaaaccctagggttagggtttca

SEQ ID NO: 38093 - DNA, 1399 bp, Zea Mays
catatgaatagaaaagaacccctttgcgcaaggcaaacccccacccagctcacctcggcgatggcatcggcggcggccgtggagtgggaggcggcggcgcggaaggtgctggtggcgcgcaagccctgcttcgggctacctacggcctgcccaacctgcctccccgtgctcctctacctccgcatggcgcaggttcccttcgacatccacgtcgacacctccttccccgatgccgatcacataccatatgttgaatttggggattgcgtggctttcaacaacgagaaaggaggcgtaattgagtatctcaaggatgagaaaattgctgacttgaactcaaatcacccaaatatttcatccaccactgtgctagatacaaaggccatggtttcgtcctggcttgctaatgctttgctgtatgaactctgggtggttagtgctggaagcattgcaaatgatatctacttctctgatctcccttggcccattggaaagatactccattggaataaaactagacatgtgaagcagctacttggtataacaaagctcaatgctgcagaaaaagaagaggagatatacctgaaggcaagtgctgcttatgactcattgtctttcagattaggggatcaagtctttctatttgataatagatgttgatgctcttttccttggacatgctctttttgtcctcagtgcgttgcctgatacatctgtgctgaggggcacattgcagaagcatgacaacttggttagctttgctgagcatcacaaggtccagttgctggaaacctcatcatcgtcatcgtcagggttaggatcatcacctagcccgtcatcatccacccccaggagaagaccatctgctgaccacagttataagccaaaacccagagccaagaaggaacggacggaggaggaaaagaaattcaggcgaagagcaaagtatttcctggccacacaactcgttgcagttcttgtgttcctttcgctgatgggtggggttgatagttccgagctagacgacgaagatggcttggattatgatgattagatcctccctgtgctgttacacttgattagttccaacgacaaactgcctggttggttcggggtgctgtgagaatttgttccaacattggaaaatgtgttacgcttgattttagctaggaattcactgagttggtcacccatcggcagtttcataagctacttcggctgtaaacatacttgtctccgaagtttttttttttttgggcttcagtgaaccaaacttgtaagcaaattcgaattttggagttttggttttggagacgcgctgcttctgtatgatgagatctgttggccgcaacatatttgggaggaaaaaaaataaggggctaaaatcccctgcttattt

SEQ ID NO: 38094 - DNA, 3793 bp, Zea Mays
atgtggcagcgtgatgcgccgcaagaagcttccacgaagcttcatggccgctaccgcctcgagaacaagtccccattcccgaccgcaaaagcgggccgagccgaggaagaagagaacaaaacgaaacccgaagctttttcccccattcttcgctggatatacaggaggattttcagagtcagggaggggagttcgccgccgccgccggagatccgctcgccggacgagcgggccgcggcggaggaccccgccgaggcggaggcgggggaggtggtcttcgacgacgcgttcgacataccccataagaacgctccgcacgaccggttgcgccggtggaggcaagctgctcttgttcttaatgcttcacgacgttttagatatactcttgaccttaaaaaggaggaagagaaagagattataaggaggaagatccggtcccatgcgcaagttatacgggcagcatttcttttcaaagaagctgggcaaaaagatatcagagaagcttatactggtataaatcttgcaacggcctctcgcagttttccaattgaactggaaaagcttaacacattaaacagggaccatgacagtgttcttcttcaagaaattggaggagttaagggattgtcagatttgttgaagagtaatttagagaagggagttagtccaaatgaggatgaattattacaaaggaagaatgtatatggatcaaatacatatccacgcaagaagagaaaaaacatactgcgttttgtatttgaagcttgccaagatttaactcttgtcattctgatgatagctgctgccatatcactaacattgggtatgactacagagggtgttgatgaaggatggtatgatggcggaagtatctttttagccgtttttcttgtgatacttgttactgcaacaagtgattataggcaatctctacagtttcgacatctgaatgaggagaaacagaacatacaagtggaggttgttagaggtggtaaaagatttggagcttcaatctttgaccttgttgttggtgatgtagttcctctcaaaattggtgatcaagttcctgctgatggtgtcctgatatctggccattctcttgcaatagatgaatcaagtatgactggagagtcaaaagttgtccacaaggatcaaaaggcaccattcttgatgtctggttgcaaggttgcagatggctatggttctatgttggtaacaggggtgggtacaaatactgaatggggtcagttgatggctaacctttcagaagataatggtgaagaaacaccattacaggttcgcttgaatggtgttgcaacttttattggtttggtgggcttgtctgttgctggtgcagtacttgttgtgctttggataaggtattttactggacataccgaaaatcctgatgggacacctcaatttgttgctggaactactggtgtgaagcaaggatttatgggggcaattagaattttgactatcgctgtgaccattgtagttgttgctgtgcctgagggactcccattggcagtaacactgacgcttgcatattccatgaaaaagatgatgcgagacaaagctctggtgaggcggctctcgtcatgtgaaacaatgggatcagctactacaatatgcagtgataagacaggaacccttacattgaataagatgacagtcgtggaagcatattttgctggaacaaagttggatccatgtgatgatgttagccagatgtcagacagtgcagcgtcacttattattgaaggaattgcgcagaacacaacaggaactgtatttctgccagaggatgggggagcagctgaacttactggttcgcctactgaaaaggccattctttcttggggccttaagatagggatggatttcgacgatgtgaggacaaaatcttcagttattcatgtttttccatttaactcggagaagaaacgtggcgctgttgcagtacagttagatgatggtgttcacatccactggaaaggtgcagctgaaatagtgttatcatcttgcaaaagctggctttccgtcgatggctctgttcagtcaatgagtgctgagaagcacgatgaattcaagagatcaatcgaagacatgggagcgaattcattacgctgtgttgcttttgcatactgttcctttgacattgaaaagatcccaatggaagacataacaagctgggagttgcctgaggatgacctgactctgcttggcatcataggaataaaggacccctgtcgcccaggtgtaagggatgctgtacgcctgtgcactactgctggtgttaagagccagttgtaatcgagggaaaagtgttccgtgagatgtctgaaagtgcaagaggagaggccgccgacaagataattgtgatggggagatcctcgccaaatgataaacttttgcttgtccaagctttaaaacgaaaaggccatgttgtagctgttactggtgatggcacaaatgatgcccctgcattgcacgaggccgatataggtctttcaatgggcatttccgggacagaagttgctaaagaaagctctgacattataatcttggatgatgacttcacgtcagttgtcaaggttgttcgttggggacgatctgtctacgctaatatccagaaattcattcagttccagctcaccgtcaatgttgctgcacttgtcattaatgtggttgctgctgtgtcctctggtgatgtgcccctaaatgctgttgagcttctgtgggtgaacctcataatggacacacttggagctcttgcattagcaaccgagcctccaacagacaaccttatgaagagaaatcctgttggtcgaagggaacctcttgttacaaatatcatgtggagaaacttgtttgttcaggccctttaccaagtagcaattcttctgattttcgattttgatggagtaaggattctgcgtctgcagaatgaaagccgatctgatgctgagaagataacaaatactttcatcttcaacacatttgtattttgccagatcttcaatgagttcaatgcacgaaaacccgaggaaaagaatgtcttcaaaggggtcacgaagaatcacctgttcatgggaataatcggtataacgacagtatttcagatactgataattcagttcctggggaagttcttcaaaatagtgaggcttggttggagactatggttggtttcagttgctatcggccttgtgagttggcccctggcttatgtgggtaaatttattcctgtgcccgtaagacctcttccggactatttcaaaccccgctgttgttggaaaccgccgcgccgagacgaggaggaaggtgggcagagctaaagcgcaacgagtgggcagtgtaaataggcacgtgataaaaaaatggagataaattgcactggttgattccatggtagcagcatcctggggatgtacgcataagatggcaggtagtcggcctcgtcgttttcttctaggagaagcagtcggaagaaaagaagtactatacagaagccaaacttgtctacccctatccagctggtgtgtctgctatgcggcagcgaaacttgagtcattagattgtagcctgaatgaaagcagcgctagcttgcgatgtagcagtacctttttttccctggcgatatcatctgactgtaaatttgtaaatgctttcggactacgagttgttcttatttttcatccacctcttctctacggaacgtttttttctatataagaaaataaagtcaacagagcagttctaaaacgactgttttttttttcctgaa

SEQ ID NO: 38095 - DNA, 1602 bp, Zea Mays
gcgcctcttcttggcttttttgcggcctgtcggatcggcacgaccttctagatgattctcaaacccacttccgggctgccgccgaggttatctacaacaccgagcagcgagaaggggttggtgtccagcacgaattgaatcgtcgccagaagtcatggcggattcggccacttcccgtccaaccgttctcgtcaccggcgccggcggccgcacaggccaaattgtctacaacaaactgaaagagaggtctgagcagttcgtggcaagagggctagtcaggacagaggagagcaagcagaagattggggcagccggtgatgtttacgttgctgacataagagacgcggatcgtctagcacctgctgtacaaggtgtggatgcgctcataatcctcaccagtgctgccccgaaaatgaaaccgggtttcgaccctagcaaaggtggacggcccgagttctactacgaagacggaatgtaccctgaacaggtgggttgatgagtcttgtccaagcttgtatgccaattagtcgaatttgttattggacagtttagtttgtgataacattggttgtggttgtttaggtggattgggttggccaaaagaatcagatcgatgctgctaaagctgctggagtgaagcatattgtgctggtgggatctatgggaggaacaaatcctaaccatccgctgaacagcatgggtaatggcaatatactggtatggaagcgcaaagcagaacagtatttggcagacagtggaatcccttatacaatcataagaagcaaagaggcatttacctggaggactccaagggacaacgccaggaggtctacaagacaaggacggaggagtgagagagctacttgtggggaaagacgatgaacttctccagactgacacaaagtcgattcctagagccgatgtggctgaggtttgtgtccaggctctgcagtacgaagaggccaagttcaaggcatttgatttggcctcaaagcctgaaggtgtgggcacgccaacaaaggactttagggcactgttctcccagatcactgctcggttttgagcgagctgctgagaagcctactcgagttctagattttatggtgtcacaatccattttatcgtgggcttgtcctggagatacaaccaggtagcttgttggagctgcggtttggtgcaattgcaaccaggtagcttgtatcaatccattttatggtgcattgtttgcttgtacactgctgaatgtcgtctggttgccaattgtgtgaactgttgacagccattaaaacaagttatttggaaccctgtttgcataaattgttgggaacaatttatccaggcacagttactcacctctgcaacgtcctccaaagttccgatgcatattatgctagtaattcctctacaaattagtgctgaaagctgcagccatcctgatggttctatgaacaaaacaggtatgggcatttccttagtcaattgcgctgggttgatctcatccggactttcagatgatcgagccagatttctcgtgtcttgatcagagaagcaacaactgcattagttatggttttccttcacaccgtgctataaaaataaaaa

SEQ ID NO: 38096 - DNA, 1834 bp, Zea Mays
agagcgcacggcccagttgggcccaatactcgacacgactcattgaccggcccattacggctgaagggagtcgctcgccgccgcgttcgaggcgttccctcgtcgcgctcgcgccgtcgaccttcaccgctcgctgtcaggtctgacaatgatccagcgagatactacgatggatatagcagattaagaacatgggcatacagttctcttgatcaatataagatattttttgtagcacgaattacttcgcgtcctttatccagttttcatccatagcttcatggatctagtggcagaaggacatatgcaggaagctcggtcatttttccatacatttcgggaagatcatgaggtgatgcattcaagggatcttcagaagctggaaggcgtcctgtctccttcacacttggaggaaatggaattggcccggtcttttaggaaaaataaatttaaaattaaattatgtgagtattcgtatgaattgcttctccagtatctccagaaaacacaagcccttgtggtgcttggagtaatcaatgagcacataacttttgaagtatctcctggtcagccctcattaatctctgatgacgctgatgttgttgctctgattgggacaagtaaggacttggcaaaacagataaatcagaaggaagtacattgggggttgcttgaagattctgttgaagagcgaatggagaaggcactagcagaatctgataaaatagaagctgaaagcaaggatgctgatgcagaagataacaagaaaagaaatgcagaaggtggaaagcaaggtgcttctcttaagaaagccaaaaaggacaagcttgttggtgcgactggaaaaagcgtcagaactgaaacaagcatggtttctgtggcacctcgagtgaaaccggagctaactcttccagcaacgcctgttgaagttgaacaatcaattcttgaggacctacgaaaccgtgcacaactgaatagtgtggcattgccatctgttagcttctacacattccttaatacacataatggattaaactgttcctcaatatcacatgatggatcactggttgttggtgggttttctgattcgtcagtgaaggtctgggatatgtcaaagatgggccagccagcaaaaatatcaagatcacagggtgagaatgggccttcccagggtgagcgcatatcaacattagatgaggggaaacgaacctatacactatttcaaggccattctggaccagtttattctgcggcctttagcccgtttggggatttcctcttgtcatcatcttcagactcgacaattagactatggagcaccaagctgaatgctaatcttgtctgttacaaaggacacaactacccggtttgggatgtccaattcagtccagttggccattactttgctagtgcttcgcacgacaggactgctagaatttggtcaatggataaaatccagcctttgcgaataatggctgggcatctttctgatgttgattgtgtccagtggcatgtaaactgtaactacattgccactggctctagcgacaaaactgtaaggctatgggatgttcagacgggtgaatgcatacggatgtttattggtcataggagtatggttttatcactggcaatgtcacctgatggacgatacatggcctccggagatgaagatggaacaatcatgatatgggatctctcgactggccgttgtgtttcaccactactaggacacagctcttgtgtgtggacacttgctttcagggtcgcaatctgattcgattatctgtagccaaacttagcgtctaggcttcaaagcatagcacaattttgg

SEQ ID NO: 38097 - DNA, 768 bp, Zea Mays
tccagatctgaatagacatttgagtacactcctccagaggcactccttaattcaaactggtttcaaggatcaagaagtgcaaggcttaagtatgtctctttttcccatttctcttctacgaattttggtatgtgccactgtgtttgacatacagctgcactgtgattcacggaatttgttgtttaactatgcacaagtatgacatctggagggttggagttgtcatgctagagttgatgatgggttctccccatgtttttcagataagtgatcgtacacgtattttaatggatcaacatctcggagggtggagtgaacaaacaaaggagcttgcatacaagttgaggtcatacatggagttgtgcattttagtcccagggatttcctcgcaacatcatggcagtggtagcccagaacagggtcaatttgggttagcttcttggaaatgctctgaagaatcatttgcacgtcaagtgaagatcagagatcctctcaagattggttttcctaatttatgggcgttgcgacttgcacgccagctacttgtgtggcatcctgagccaatgtaatgtaaggagaggagattagtgataactaaccgacaaatcttcagctcggtcctttcaagttcaagtcgcgtgcatttggttagaggaattcatgaatcgtttgtaatttaccatcctagctgtgtcataaagatgttgtgaatataacataacatgaagtaaaagatagtagcatatgtgaaattacatgtgtaacgac

SEQ ID NO: 38098 - DNA, 3614 bp, Zea Mays
cttctatggccgacctactccttcaagcgcgggagcagctgattgaaggcgatgcgatggatggattggctcagagtgtcaatacggctggactgttctccaccgggtctgggaggccactggctgtcagccagagagccgtaaggagggccagtgcgttggttggcgaggaagtggacgaggctactgataacaataacaagaagagaagtggtgtgcataaagataacttcttcccaatgttccaaagtggatctggtaaggcagtcttgctcaacaaggactcaattcagaaggcaagagctgttctagaagaaaatgttgagaatgcagctggtgccaaacagccaatgttccataccagtacgggtagatctgtcctagtcagcaagagctcaatcgataaggcgagagctgttttagggggtcggatgattgcacatgaaggagatgtatctaacctatcatatggaactagagcaataggatatgctgtacctgacacccctgtgactaaaacaagtgctaatcagtttcatatgggaagggaatatcgtccagtcaatgaaattccaaaggtccccaagcctccctccagatgtttatctgaaggcgacaatgcgagtaactctaaagacaagacccagtggcaccatatgccagctggttctggaaatacggactgcttagcaaatggaaagagaattattggggggagaaactccgtatctccattcaaacggccccgttcttccagatgggtcagtaaccactataaatggattgtgtggaagcttgcttcacttgagaggtgctacccaactagagttgctggtaaattcttgacggttgacaatgttcttgaggagcttaagtaccggtatgacagagaagtgaatcatggtcatcgatcagcaataaagaaaattttagaagggaattcttcaccatctttaatgatggtcttgtgcatttcagctatttactcttgtccttaccaaaataacaataagttggaggttaacaaggtagatactaatgaagacaacagtggcaaccaaagcttctctgccactaatagaaacatgtctgcaaatattgaattaactgatggatggtattcacttgatgcatcattggatgtggcacttctggaacaactagagaaaagaaagcttttcgtagggcagaagcttcgggtgtctggtgttgtcaaattagttgtccacataaatggcacctatcgtgcaagatggaatgatgccttaggattctgcaaacatgttggactcccactggcattcaggtgcataaaagtttctggtggtagagttcctaggacactggttggaatcacaaggatatatcctattctctaccgggaaaggttgcctgatggtcgttttgttgtgagatctgaaaggatggaaagaaaggcgctggaactataccaccagagagtatctaagatcacagaagatattctgtttgaacaacaagaaaactgtgacagtactgatgataacgaggaaggggctacaatttgtaaaatgctagagcatgccgctgagcctgagtttatacttgcgggcatgactccagagcagttgaagtgtttctcatcttatatagaaaagcaaaagattgttaagcaaaatgaagtatctgagaaggttgagaaggcccttgttgttgctggccttagttcaagggatgttacaccatttttgaaagtgagagtgattggccttgtcaataaacattcagcttccacatccagtaacaaggaagggctaataacaatttggaatccgactgagatgcagaaagataatcttgtggagggacaagcttattctgttatgggattggtaccttcgaactattgcaccgaaatcatgtacttgcatgctagaggatcatctacaacatggaagcccttagcatcagctcagactacagattttaaaccattctttacccctcgtagagcaattgaactcttgaaatttggtgaggtgccgatttcaagtgaatttgatattgcaggtcttattttatatgttggcaatacttatttatgtaacaacaagaaaaagcagtggctttttttaacagatggatctaaatttgtctctgggcaagggtgtgaagagcaagattgtcttctagctgttagcttttcgtccgcaaccactgatgaagactctacattatttagttacactctctctggaaatacagttggttttagtaatctggtcaaacgacagaaagacgagacgaggcaagtatgggtagctgaggcaacagagagctcaagctacactctttccaacgagattcctagaaaatctcacctaaaagaagctgcagttttggctgagagatgggcttctagatcttatcataaaattcaagagctaaaagaaagggttttatgtatagttggcaacgctggtgtctgaattataataaacggtaccacctgctgtttttggaaatggtgcaagattttgcttgggggttgtcttagctacaccattatttctcactgatgttggttggttctggttggagcctttttaacgcaatatgaatggcccttgcaaaaaacttcaagagcagcaagatccttgcacaaacttcaaaaatcaacttgaagatgtacacatttgaagacacgaggcttcagggctgttttctaagtctgtgtataaagcctttttcagagggtcgattaactttgagccgtggaaaaggttatggagatcttgggcgccgcctaaatgcaaaacttttctctggctagccattaggaacaaatgttgaactgcagacagataggagaagagggctttctcacctagaggcctgccccctctgcgatcaagagcaggaaacagctcaacacatcctaacgagttgtgtttttgcaaggcttttttggcacaacattatggctcccttcggtatgggtacctcaccccgagtcagaatgaacttatcctttgcagatttgtggcgaaaagtgagcaacaatgtgcataaagagaagagaacaggaataaacaatgctattatcttggaggcctggtgcatttggcggcaaagaaatcgtacggtttttgaaggagatttgccagctgttagcaaggtgcagcaaagttttctagaagagctaacatgtttggtcttgactggggctcatcaccttagcattttagggataattgatactcttagagcggtcggattgggctctcttgatcatatgtaatttttgtttcagtttcgatgtggtgtgggtgatgatcttgctcagcaagatcctcatcttgtaggattttcttttctctctaatataaaatatgggacgcgttcgagaaaaaaaaacttcaagagctaaaagaaaggcttctatgtatagttggcgaccctggtgtctgaattataataaatggtgctgcccgccattttttttggagatgatgcaagattttgcatgggggttcttgccataactacatgtctacatcaatatttctcagtggtacaattagaagatcaacaacccacattggcacattgtatgcacaactttcagaacttcg

SEQ ID NO: 38099 - DNA, 3195 bp, Zea Mays
ggcccacccacgctcccgggcccggaacgagatgggtggtgagctcaccgctgcctcgtggtgggcaacgcgaggcggccgaaactgacacactccctctccgctctctctctctctctcgcagccatgctcacacacacacgcaggcagcagtcacgctgtgggaggggcagagaagcgagcgacacaggaaactgacgtcgcttttgacggcctgctacataaatcccctcgcctgcctcccttcccatctccttccccgcaaaaatcgcccgggtgccaggtgcgcggcgcagggaggtcgcgacggattccgggcaagtgcatgtgagatccgatggtggcggctgcagcggcggccggcggcggcgccgacgcgggatgcggaggcggaggcggaggcggagggaaggacgcgctgttcgtggagctgtggaaggcctgcgcggggccgctgtccagcgtgccgctactcggggagaaggtctactacttcccgcagggccacatcgagcaggtggaggcatcgacaaaccatcttgccgagcatcagggcacgcccctctacaacctgccatggaagataccctgcaagctcatgaacatggagctgaaggctgagccggatactgatgaggtgtacgcccaactcaccctgctccctgataagcaagatgagaatacatctgcaagagtggagaatgaggaggcagaggaggaggtggtgcctcatgtgccaccagccacaagtgaggggcttcgcatccattccttctgcaagacattgactgcctcagacacaagcacacatggtggtttctcagtgttgcgccggcatgcagatgagtgcctcccaccactggatatgagtcaacatcccccaaatcaagaattggtggccaaggacctgcatggggttgagtggcggttccgtcacatctttcgaggtcagccacggagacacctccttcagagtggttggagtgtttttgttagtgccaagcgtcttgttgcgggggatgcattcatatttctcagaggtgagaatggggagttacgtgttggagttcggcgtgcactgaggcaccaaaccactatcccatcttcagtcatatcaagccacagtatgcatcttggtgttcttgcaacagcatggcatgcagtgaacactgggagtatgttcactgtctactacaaaccaaggactagtccagctgaatttgtggtttcacgagctaggtactgtgaatcactgaaacgaaattattcaatagggatgaggtttaggatgagatttgaaggtgaagaagcggcagagcaaagattcactggcacaatagttggaatatgtgtttctgatccatctggctgggctgactcgaaatggcgttcccttaaggtgagatgggatgaagcttcttctgttcctcgtcctgaaagagtttctccttggcaaatagaacctgctgttagcccatctcctgtgaaccctcttccagtcagattcaagaggtctcgttcaagtgttaacgcctcaccatctgatgtgtctactgtaaacagagaagttgcttctaaagtcatggtagagtcgcaacagaataatctcccaagggccttgcacaatcaaggaaggacacaattgacaggtcgataccgtgatagcactgatgtgaagactgctcaggatcttaccatgtggtcttcaggaactgagcaacagagaaacaatattgctgcccagacaaaacgatgtctggagggttggacgcaatctagaactccagaaggttacaatcaactgttctcggcatttcaaccactgaaggatgcacataatccacttcgtccttttcctaataaaatatctgggactcgctcaagtacctgggtcacagccgatgcccgttatccagctcaacaagccaatcacaacatgttacatggcacattgtcttttatgcctcatagcagtggttttaggatgattcaacagaataatctagtgacacctgaagctgcaaattttactgggaaatcagctttcacttcacttcagggccatgtcactgatcagtgctccacaggctggtttggatctattgagtcaaattcccacacagaccatgcatcgtcaagtttgatcaggtcccagcctttggttattggaaatgatgttcagaaaaccaaaggcacttcattcaaactatttgggattcctcttggcagtccagaaaaatctgaacctctggtatccccaccaagtgtcgcatatgacgggaaacttcaaacttctccaacagacaacaatgagccttgttcagaagctacccagaatatccagaacaaagtgcaaagtagttcaaccagaagctgcaagaaggtccataagcaaggcagcgccctcgggagatcgatcgatctaacaaagttcgcttgctacgatgagctgattgccgaactagaccagatgtttgacttcgatggtgagctgaagagtccttgcaggaactggttggtcgtctacactgacaacgaaggcgacatgatgctggtcggcgacgacccctggaatgagttctgtgacatggtccacaagatcttcatctacacaagggaggaagtggagaggatgaacccaggcgccctaaacgcgaggctcgaagactgcctgtctgactcgctgggaagagggctggcttccaaagagccccggagcggcccctcgacttcggctgtcgattctgagaaccgcgctaacttgtccacccttttgaaagtggtgaagcagacaaaaggccacgtgtcagagtgaccggaagaacgagaaaggggtgtgtttcagtggtgtgtagtaggtaggtaattttgtgtgtatgcctccgggtaaaagccccgcggtacccagtttgtagatggtgcttctcctggtgctagtttcccgtcgtaagctggatttttttggggggtgtgtgccctgctctgtgtgctgacccgcctgggggtaagttgtagcagagcaggagaaagcaggcaagaaaccgctggtgcgcctgcttggccaatccttttccttgcggagcgctgtaaatagccttggatctgaagcgtagtaatgtattgtcatggtactcgaagtcatgctccagtttgtgttgggtatgacctgcaactgtcggttcgatgggtgcggat

SEQ ID NO: 38100 - DNA, 1186 bp, Zea Mays
taagacccaagcctaaatttgccttgcaggtttatgcatccgggtgctctagctggattatcgatagtggatgcacagaccacatgacgggggaaaagaagatgttctcttcctacgtcaagaacaaggatccccaagattcaataatattcagcgatgggaaccaaggcaaggtgaaagggttagggaagattactatttcatccgagcactctatttctaatgtgtttttagttgagtctcttggatataatttgttatctgttagtcaattatgcaatatgggatataattgtctattcactaatgtagatgtgtctgtctttagaagaagtgatggttcattaggttttaagggtgtattagacgacaaactttatttagttgattttgcaaaagaggaggccggtctagatgcatgcttaattgctaagactagcatgggctggctgtggcatcgccgcttagcacatgtggggatgaaaaatcttcacaagcttctaaagggagaacacgtgataggtctaaccaatgttactttcgaaaaagatagaccttgtgcagcttgtcaagcaggtaaacaagtgggaggagcgcatcacagcaagaatgtgatgaccacatcaagacctctggagctgctacatatggacctcttcggacccgtcgcctatctaagcataggaggaagtaagtatggactagttattgttgatgacttttcccgcttcacttgggtattctttttgcaggataaatctaaaacccaagggaccctcaagcgcttcctaaggagagctcaaaacgagtttgagctcaaggtgaagaagataaggagcgacaatgggtccgagttcaagaatcttcaagtggaggattaccttgaggaggaagggatcaagcacgagttctccgctcgctacacaccacaacaaaatggtgtggtagagaggaagaacaggacgcttatagacatggcgaggacgatgcttggagagttcaagacccccgagcgcttttggtcgaaagccgtgaatacggcttgccacgccatcaacagggtctaccttcatcgcctcctcaagaagacgtcgaatgagctactaaccggtaacaaaccaaatgtttcgtattttcgggtttttgggagtaaatgctacattctagtgaagaagggtaagaattc

SEQ ID NO: 38101 - DNA, 4701 bp, Zea Mays
cgggagcccaatgcccacgccccgcgcacgccaacacgccagagcaccgaaatagagacaggagaggctgcgcagcagcacacaggcctcgcgacgcgactcgcgggacggaagccctagtttttttccttgcgttattccacccccttccttcctaccccgcgcctccgccccatcctccaccctgcgcccccgcctccgccgcgccatgtacccaagcccgtacgacggttccggcgccggaggaaagatccggcgccgcccgcacctccgcgccgcctccacgccctacgaacggccccccgccgccgcggcggcgcaccgcctcgcggccgctgctgcagcggcttccgcatcctcggagcccggcggggagcgcggcggcgggggcggtggctgggtgtcccggctggtggacccggcctcccgcctcatcgcgggtggcgccgcgcgcctcttcggctcggtgttccgcaagcgcctcgccccgccgccggccccttctccgccgctgtcgtcgcctcctggacgaaacaatgagccaaaacagggcttacctgattcaacacatgttgattcacttccaatcccagagggtggaatggagaaagggaagagcatagttgacacatcagatgtcaaagcaatgtctgaagtagagcacttgttaatgcgaaagacatttactaaggttgagtttgatcgtcttacagacttattgcgtgcaagaaccattgagtctgatccacctaaaccaattgtttctcgtgaggaaaagaatgaagaaagtatcaaagttgatggaattagaggctcagcgttacgtcatatggacctagatgattctcctgctgttaaagtacataatcatggtgctagttctcctgcagaactcgcgaaacaatatatgagctctcgttatttgagggaaccccaatccagtagtctgcggagccgattgtttcttgagaataaaggtgaagcaagcaacactgtcaatgataggaggtctgtaccaccaattgttcagacaccacttgaacttcggaatgaaaaccctggtctccctgtaaatggctatgtgacttcgggattacgtgggcgttcagcgatatatagaatgtctcgctctccatattttaagggtcagaactattccagtgatttgaacacgtcttcattgtcccaacgatcacaaagcttgcatgttggtggcaggcaggtcttgaaacgaagcggggctgaattagagaatgaacttggatctataggccccattcgtagaattcggcagaaatcaaatatgatgtcttcatttagagattctcgtgcaaatcctaaaggaaaccttcttactagccatataagtagtactgatttcactgaagacggtgcatccattcagtctccgagctcaaaaaaattattggttgggagtagtcaatctctgcgacccttagaatcccaaaagaatgagggagatggtaaatctagtgatagcattccacccataccagctcaatcaaacaagatggctgaaaagatatttgagcagcttaatataatagctccatcgccaaaacaacaacagtctgttactctgaatgctagtaactctatgtcaaagaaacctgtttttcaagatgctgggtcaagcagtatgtataaccaatctagttccctgaagtttcaagatttggatggtgcaaatggaccccatgatacaaacttgaatggttccctgctgaagaaagacaagctaaatataataaaagacggatcgccaaaagctgccttttctgatagacctgcccttttggggaactcggtttctgcttctaaatcatggacgccagcctttaaaatggctgtgatagaggacttaccagagttggatgatgatctggaggtccttattcaatcaagtaagatagaggttgaaacaactgagcagaaaattgattcaaatagaaaagaacagaaggttgaacaaaatatattagagcaaagggttgaaccgaacttgaagaacattgctggttctacgattagtgaacagcctgtagcatcactgtctaaaactgtcacttcatctggtggtttatttttatcaaatgatcctgggaaggcagttcccaaagcttctgtggacaataataccgaatttgcattctcaaatgggcctcctggcacccgccctgcaactggtgtatcagcaatgccacttgcttcagttaataacgataaacagactggtgcttcaaatttcattttcggcatcaagcagccaattacgtcagattttgaaacatcaactgcaaaaaacaaatcaacactcgggcagagtgtcaccaagcccacaacattagccagcactagttcagagagaggtgataaaacagaaaaagcagaagatgtagccaacccatctgagaaggtgttgccttcagctgcatcaacaacactgaatgcacctctccattttacatctgtggcatctacttcgagcctgagcaatggcttgtcatactcaccaccaaagctcacaactcctccacctactgataaacctgctatcagctcagctgtttccacttccatatttgccgtatccagtagcagtccagctatttcatcgtctcctgcatttacgggatttagtttttcttccagtgctccggttggattgtcattggtaacatcagctaaatctgatggcacaactgctgaaaataaggcagctagcaccttatcatttggtatagggggtacaaaagctgaagtgaaatctgttgcaccagatgcaagcagcaaggcatcatcggaactttttatttcacctgtgtcatcaagtattgcaagcttttcaagttcccccgccacatctacgcctactttcaccgcagttgcaccttcaagtgatgctgctggaatatctgtggctgcaccatctagtacttccactgcaccaggtttacagtctgcttcaaccccttcatttacatttccgagctctggaaacaacctttttgggttcagctccccagcccaatctactggcctcagtacatcgtcacttgctggtagtacctctcaaccaccagctgctagcacactctttggtagtaagccgacgcagtcagacggaacaatacaacaaacatcccagagttcaaaaccacaatctggctcaccattcccggtcatgactcctggagttggagcatcctcgtctggacctgggacgctatcttttggacttggagcttcctcaactggttcaggcactgcatcttttggtgtcggagcttcatcttccgcacctggaactttatcaacttttggtgcagcagctcactcttctggacctggagttttctcttttggggcaggaacttcctcatcaggacctagcactgcctcttttggtgcagcaacttccacatcagggactggatttggcaattcaccatttggaactggagctacttttgcgaatccatttagctctagttcaagcactgggttcacattttcttcacctagctcttctgctggtgcatcaacagcggccagtacgagtgtatttgccagcacctctacagcttcttcagcctcagcttttagcaacccttttggctcaagttcatccccacccagcacatttacatttgggcaatcaggttcttcaggcaacacttttgcatttggagcgcagccagctccaacgttcccatctcaaccatcacttttctcatttagttcagccaacactagcatgaattcgtctccacagcctgcatttggaatgataaataccaacacagccttcagcatggcttcccccggaaatgatcagatgaacgaagacagcatggcagatgacactagtcaggcagcacctgcgccagcgccagtatttggttcatcatttggacagcagaacaactcatctgctgccccggtatttggtgctcccgcggtccagccaggtggtgtttttcagttcgggggccaacaaggttcagcacagcagaacccgtccttcccagctgttggcagtctagagtttcagggtgggaacttttcgttgggcagcgggggtggtggcggtgacaagtcgaaccgaagagtgatcaaggtcaaaaggacaccaaagaagagataagggtgcgccctctgttggaatcttcctttgatggtgtcatttgtgattggatcgcactgcttgggaacgaagtcaagtacgacgaggttttatggccacgcagatttccctgcagcagggcgatagcgctatatatctcatggctggcttgtaaacgcatccaccaaggtcagtgtagtctcctgtgcactcaattcatttcctcatcggggccggcggcctgcatgttgtgtaatatgcctgtgctcatggggtgtaaaatagaacaaaaaagtgttgtaatttttgttttcttgcctccaaatgccgacttgatttcttatctgtggtttggctacggtatatttgtatcggagtgtaacgcactgttgtatttttgtttttgggtttattacattcaacaaggtcagaactgtatcgtagaatacctgtccatacttaatcctgcctacgcattgattgtttactcgtcgtccgtgagctgttgcgtgctcgtgccacgctgtgttgtccttgtcgcagcagaatatttc

SEQ ID NO: 38102 - DNA, 538 bp, Zea Mays
ctgcattcgaatcacagccgccacggatccagtggcccgacgtggaaggcagaactcccagaccttttctctccaccctaagcttctgcacgcgcgcaccgcccctcaccgtcggcctcttctcctcttcgtccgccacaggatctcgcctcgccgaggccatgtaccgtgccgccggggaccacatccgctccctcaaggtgaatagacaaaaatacgggagagggcagccaacggccaccgggagttgggtcctaggagccaccgacttcagccgcctgctcaatgacggcgagggcggtgcctacctgacaagcccgcacgtcggcatggtagttgccatcaagaaactcaatcccaatgacataaggttcgaatgctccattccttagacaatgccaacgtcctgaaattttactcctggtggtccttttgtgctttcccttgcacacaaacacaaagtgaactttcttctgtgatcagggacagaaccagatggaggagcatcatccttcttgacttcagatccagatgggcg

SEQ ID NO: 38103 - DNA, 1730 bp, Zea Mays
gccttggcccttggtcctggggtgtttcggctttgtgcccgcgctgcagcggcaaaggctacgtcgtcttggcgcgccactcgatggccgcacggcgcagccccgccagggcccaaaactccaaacctgacaagctgactccgaggacagccggcctctttggatcctctagccggccgtgctagcagtagcagcagcgacgacgttaaattcatcgttgtcgtctcacgctcacacatgcaataaagtctccctggtcacgcactcacgctcttggcttttgttcttgagttcacgcggccatgcacgcatccttgcctccttggtctttgcactcatggtggagagcttcatagagcaccaggacacttgcaacgccgggcgggcacgggcggacccctcgccggcgtgtggcgccgggagcaccggtgtggctgctgctagtgctgggtcgcagccgcaggcgccgccgcccatgtcactgtcgaggaccgcgtcgagcaccagcccgtccagcgacattgtcatcagcccggtggccgcctggcccggttcgtcggcaccgacgattccaagccctgcgaccgccgcgttccaccggttcgaacaagtcccgtcgccgcggacaccgccatcggaccaccatcaccgcggcgggcacaacctcgagctgcagctcatgccgccgtccggcagcggcgtggtgggccgtggcgcgccgggggtggcggagtacggcgtcgcgccacgcactccggccgctcctccacagagccaccccgccaccatgcagctgcagctgtccatcggcgtctgcggcggcggggggttcggggacgaggcgatgctggcagcggcgagggagaaagaggaggtggaggcgcgggagcagctgcggcaagctgtggcggagaaggcggcggcgaacgaggcccgcgcgcaggcgaggcggcacgcggagctggccgagcaggagctggcgagcgccaagcggatgcggcggcaggcgcaggtggagctgagccgagcccacgcgctccgggagcacgccgtgcgccaggtgaacgcgacgcttctccagatcacctgcctcggctgccgccacaagttccgcgcgcgtccgcagctcctggatgcggccctgggcgcccccgaggtgacctgcagctacatgtcctccgtcgtgacagaaggcggcgacgccgaggccgacgatgagccgcccctcgacggcagggacggcatgctgcagcggcgccgacacgccatggcaatggacgtcatcctctagctaacctgaaatgagatgatggtcttcgtttcaaatagtttcttgtgtttttgccggcaagacgccggggttgcatttgcattggcccctgctgtatgaggtgtatcagatgccgatgcctgatggtgcgtagacagtggaagaccccgctagctcgatcgggccagtgctgcctagacttcgagtcctgtgatgagaaggaaggaccggagaggtagccattaggcaagtccaaggagagacgaagacgagggctagctgctactagcttactgtgacgtacgtgcatggaatctttcggtgtttgcttcctattggatcttgttggaaagaaacattcattatattgctcatggaaagcaagttgatgatgccctttgtaaaggtcttcagtagccaacagggaaatcaagaatatttgtcacacctaaattcagcg

SEQ ID NO: 38104 - DNA, 3449 bp, Zea Mays
ccttgtattctcaaggaaacctttatccatggctggaggtatcatactactcctgcttgtcatccccctcgtcgtgagaattgaagggagtgtcatgggggagagatccaactcgttctcacaggactccaataattctagccctgctgaaaacaaactcgaaccaggtgaaaagtccttcgcatcggaggcatactgtgagaggtgtccagacctagaataggtgtgaagtgtgtgtgcgtgctgggcgcgatgggtggagtgagccactgtaaccaggatacatatacactgtcttgtggagggggaaaaggggatgcataatgagaattatcaacagaacttctctcattccttttctctgttcctgcttcctcttctccgatctctcatcttgtcctctacttccctattctgattaggtctgctgctctggttggtgatcctaaaggggttgctaacaattggtatcagagggaaatcgttcctcgaccggaagcatccatggcgtctccttcactggtcgatactcagctcatcgaagcgttggagcaccaaacccgggttatcctcgccgaactcgacaagcggttcacggcgctcgactccaagtgggaagcgcgagtccagacgcaccaagtagcggtgggcgccgtcgtggagtggcggccccaggtggatgcctccatcgaacatcttcaacaacaccaagcagatcagccgcacctccgctccgtcgggaacatgccccacgagggcggcctcctctcttccgccatcaccaagcagatcgaacccgtctgccttaaggagcttgcattgctgggggacgccgactcgcgggtccaggccaccgaaaccgacgtcgtgttcccttccagcaaaatgctcagcctcgtcggcgcggtcgacaaggaggaacgccactcaacccaggaagtcccgagacgcgcacctcgtcgcaacgcgctacgaggggggaccaaacccaccccttcgccgtcttcgacgaccacagcgccgctggagcatcctgcactgggttcgcgcgagacgtggtcccgcgcctcctccacgctttgctcgtccgcgtcatgttcgtcgagcaggtggagggcatgcgcgacccggaggacgagggcttggcgcccaacgagaggaacctgcaacgcgtctgggcgcgcgacacactctactcaggcaccgccttcacccgcagcctcgggaacctcaccgcctccgcggcgctgcccacgccgctctacaggtatgtggcgccctgctacgactgttggggtagggtcaaccccgacgtccacgctgctccacacgcaagcatcaactgctccatgggtagaggaacaagtcagtggtagctcgcccctcgggtgttcgaccaaatgtctttgccaggctatgcaaaacattgtcaagccaaatccgccaaggatgaacgagatcacgggtgctgctcgtttgaaacctcaaggctcatttcactatggatctatcaatgggagccagatttacaagatgaggaatgaaccacctgttatcatcaatggaaagaaacgggttatagtgagtgccttggtgtggagaattaaatcactcgatataatgaccagttacattcttccaaagcccccttggttggcatttgatccaggcaaattgtttagagttgattacagctccagttccacaagtgcttccttaccgtatgcattgcaattttcacttgatgtccagacgatggaaacagttgatatagtcgttcctaatcagagatatactactggagaacaagtgtctgtggcagtttctgttgcagctactcaagggctggcatcagtgaatactatgaaattccagggcataatccagggtgtcaaggtagctattttggtggattccggcagctcccattcctttgtgagtgcagatctggcctcacaactatccagcgtggtgggcatggtgacactagtgtcagtgcaggtagcggatggcggtctcctgcagtgttattgccagttgttaggtgctaaatggatggtgcagcagtgtgagttctctaccaatttcagagtacttgacatttcagcatacaatgtcattgtggacatggattggttgtccagctacagttcgatgaaggtccattgggcccagtggtgggtgataattccttatcaaggctcttttgtattgcttcatggttgttcagctgttttgccaccaaggttttggattatagatgatggttggcaagagacacttgactattatccagagacgttgcatcagatgcttgttgcgaatgctgatgggagtttcaagctaccagggaattctgtgaaagactttcttgactctaaaactgccttgaagatacatgttttgataacaaattttcagaacaagcttcttgaagtaatcaatgcaactgaacttcctgaatttttgggggggccatgcacttatactatgggaggatgcctgatgtctaacaaaggtccatggaacgatccagatactatgaagctttcacataacaaggaagcaaagtttacaagacataatagaggtctgctgctctggttggtgatcctaaaggggttgctaacacatacgcggtgaactggaacgaaccaccagacctgcaaatgcaagactccttcgagcgacctgagctatatcggaagcaatcagtgcaaggtgaaaagtccttcgcatcggaggcatatccggtgaaatggagcatatcaccatcactaggtcagcaatcgcaagagtctttcgagccagaagcatatccgatgaaatggaaagaaccaccaccatcaagccaacaatcgcaagactccttcgagccagaggcatatcgggtgaaatggaacaaatcaccaccaccacaccaacaatcgcaagactccttggagccggaggcatatcgggtgaaatggaacaaatcaccaccaccactccagcaatcccaagactccttcgagccagaggcatatcgggtgaaatggaacaaatcaccaccacctcaccaacaattgcaagactccttggagccggaggcatatcgggtgaaatggaacaaatcaccaccaccactccagcaatcccaaggctccttcgagtcagaggcatatcgggtgaaatggaacaaatcaccaccaccacaccaacaatcgcaagactccttcgagccagaggcatatcgggtgaaatggaacaaatcaccaccaccactccagcaatcccaagactccttcgagccagaggcatatcgggtgaaatggaacaaatcaccaccaccacaccaacaatcgcaagactccttcgagccggaggcatatcgggtgaaatggaacaaatcaccaccaccactccagcaatcgcaagactccttcgagccggaggcatatcgggtgaaa

SEQ ID NO: 38105 - DNA, 879 bp, Zea Mays
acccatccctcgtacgaggtcggcccctttctccttctgccgcccgcaccaaccctccgccaacactgccctgcttgcaccaaccctccgccctaggtccccgcccagcctgcgccaaccctgcgccctcgagctccctgcctcgcccagctcgtggaggtgagcagatgcttcaacatttaatccaccctccttcaactccctggccacggcgatggcggcgcgccggtgcatggccggctcgaggcgggattggatgaattgaggaccggataggtacacgatggagtgggatgcacggacgttgaggtgagatggccaaagcagaaggcgtcgtcacacccgcagtcggagcacaacagacaatgggagtggtggcacgccggagattggagacactcatcgtccatggaatggggcacacagtagcggacgagggagggccatagtagaaggtgtctgcgctgaagatctttggctcccatctcgccggctgcagcgaggcgccatgctttgagggttgctccgccatgcagatgctctccgacatccacttccagcgcgcctgggtccaggtcccaaattaatctcatctttctcctttctcccccacctgcattttgtccatttttggtttgtcgtagcctgaggatttgcagggtgtgatcctgcctgtcagcaaactacaacaaagctggcgaacgacccttgaggaaatgataggtcctgtgtcgtcgaccttttcgtcgtgccaaaataagcagagagacgattctggcggccagggatgtatgtaatgattatttgtgtatacattgcagcagagttcagagacacttatctagctatcaaggcatagaacagggcagggaaaatcgg

SEQ ID NO: 38106 - DNA, 2173 bp, Zea Mays
agcagcacggacggggcatgggattgacccacacacccgccctccgccccgcaagccaaatacgccgtggcacgcgtcgccatgccgccccagttccccaccgcccgcctcctcctccctagtcacaggctgctcccgctcctctcccctctcccctccgcgtccctgtcccctgctcctcgcaccctccgcctcccgccgccgcagcttcttcaccgagtcgcccgccgccgcccgctgctgcgcggcatggcctccgccgccgcccccgggtcacacgccgccgcggaagcgccccccgtcgacgtggggggagggggcgctggcgccccgcggcggctcgtcctggaggagctaccctgggaccattccttcgtccgcgagctgcctggcgacccgcgatcggacactatcccgcgggaggtcctgcacgcctgttactccagggtgtctccctctgccaaagtggacaaccccaagctggttgcgtggtctgattccgtggccgatctactcgatctggatcacaaagagtttgaaagacctgatttccctcagtttttctcaggagcaactccactagtggggagtttgccctacgcacagtgctatggaggacatcagtttggtgtatgggctggtcagttgggggatggaagagcgatagctcttggagaggttgtcaactctcgagcagcatccgtgaattcttatgcagcgaagccatgcacggcctaggcattcctacaactcgtgctctttgtctagttgaaactggaaaatcagttgtccgagatatgttctatgatggcaatgcaaaggaagaacctggtgcaatagtttgtcgtgtagcaccgtcttttttacgttttggttcgtatcagatacacgcttcaaggggcaaagaggacattgagattgttcgtcgtttggcagactacacgatacatcatcactttccacatcttgaaaatatgaaaaagagtgaaggtttgtcattcgagacagctataggagattccccaacaatagatctcacatcaaacaaatatgcagcttgggcagttgaggtggcggagaggactgcttacttgatagctagatggcaaggtgttggcttcacccatggtgtacttaacactgacaacatgagtgtgctgggcctaactattgattatggaccatttggatttctcgatgcatttgatcctagctatactccaaatactactgatcttcctgggaagaggtactgttttgcaaatcaacctgatgttggcttgtggaatattgctcagttcactggaccactgtcctctgctgaacttatcagccaagatgaggcaaattatgtgatggagaggtatgggacaaagttcatggatgagtaccaatctatcatgaccaaaaaactgggcttaactaagtataataagcagctaattagtaagctgcttagcaacatggcagttgacaaggttgactataccaacttcttccgtcttctttcgaatgtcaatgcggatcctggtattccggagaatgagctgcttgtcccactgaaggctgctctcctagatattgggaaagaaaggaaggaagcatggattagttgggtacagacttatattgaagagctggtggagagcggcgttcctgatgaagaaaggaaagccgcgatgaactctgttaatccaaagtatattctccgcaactatctctgccagtctgctatcgacgtagctgagcaaggcgattacgaggaggttcgccgggtgcttagggtaatgcataatccgtatgacgagcagccgggaatggagaaatatgcacggttgccaccagcttgggcatacagacctggagtgtgcatgctgtcctgctcctcgtgaaccccatgatgcaagacgtggagtcgtcgtggacattacaaaaatgcttgggtgcttatagtcttcctcctgtataggggtccatctttgtgctgtaatgtgtcaagcatcgcatgctattttttttccggtgatgcaagtgtgtaagaaccatgtcgttgcaggaatagtgaagcagtgggacctgttattgtgactacctagtatcccgtacggagatggaaatttggcggtttactagtctatatagtgaagctctggcacttgcagactggtcaact

SEQ ID NO: 38107 - DNA, 353 bp, Zea Mays
cctgaagactcgtgacattttattttcttagtcttcggctcttctctgcaacaaaggaaaaagaacaagtggttcaggagaagccacaaagcgaggagtttgatctgatctaggtggcatttcccagttgacattagcgccaaggatgatccttagttcattttatatttatcttttattttgtaataagacttccgctatgtaataaatactctgatgtttttaagacattatctctatacactctgttattatatatgttgtcttcttggcgcatgtatgaaatgcacctggctttgttccttaaagcccgggtgttacactttgactatttacaaaagattttgaaagga

SEQ ID NO: 38108 - DNA, 2599 bp, Zea Mays
ctacggcccactgggcatgatcgtcccaacagaacgacggtggaaccctggtctcctccctcttcacccgcacctgcactgcagcacacgcgccgccgaagcgctctgcccacctcgctcccctccagtggccgccggcgcggctcagcggtccatcctcctgacgccacctgcaacggcgccaggcggtgatccattccaactcgcggtcatctcaagtgggtgcggcaaccatgcccaaggttaagaatccccacgttttcatggacatatcaatcagtggaggcagcgccgagaggatcacatttgagctactcgcaaatgtagttccaaagacagcggagaacttcagagcactctgtactggtgaaagtggacttggggcatctacacagaaaccactctattataagggaacacatattcatcgcatagttaaagggtttgttgttcagggtggtgatttttcaagaggagatggaaaaggtggagagagcatttatggtggaaaatttccagatgaaaacttcagattactgcacaatcagcctggtgttctgtccatggcaaattccggcccagacaccaatgggtcacagttttttattacattcaaggctctacctcatcttgatggcaaccttaaatgaatttcaagctataatatttgtagcaaacatgtggtctttgggaaggtggtcagtggaatagctttgcttaaaaagcttgaagcagttggtagtgaaactggaaatccttcttatcaagtgaaaattgtagactgtggtgaagtttccaacacaaattctccggatctgctaaagggagagaaagaaaaaaaactaagaacggcagatggtaactccactgctgaagggagagccaaattaaaaaaaacatccggtgatcataagcaaaggaagaagagaaaacactattcgtctgattcatatagctcagatacttcagactcattgtcctattcttcagatagtggctctgattcagaatcagattcatcaatggatactagctcatccagtgatcataggcgtaagagaagaaaaggatctaagaaggataagcgcaagcccacaaagagaaagggtaaacatacaaggagtaagagaaagagtagaggatccaaaaggcgatctagacggagccatgggagttcaagtgatgattcagtaagctcaaagacagataacagcagttctgacagtgaaaagggtggccatcataccaagcgttccttgccgaaagataaagagagtaccaaaatgacaatttcagaacaaggaagaacttttcaagaagcggacaaagacgaacaaacagttactaccatcaatcgatcacaatcacatgatggaagtaaaccctcaaacaaagatggcaacagggctgatgaaagatctggaaattacaattcagaagataggaatggtccaggtggaagctccaggaacaatcccattcaggttgatgtaaatttaacgaaaccagtaaatgtagatggcaacactggtggtgataatgcagaggctggcatgtctagaactggtgaaggaaggcaccttccaagcaatgattctgtgtccaccaatggtaaagatttaggtgtgggttctgcagacaatgggcaacctcaacgaatcaggaaaggacgtggttttactcagaagtatgggtatgcacgccgatacaggacgccatctcccgagcgtccccctgttcgaccccgctacgatggagggagagatgatagatggaacaatttcaataggtatgaaagaaatggtccttacagtagacgctcgccagtaaggagataccatggctcgccaagagccaatagcccatccaggtacccaagaagagaacgaatgaggagtaggtcacgcagcccagtgaggcgccatgaccgtggagggtatcaccgccccagcccaagacgtagccgcagccctgcagaaccgagacagaatgtgaatgataggcctcgatcaggtcatggcggaggcgatcctgaccacagccctcctgccaacaggtccagatcgaagagccgggaccccttgggacccagatctcctgatgctgccccagccaagagggagagctccagatacaaccgcaggcgcagcagcagctcaaggtccagcagccctgatggaaacaaaggcctggtttcgtactgagaagtaacggcacaacagtttgcaggctccatggaccatgtttcttgctagtttagcatcatgtactcttttgtaatggattctgaacttgaactgctttcgatgcaggtgtagatttatatgttctgttagatttgaatgtttcttatgccagatatttatagaactactgagtagagcaggggaaaggctcgagcctcgtgaactggcttgagcttgctaaggcttggagaggctcgcgagtttgtaagcctgaatcgagactacttttatgactcgctcaaacgccgagccctgagcgaacttgagtcgactcgggagtctgcctaataatattgtgctacgttgttatattattatgtttttaatttattttcttattttttatggattca

SEQ ID NO: 38109 - DNA, 2300 bp, Zea Mays
aacaaaaccgcctagattggattcgtccccaattctctgcctccgccgccaggacgacggcaaatccgcccacgcaaaatatcagcccaagtgcccatcgcccaagcttcctagctcacccgccgccacccactagccaaattccccatccctctcctgccgccacccatcagccacatctctccctcctactccctctccggcagccatcatcagacaagatccctcccccaccatcgagccatgtcgagtcgagtgcatcttctgcaagcacggccatcttacgaaaccctagctggctcgaaggaccactactgtccggcgccctgaacaacttggcatgatgccgacgaagggtggagcaaacaaatcacaatgacatcgggtagtagatccaccattgcatccctatgaagaggagcgccttagacaatgtatgaggaacaattcgaggttgcaacaacttggaattcctgctttagtcagcatgtgtgggaacataaattccatctctaggaacaaaaagccaaataacagggataatgaagattctgaatctgagtatgatccttcacatgacgattctattgaaggggatttgtttgaccatgatgatcataataagaagggctcaaaggacactaacagaagaactattcacatggctcctggtggaatcaagcctcgaactaagagagtttatgcagagcaacatactactagaaatacaagctaatggccctacccaggttgacaacacccacatggccaatcgagaagatggctttgaccaatttgatgacaacatgaccaaccaaggggaaggcattacccagcctggtggaaaaggagtaaatcagcatagagaaaggggacttaatatgggacttggtctccaaaggatgaaccgagctcggcgtggcaaactgccaattgtcattactgaaggaaggataaggcctgtggcaccaattgttgctgcaaagtttgcaactgagtgcaacattgcagttcggaatcatgtgcttgtgcttaagtcatggaaggaatacgagaagcatcctgggctctttaaattgtttacagcaaaacttagtgcaaagtttgatatcaatacagaagatgcgctagttaaaaatgcttgtttccaaatgatgaggaatgcactgcgccaacaacgatataagctgaagaaacaatattttgacccttttccgctacatctagtgaggaaaacatctcctatcaaatcgacaagtgatgaacaatggaatgaccttgtggaacattggaaaggtccaaaaaatatggcgacatgtgaacataacaaaggcaaccgaggcaaagttaagttccatcaaacaactggatctcgtagctatatggttcatgtagaaaatttgggggacaagtacatggatcaagaacctgatgcattggatctgttcaaggagtgccactacagtaagaaaaagcaaggctacacttccactgtacaactggctattactcaaatggaagacaagcgatctacaccaggagaaggtgaacaaccaatgtctacgactcaggttgtagctgatgtgcttgctgagaacacaaagaagaatcggtttcttcaaaatgtgggaatccaaaatgcacgacctagatctagtgtacaaaatattgaagcacaacttgaagtagagaggaaggcaaatgcagagcttcaatcacttgtcagcatccaacgtgagcgcatggatgtattattaaagcaagtgcatgaagcagaactggtaaggattagagagcaagaagagatgaagaagaagcaagatgccatggatgctcaacttgagcttatgctaagtcagattcaaccaagttaaagctaactagtatggggtgttaggctttgttggtacttctcttttgctgatgctattgcattctattgatggataaatacgtttcaatccattttttgtctattgtgctgctagagtagctttagcggcatgtgtggtgtgttggagtggcttacgtgtcagtggttggatacttgctgtaatgacatgctattggatacttgcatgtaatgacatgctggagtgtggtcagtattttttgtgatgagatgctggattaaaatctgagttgtgatgtaatagaattcaacattttgtcattatgttctggattataattaatatatatttaaattattgtgtttgcaaaagctgcgaagctgtccatgggctagaatgttaattgtaatgggctgaaacaaaatgggcaaaaattgcaataaaaag

SEQ ID NO: 38110 - DNA, 3495 bp, Zea Mays
ccctacctaccacaggcacaggcacagcccacccacgggagggaagaaaggagagagaaagagaggagaggcaacacagaaacaagagaagaagaagaagaaggggagatcgagatcgatcacgcaccgggggagcagatccttcgcctcgccatcagggataaggattcatgcgaaatgccacctgaacttggaatgtcttctagaactgttgctggtgctgttgtaaataggaggcctcgccgcctgtttgggagatcatcagagaggaagaacccactcaaccttcagtttgagcgtcaagtagctcgcctcgaggcaaggcagcagcaacagaggtgtgttattgtgacagttattcccttcaatttctgttacgacttcaaatcactatcgctcaccgagagtgcaaatgtatctcacagaagatggcaggataattcatcaaggctactggaagataagcccacaacatccaatagcatgtctgattcagatttcttagtcaacagctttaccaagccgagtgataatgcaaggccatcaagaaggaagagcaaaaagaaaagcaagaaacacaggcaacgctgtaggaagccgactgatggatctgaagctaaattcagagagggcaatggtgctgcctctgcagctgatgttggtgattgtgaagattcgacactttcgcctaagcatgttggtgacatacgctttgaggaaacttctcccagttcttctgtcaaggaagcttctgaagaggctcctgagagtgatgatgatgagtaccattgctgctcaggtggttcagtttcgagtgcgtcctactgtgatgagatggaactgtccaaatcaacaacttcgtgccctgcattgtgtggacaatgtcctagcagtaacttacagtatttggacaacactcaaaattctgcaccaacaggtccatctcaagaaacttgctatgctggcagtaaagcgaactgtaaccatgataccaagtccctgtttatattcagaaatgaacgtggatctgatccttgtgaggcaacagagttttgcagctctagcagtggatttgatgagaactggatagagaagtttgactatgatagtggcatttgttcgccaaaaagtgttggtacatatggtggagaccaggctgcccacttgtgcagtgacacaactggtgacaatgatttctgtcttgtaatatctagaaagagggccagaaaggagaagaaaatgtcattgtggaagagttatggagcgcatgcatccacacctgcacttgatcgaaataaaaaatatgttggccattcttcaatgcagatgaccaacgaattcaacagtaacgactggtcccatagacaaaatcatgttagcaggatacaccctcagcatggaaatgcactgaaaagctccaccaaaaatttcatgcagaggccaagcattggttgcagggagactcaatatgggtttccagctaaagaatccaagttaggagcaagtctcaatcattctacaggtccaagagaaaaaacttgtggaaaattaactggcggttttgataagacagcacaacagctttatttggacagagacctatccaatgctcttaacagcagtgaatcaatacgttgtgagacgagatcaatttcctcttctgaaccgacaactccaaagtctttaaaaggcaattatacttcagagtctggtgaatcaacagatattacaataggagctcttcccatgcagaaaagaagattgcaggatttagttcgaactgatgatgccagtgaaactatttctgggcgatcatcaccttgttctgagtcatcgacaactgaattaattgctggacatagtacagattcatctattgaagggaaccatggctgtcaagggctctgtaactctagaacacatctagcccagatgctcagggttgtaaacgatgcctgtaaagttcaggttggtgcagatgttctccttgctgctggttatccaatttctgatcttgagaaatttatatgctctgcaactcccgttattggtcgtgcaccttgcatgataagcaacacttgttcattggaccaagtagttagtgactcagtttgtcagcatgacatctctaatgtttccttgaggagaatatgggagtggtatgaagagccagggtgctatggattggaagtaaaagctcttagcaatctcagctctaaaacatccagcagcagcagttcagagttctttgcatactttgtgccttatctatctgctattcagttgtttgggttgtctaggaataacatgcatcacagttttggtgtgcaagggagggaattactgatatcatcaaatactgcaagctctatgagctctcatcctgtgcatgcaaaagcgcatacactgcttgaggaaagtaatgcatgcttgccagagtcatctttagttgtagaagatcctggagaactcatatttgagtactttgaaacagagcaaccttctctccggcctccattatttgaaaagatcaaggagcttgttagcagtgcaaatgtttctgaccaccgggtttttggggacactgaaaaattgcaaaatgcgaaattgtgtgagcttcatccagcttcctggttctgtgttgcctggtatcctgtttatcgtgtgcctcgtgggaatttccgtgcggcatttcttacttatcattcactggggaagttggttcataaaaaatgctccatggatacgaatgacgggcatacacaagtagtttcaccagttgttggtctccagagttacaacgacaagggagagcagtggtttcagctgagatgcccagatttgaagcaattgccaatagaagattctttaaaaaccagtcctgctgaagttcataaagagaggctgaggacgctgaagatgggtgcattggccatggcaagagctgttgtcccaaagggaagtggggagtcggtgaaccaccatcctgattacgagttcttcctgtctcgttgcgcctaggctaagcggttgtgatatgaaggaagaggggcttttctgcttctagctcctgaatgtagtagtgaccatgaaaatgaaaaaaaaacccagagtagtgactaaccagagaccggctatagatacagtttatcttagagagaggagagcctggggtgatgcatatcactgactgtataggagatagactcgaatattagatactctaacctgattccggattaccaatgcaaaccaagttggtgagctgttgaagtatggcagtacccgcgggatgggtgctttattggggctgggggcaaagatgagaagataccacagatgagatgacgctgcaggtgttcatcttttgtacaaagaccacaccagaggagcagcaagaaatttgctaccagcaagaaatttgttaacacatttgcgagcaaacgcaagtgaaagcgtgcgagtaattagaggcgtgcaacctcattgcttctc

SEQ ID NO: 38111 - DNA, 445 bp, Zea Mays
acaacatagatacgcatggggatttcttgaggggactcacaccgtgaaggatggcgccgagaccccgggtcacgcagcatggcggcaacgcggcggatccgttgtcccgatgagaaattccactgcttcgatcagtcgaccgcgcccgcgaatgccacaccaacatccacaagccctggcggtcccccctgggcctcgcccagaggtcttggcgacggcgaggcacgagttcggtcgcgggcggcttccttttcctccaccgtcgaacgcacacgagcttccttcatcacacaaacaggcaatggcgcccgcgattctttcctatctccctgctcaccctctctgtccttccgccgctcgagtgattactaacaaccacgactgaaacggatgggggctagagttcgctggtataggaaggggaagaggaggcctggaacaaaat

SEQ ID NO: 38112 - DNA, 1364 bp, Zea Mays
cctgagtataggctgagttccctttccctccgaggctccgacgctgctctggccccgtctctctcgtcttcctggctctccccgcgcaccaaaccctccccaaaacccaaacgcttctcgccctcccgtcctgttctcgaccatgtcggtgtccgacggggacgacgacgaggccttcctcatcgccctcgacgccgcggaggccgccgcgctggactcctccaagcgccgccgcctctccaccacctcgtcctcaccgaccccctcaacctcacccgccgccaccgaggggccctacctggccgcgctcaagggaagccacagctccacctggaagcagcagctgcaagaccttggctatgcccacaagcggcccgacggctctaaatccttagccccgggtacgggcgcgagcggatcgtgcttcaagtgcggggaccccgggcactgggcacgggagtgccctcaatccgtgccgaacacggggggaggaggtcagatcggcggtggcggtggcggtggcggcggtggcggcggcggatatgtaaatgcgggcgtagaggtggaggacaaggcgtgcccctgcggtgtcgggagctgcctcgtgctcacgtccaacacgccgaagaaccccggtcgcaagttctacaagtgccccatgcgggatgggggttgcaacttctttgagtggtgcgatgctccatctcccgcccctgccaatgcacgaaataacatggttgtacactcagagacatcagcaacagatatgctttgcccatgcagtgctggaacttgcttaattctcaccacaaagacagggaaaaatgttgggaggcaattcttttgctgcccattaaatcagggtggtggtggtggctcttgtggctttttcaagtggtgtgacgagctacagcctagggttggtgcaccactgcaagcttcagcgcaataccaagcggattccatgccaagcatccaaaaccccagccagaggagctcgtcttcctgcttcaagtgcgggcaggagaaccactgggctcgagactgtccgaatcaaccgtcggatccttatcctgacaagggtgggagaccagtagctccagcgggctcacctggtgcgtgctacaactgtggtcggtccggccactggtcccgcgactgcccaacctcgaatagtggtggtggtggtaccggcaccagccgtgccaggtcgtcctcagccttgagctcgtggaatagtcagagatactgataggagggtcctgtgaactcaattgaactgacatggacatgctgtacgaaacttggacaattgcccccctccacgtgttgcttagggatacgaatactacgcacgaaggctg

SEQ ID NO: 38113 - DNA, 1490 bp, Zea Mays
ccagaggtttggatcggccgtcgacgtcggggcttcgcggcgactgtctctcggtggttgagggagttatcggcgacagggtgcgcgcgtcttctgggagcgcgttgcggccggagcaagctcgctagtaggggaatcagatatgccacaggctgcgcgatggtgttgtgggtcttcggctacggctccctcatctggaacctcggcttcgacttcgacgacaaaatcctcggcttcatcaagggctacaaccgcacctttaatctcgcttgtattgaccacagaggcacaacagagcatccggcgaggacctgcacgcttgaaaccgacggcgaggcgacgacgaggccatatgccatggtacaagcctacaaggagaaagtttatccaaaaaacaagttgaactgctgcagcatgagccagaagttggttatgaactaccatataaggttcccttccagagtctcccatgctatatcgtgaattttcccaagcaaagcacctgccaggcgccaatatgccaccggggtagccattaaaatacttaaaatcaactccaaggctcatcgaacgttatccagtgcttcaccgtgtttctgaactccctaaagcagatgttgtcatgttggtcagtttggtgttggtttaatttctacgggtgtcgtatatcagaggtaaacaatattagatgtttatttatttgtttggaggtatcagttttctatgaatgtacaactgtttgctttgtgctttatttagacttctaatttatatcgatatttatgacatgtgtttacctgttttgtaagtcaatcaaaaagtttgactagcaactaatggtgcctatacatgtatttatggagcttcttctggtcatatgtgtagtggatctctcctcctggtaactagctagatcatctattgtttttattttaaatttgaaaatttacttctgatttgcaaaacaaatggatatagttgttcccttcaatcatgtccaaggtcaagaaccattcaggtcataaacccctacgacaggggccacgagggctcatcttcgccactgcccctactcccaccttctgcatgtcctgctcggtgctgttccattccctagcgatgttctccggctaaagacgcttggagtttgtggtgtggtgacacttaatgaatcatacgagaggcttgttcccacatccctatacgaggataaaagaagtaggcgcaatgaggagtcgtgttcattcacaagctctaacagagaaagttggggcagatgttcatctttaggtgcagccagtgatgaattattctcaggcaataataatgataagcagatatgagcccttgggcctccagttcgggcaacaagcatatggcaaagagagtgagggggcatgatattgttttccaattccaagatctaaggagcaaagactattaattatcataaacaagatttctaattggtgaaagctttttatatatag

SEQ ID NO: 38114 - DNA, 2108 bp, Zea Mays
tgacacgctagatctggggggagagagaagagaaccgacgtgtagggggaccgcatgcaaggggagggggagaggcagcggtaaccgctgcgcacagccttaccccatgttttcccgcttattttgctgcccgccgatgctagagctgtgtcttgttccgatcccgaatcgtttgtgacgaagagttcttcgcgctgacgtcaatatatagagagagctaaatacagtttccagctacaggaacacttggttgcagcgccatcaaacaattctaacagcgactcaaacaacaacgccagcagcatcaacaatatgtccaaaattcagtaccaccacatggtttctcatctgacggtgagctgaacctgatcgcatctccagaccagtttattcagcagatgaacatgaacctcgacgaaggccctgttccaatgtcgcgagataaactttagcagctattttttagctacttttagccatttataggccccatttcaatctcacgggataaagtttagcaggaagctaaagtttagctcatgagattgaaacggggccgaactcacgcactcgatctcgaaccaaccagaccacaccagcgtatcaccatcagagcctgaggtccaagtcgatcttactcggctgaatcggctcacacgcttgctcatactccgagtgcggcgctctcagcctgaagctcccaggccaggccgagctcggcgcctcctcgcacgggaccgttgcccaggccgccgccgccacgccgccctcgaggaacctcgccgccgtcctgaccgccggcgccggcgccgggttggctcggagggagcgcatgagggcggcgtgcgcgtgcagcggcaggccgcccacgaccacccgctgcgcgtggtacgaggatcgcttggcggcgctgcgctcccgcttgtgcgcgttctggtgcccgcccagcgcctgcgagctgaagaacttgcgcaggcagaagttgcaggagaacaccttgtgcgggggcggcttggcggcggacccggacccggacccggactcggagtccgcggagcagctcgcggcgtccggggacggagacggcgacggcgattcgctcgcgcccagcgtcaggttcagccacgccgcgccgtcgccgtgctgctccctggttgcaggcttgcagcccctggatggctggatggtgcatcagaagcagcttgcagtttgttgctttataaaggaggacgagatgcgctgtggccacatgctgttctttctgctaacttccgcatcaggtggtctttctttctttctttcatggcgagatgggacgggagccgagttcttgctcgcctttgcttgtgcaagccgtgacggcgatgacgtcggaacccgaatgtgctgctttggggctggtgggatggatagggataccgagtcaacttgatcaagatagaaaaggagagacgcctaggggttcctcctccttccaggctcccacgtatactttacaatatctgcagacatgtgtcattttcggtcagatatgcagatctaggtgcatattttcaagcacaaattcagttgaacacatattgacactcaaaagtgttgttgcctagaactttagcttgcactgttggtaaagtaacgaggaggagtatgttggggccttcgtctttcgaaggtgctcaaaaacacacttaattattggttgtcagcatgttcacaagtgttgtaggaacttcggtattgaataccttcggaataggatgaagataaagacgaagttgttaagctttgtcacaacaacacatagagacgaaggagaacattgccgggagaaggcgtccacggttccgtgtccaagctgttagaggcagaagtcaatattgccctcgcatcgttttgtaaattatatgtacaagtcttgtgggcatatttgttattccatacaaagttgtacgatcccctataaataggtgaacattgacctgcataaagtaccttttggagggctaaagagtgattcgtgtagtcccttcctaatgcaccttcgctctaattcattctattgagccgaaggtacgattgtaaatttatgatacaaaagaggagaaatg

SEQ ID NO: 38115 - DNA, 3516 bp, Zea Mays
aaaaatatcccacccaaacaactccaccctaccgcaccccaaattcgcaatccctctccacctctcctcccaccgcagcagcaggcaagcgcgaggcggaggcggagagatggagtcggaccagggcaagctcttcatcggcggcatctcctgggaaacaacggaggagaagctgagcgagcacttctccgcctacggagaggttacgcaggccgccgtcatgcgcgacaagacgacgggccgcccccgaggcttcgggtttgtcgtcttcgccgaccccgccgtcgtcgaccgagcgctgcaggacccccacaccctcgacggccgcacggtcgatgtgaagcgggcactctcgcgggaggagcagcaggcctccaaggccgcaaaccctagcggtgggaggaacactggcggaggaaatggcggcggcgatgcaaatggtgctcggacgaagaaaatattcgtgggcgggctgccctctactctgactgaggatgggtttcggcagtatttccagaccttcggcatcgtcactgatgttgttgtcatgtatgaccagaacacgcagcgcccccgtggcttcggattcatcacctttgactcggaggacgcggttgaccacgtgctgcagaagaccttccatgatcttggtgggaagctggttgaggtgaagcgtgcattgccccgtgaggcgaaccctggtggctctggtagtgggcgttctggggtgagtgggggttaccagagcaacaatggccataacaccagctctggtagctatgatggtagaagtgatggtggcaggtacgggcaggcacagcagggtagtggtgtctatcctggctatggtgctggggcagctggatatggatatggtgctaaccctgcaattggatatggaaattatggggctggaggatatggaggtgctcctgctgcttatggtggacattatggaaacccaggtgcagctggttctggttaccaaggtggacccccaggctcaaatagaggaccttggggcagtcaagctccatctgcatatggaactggagggtatggtggcagtgctggctatagtgcttggaacaactcttctggtggtggcaatgctcccactagtcaagcccctggcggacctgcgggctatggaagccagggttttgggtatggtggatatggaggtgatccatcgtatggtagtcatgggggatatggagcttatggagcgcgaagtgatggtgctggcaatcctgctactggtggagcatctggatatggtgcagggtatggaagtgggggtgccaactctggctattcaagtgcttggagtgatccttcacaaggtggtggatttggtggttcagtcaatggaggttctgaagggcaatcaaactatggcactggctatggcagtgtgcagcccagggttgctcagtaaagaaggcattttgagtgtctgaaatgaaccagcacatctgggcagtctatgtattgatttgtcattccagttctgatttgttctcagcattctgaagattgcccatttgctggttaaatcagtatttctccgggttggaatgcttgatcctttagtggcttactactagaacttgtagtcaataagtagctataatgtggagtagcagtatcttgcagaatgcttttattaatttctacatttagctttatctatctgtgtgctttgccatgagtggagtttcaggttccttcatctctagttataagctagagtagcttgactgcttatggacaaaattatctagttgtacctctattctacagatcatacattcgtgtttgatggtagtatttatgctggatattgtacctctattctggaatgttctatatttggtggttgtattgacatatggtattatcaacattcatggtttgaaacagatgcaacccctgaaatatgcagtcatagttggcttgatgctgtagctgcttctaacattatgttcaaactgtagtgcaagtgtttatatagctggaatgctacatccttcaagtatgtcatcaagctatgaattccatccatttggccctagaatttgatattttccaagcagcagtaagcttattagcagcaagattgtagcactaagtttctgaggttgaatgggatgacattccttttcagagatgatacccaagcaaggttatgaaatcaggcatctgaaaaaaaatgtggcagtgattttacatgacgagctggtaaaaagttgcaatattggggtgcagacagaatgcaagataccagcttgagcgtttcattgtctgaagggtcttgtgctgtgctacaagatagtgtggcctctggcgttggaagcgaaggggaccggggcatcttgtggctggtgtgtatcatcttcctaccatcctaggacatctaattagtttgattagtttcttccccgttctagtggactcggttgctgcttttggctttcaccgaatcctctccaaaggtggcgctggtgctactgttccttatggtgatgattttacttctgaccatgattgttacagcggtaaggcggtcttaggatcttttaacctttaagcatggagacgactttatatacatgtaagtaaggtgaataataacaaaaaaaaaatgcatagctaagtagatagaccatatatatatcatagaacatacaagccttaatgaatagcataatttataaaatagtataattgatagttcataaaactaacaaacagtagttcataaaactaacaagtccaaaatatatagttcataattttgtaaactaacaagtccataaaagaacacaaggcaacattaaatttagattctcaacacttagggcctgtttggtttgtggctaaatgtgtcatactttgtctaatgttagttgttcgaattgaataactaatcttaggcagaaaagttaggcaaaatgtggtaactgaggtagtgaaccaaacatgtctttagatagatctgggccgcctctcttggacagctgcccctctagggctgctgccagcctaccacccatgtgccgcgtcgccgcaacaaagtgcacatatcttctccctcctcttttatgcatccatgacagggacctcacgcgctcgtgtcaaagaggaggccatggccttccgcaagaagatggcatgcttgttacggctcaaggtgcagacaaggaggctgtcaacgcacacactcgcgcccaagtaggatggcaacgcgcaatcccccgtcggggaatacctccccgtccccgcgacgattttttttccgtagggattcccacgaatacttgtggggaacatttcttctctatccctgtttttcgcgggataaatctccaaaagtgatccctatctctgtttaaattataattaaaatatgcgttatttattattaatattaaacattatcacttatacacattatcagatgtaagaaatcattatgcacacatcaaaataaatatatttgtacaattagtg

SEQ ID NO: 38116 - DNA, 1917 bp, Zea Mays
cgggaacctcgtcgcgggtctgagctccgcggcgtcctacaaccggtgagcggcgatcgttgccgcgcgcaatgtcacccatcgtaccaccaaaacccctcccgttcctcaccacgctcaccacccgcttctcacttgcctgcttacccacgcggcgtttcacccaaacctgctgttccagtgccgggcaccgcggtcccgcggtcgcggccactcctcgtcccggtggagtttgcagggtccattccccccttaggtctcttctccttgccagcgcggcaacttcggcccgaaccgcggcagcggcggaagacatgtctgacccggagctgaggctggtgctcgagcttgctactgacgaggaactgatggaggtcgaggagatcctctacggcaccagctattttagcccattgctaaaatcaattgcaagaagaccgaactcagatggtgttgttgttttggatgatatcgaggagagagatcatttcatctcaaaattagagtcaaggttcctgtatcttgctgcagatgctcgttttgttatgagggggtggagaccatcgtacagagatgtcttgctcagagtaagaaaaaaaattggtgttcagtgctctagcaaattgtgtactgcagaccttgaggcagaaatatttcttcacctcgtgaatgaatattcaagccaccagaaagaccgactttcatttccatgggataaacgaaaatctccaaacaatatctctagccttggtgcaaacaagtggaagatgcttactgatgtggcttggaggattggaacaaagggaatggaaagtacctttctgaagggtggtagtgcattgactatgaaaacaatatatgaatcgttagccaatagattgactggaaaactgctgaaggaggctgcaaattacaagataaagaaagaacttgttaagcagtaagtggtggcaggagcgatcggagggtttccaggtggcatgacggcaacacatcactagggaggcaacacaggcagggtgggagattggctgctgttaacctggagtctagagctggtttgcttgcagctaggcagggtttggttcgtgctgcatcgagatacgttggactcaggagtgtcgtgacatttcttggaccaatattgtgggggacgctcttggctgatattgtgattcaaatgttgggcaccgattatgctaggatcgtccaggcagtctatgcatttgctcagattcgtttgactcggacaagttacgtggaatctgatggtgaaggaccagagtaagatcgctactggactagcctaactggcattctgatctaaaagcaaccgtattgtacattctagccatgaagatcaccatctgattctgcgggttccagtgcaaatactccacgggacaacgaggttatagcttcagacttcggagtactgtactgctaatgtgagtgcgtataagtgacagacgagcggtgttacaagacgttgggtcgcagagacagtcatagagcacaacacaaccggctactcccctgatcgatgtaaagcttagcaaaaataacctaaccgtgacaatgaaaatatgatacagtaatgtttaacaacgagctccgcaagtgtcatttgggcggcgacctaccctgtgagcgcggaagttgtgactgaatttacttgggcgtcacacttccgcgcggggcccgaagttgtagaccatgcattctgctctgccccggttgaatactgtaaaatattgctccccttatcctaaactattcctcctaacgttcggttaggcaaggcagatctcattgacacagcctgatgccacaatctacagtcatgcttgaacacaacacaacacaacagcacagaatttacgtgtaacaccctgcctgtttcctgtatatgaaaac

SEQ ID NO: 38117 - DNA, 3849 bp, Zea Mays
ccgaggcccgcaagttgccaaggccactcccaggcgcggcggccggcgcaagtctgaacttccccgcccttgaattcgacctccgccacgaccgacggcccgaacggccgaacccgaccgacgccggcgggagaggcagaaacggagagaaagagatgggagtggggggcagcttctgggacctgctgaagccctacgcgcggcacgagggcgcggggtacctacgcgggcgccgcgtcgccgtcgacctctcattctgggtcgtctcccacagcaccgccatcctggcgcgcttgccgcgggcgcggcgcccgcacctccggaccaccttctttcgcaccctctccctcttcgccaagatgggcgtgttccctgtgttcgtggtggacggcgagccgtcaccgctcaagtcgcaggcgagggcggcgcgcttcttccgaggctccgggatggacctggccgcgttcccgagcacagaggcggagtccagtgtgaccgctgcaccggtcaaaaggaggaatgctgcattcacgcgatgcgttgaggagtgcgtggtaagttcccgtgtcttggcaatgctgggatccttcgtacaacttagggtttaattaggatctgcgttgtttaactgttcatcacgagattgaatggttcacaaccactgtattcctcatccaacaccacaatatcttttcgagtaaagtgcacttccgtccttaagcttgtggtgctgtgtgcacgtttcataaacttttaaagtatgtctgttcgggtttatgttaggtccgaaatggatcaaaatagatccgataacgtcttttccttcttcttgctcggtttctcatctgatccgtacatcaaaactacagcaatgaggtgtgtggccgcacgcttgcttgtggcaactggcaaccatgcttgcaaggacatgtgccacccagggccttgtggggagtgtgagctcatgccgaggaagatcagtacatgtcattgcagcaagaccaggctgcaggagaggagaggagggcgagctgcttggacgcaattcatgcaagaagcctgatctgccctctggagactggactggtgttgctagcgcggcgcggttccgagctcagtgatgcctcggctggccgccggtgtggccaggaaggtcggccataatgaccaccacgtgctcttgggaccctgcgtccctgccgatggcctgactacgccgaacgccaagaccttctccacgacagcgacgccacctgcagcttctctggacgagctggcctgctggtcgcggccagtaggagcaggccaggatgaggagcaccaagcttatgagccccagcatcaccgccgccccccaccgaataggtacagcactggcgactaccacggggactgcgccgccgtcccgttcgccctggagccgccatgggcacgtgtttggaatgcaagcaagtgacatgtggggagaaggaagaaaaagacctgctatcggatctgttttaatctgttttggatgtaagagagacccaaacatagattatggatttaatagacatattttaaaagtttatggaccggaatgacacaattccacaggtttaaggaccggaagtgcactttactctatcttttcactagcctcttgctacttaagcatgtgtttggttggacatacaaggagagatggaagggggcggccacattttctatagtgtttggatgagagtcacgcgggggcggggtgaacaccggagcattttttggtggcggcgttgtcccaaaaaatcgagggttggtgtcgtccccacctcatcctattttgacctcaaagcaaacacatcataaatggaactgcttgaatatcttggcatgcctgtactgagggcaaaaggtgaagcagaagccctttgcgcccagctgaataatgaaggtcatgtaggtgcttgcatcactgcagacagtgatgctttcctcttcggggctaagactgtcgtaaaggtcctcagatcaaattgcaaggaaccttttgagtgctaccacatagcagatattgagtctggtcttggactaaagaggaagcaattggtggccatggcgcttcttattggcagtgaccatgatttgcatggggtgcctggttttggcctggagactgcacttcgttttgtgcagctatttgatgaagatgaaattttagataagttgcatgaaattggtaaaggggtgtatccgttcctcaaaggatttgacaatccacatattgatgatctcccatcatcgtccaagaaaagcccaattaaatcgccgcactgctcacattgtggtcacccgggcagcaagaaaaatcatatcaaggatgggtgcaattattgcttggtggattcattagagaactgcgtggaaagaccagctggattcaaatgtgaatgtcctagttgtgacgaggcacgtgatctaaacgaacaaagacggcatgaaaattggcaaatcaaggtctgcaaaagaatagctgctgagacaaattttcctaacgaggagatcattaaattgtatctaagcgataacaatctggttgaaggtaacaaaaagaaaaaagggtgttcccttgcttagttggagtaagcctgatgttgaagctttggttgacttattaagttataagcagaattgggaaccatcttatattcgccaaaggatgcttcctatgttatcaaccatatatttaagagaggtggcatcttcttcgtctacaccattgcctctttgtgatcagtatgagtttgattcaattgagcggactaaaataaggcacggtcacccttattacttggtgaaatggaagagagctacccgtggtatgaattctaatatgcctagcaagaagccagtaacggagggagaaacaagtagcgaggtagtggtgttggatgacgatgacaatgaggatacagtggtttgcgagtctccagagttattagatgaacctgatgttccacaagtgcttatggatgatggctgttgctttctattgactgatgaagacattcaacttgttggtgctgcttttcctaaggaaacagcaaggtttcaggaagaacagaggctgaaagaagcaagatcaagatcgcggaaatccaaaacgagcttagcagacagtgggtgcgagacacctaaaggtccgagacctagtggggtgcagcttagcatcacagagttctaccgctcgaagaaagggcaggacatggaatctgggaagaagaagcaggcgggagaggggcacgctgctgcgagggatggctcgagaaaatcctctgacagggacctcaacaacaagagcctgccgaagtccgttcgccgccgcctcctcttcgattgctgaggactagcctggccttctggtgagcactgtaatcttgctgtgccactgttgtaaatgacctagagaacgccttaacctattagccggtgtaggtatccgcggctcattttgtacagggaacagagcatcatctctgtcaagaggaaaaatggagcaggtcttagttcagaacgattatctgaacctcatctttgtattggttttaagtgcttttcgtggaactcactttcaattctagaggaatgggtcgcgtgccgctgctagagtaatcattctgaactaaaaaaaaagcttttttttggttttatgtctgcttttatgcctggacaatagctgacagacttgatgctgtcatgttacattatgcggtagtactactccagatattagagtgctgaatgtaattatagtttcatggacccgttggctcaaccttgtccttcgctgcggcatcatctggcggccatggc

SEQ ID NO: 38118 - DNA, 3395 bp, Zea Mays
tctaccctgcggccttgcttctgttctctcgcgtcgttctcccgtgctccccgcgtgcgctctatctgtttctggtggcgacgacttggcggtcgccggctcgccgccgccgccgtgcacagtcctttattttggggaccttcaccggcgacgagcacccaccaggttgcttcacaaaacttacaacatccaggatacaactaataaggattccttcatctttatctggattttgaggaggttgctgagagcccatccagcagggtgtctcagacatactaatggacggggcgcccaagatccttgaaaaatcatcacatgaatgcatgtactcttggtacttcacccgggaagaactcgagaaattttcaccatcaaggaaagatggtattactgaaaacaaggagtcagaaatacggcatttatattgttcatttatccgggacgttgggatcaggctgaagctgtacgaaattacttttgaccctcttaagtgaattgactttgttcaaccttattttagggtgttcttagtttatactactttatattgtggctcataacatgattgtttacattgacctaatctctcatgaacataaattattttcttttttcctctaagacaaaagcttcttttattatacggccaatatgtttgattctgctaccagattgtattattttagcaactttgataagattttctatatgtgctaacatattttttttcacagacctcagatgacactagcaacggcaatcatgctttgccatcgcttctatttacaccagtcccttgccaaaaatggatggcaggtgagacttgagagactattttgttgtggcagtgatggttacttgctgatgtctatgaaaagcgacaagggtgcagagtttccttgccaagcatttgttgataatatgttatccatgtccaacttaacattacagattattcttcaaatcatttgaattatctaatcttctaatactattactattttaattttctaattacatgataattcatcttgatgctactctacctcaagatcacttcgtgattgggcatttcaaaggaatctaaaaaactcagtcagggagggaaataccgtcctccaggtattatataagagaccgaaacatggtcctggccgagaaaatcaccgaacactggccctccatcactagcgggtcgtcaccacccactctgcaacggcccaatcggaggatggcgcgcaggacgtaacccggaagcgtgcggggcacaacgaggggattttttttaaacgaagtccgaaatttgcccccgagagggatcgaatcgggaacctggagacaattgcaacagtatgtgtatttctagcgtcaaaagttgaagatactccttgtcccctggactatgtagttagagtatcctatgaaacaatgtataggcgggacactgctgcggctcaaaggatccgccagaaggatgtttttgagaaacagaaagcgctcattttgattggagagagattgcttctgacaacaattcgatttgatttcaacattcagcatccttatagaccacttcttgatgctatgcaaaatcttggcatcaataaaaaagaagtgaagcaagtagcatggaactttgtgaatgactggcttaaaacaacattgtgcctacagtataaaccccagtacatagctgctggttccctttacctggctgcaaggcttcacgatatcaagcttcctttgcatggagcacatgtttggtggcaccaatttggtgttgcaccaaagcctctggaagctgtcattcatcaaatgatggagcttgcggctgtgaacaaatcgaatcctgttcgtcccaatctggttaagccaaaggaaactttatgtgaagctaaactgagcttatctaatagcccagactctgtgttgaatcaatcaagcttgttaataagcagctctagtcctgatattggcgagaccagtgaccaagtgcaggtggattcttgtcaatacttgataagcagccatacgggtgattgtagggtctcatgtcctgacaacagttcgttggatacttctggtaaagctcatgatgaagagagattggatcaggccttaataaccaagcatgacagtgggatgatgccttctactagtaaccagacatcattagatgctactgtaggcactgagagcagtgctgaatatatgaagcaggatgtaagccattgcgatgacttcaatatcagagtcaatgaccaaagcttgaaccaggcgttaagaaatcagcatggtgatgctgtcccattacctgacatggtatcactagatgctaaggtggacaaggaaagtagttggtgtctggaaccattgattgcaaacttcgactgctgcattgacagcgttaatgtggatagcttgtgcactgatcagagattggctgatgttgcttcaggccccacagctgatgtgccatccgtgctgctggccaaggagaattctgatcctttgagtgcaaagctcgaaaatattgatgttgccaggataaaaggtttactgatgaagaggaagagccggagagagatccaaaaccaagccattgcttcagatggcctcagtgaagaagcctggattgagagagagctggagtctgggattgtcacaaaacaagaagccaattgtgccgccatctcagatgagctaagtgatgaagcctggattgagagagagctcgagtcagggattgtgaccggaccaacaaacgagcaggcgatcacttttgatggtttgagtgaaaatgattggatcgagagagagcttgagtctgggatcatcattgagccagcacctgctatcaagaagcggaagctggagtcaagctgttagctctttagctgctgcattcagaggccagattccaagcaggtgaataattacagatggaggtaccctgcgactagggcacatcgaagccaagagatgtcgcatagatgggaggatcaatattttccttttttttatttctttaaccaaacacctcggaatactttggcacgagggttgtgtgtacagtgggatcttcccagtttcttgaattcagaatcacacgaggtttgtgtgtacagtgggatcttcccagtttcttgaattcagaatcatatccactgtatctgttccttgtttgtgtaaatctagcatgcccgaagttcggctttaattagattgtaggtgtaactgtagcagggattgtctcgtgttaagcccgacgaaaaaatgattcagtgtaactgttactggtaaccaaagaaaattagttattcactatagacttattgttaacaaaagaaaagacagttactggtgtacgatgtttataaattgatggcgaa

SEQ ID NO: 38119 - DNA, 2568 bp, Zea Mays
cgcgagccactgcacccatccactcgtacgccgcggtgcgccgcagcccgcagcccgcagcccgcagcccgcagcccgcgactccaggcatccacaaaaaaccatctcccccgcggccccggcaccgcacgctcccgacccggcgagtcccactcccacctaagctgagcggccatggcgcggcacctcgcgccttcgtctggaagcctccaccgtctcctcgcgtcctgccactacccgcccacctcccaggcgccgcctccccgtccgctcctcctcccgaagacccgatcggcggctatgcagctcccgcgacgcgggcggcgcgacgtcgtcgccgctgcagctgcctccgcaccgtccccctcttctccgggtaccgaggtggcagtctggggtaaggtctccgccgtgctcttcgatatggatggcgttctctgcaacagcgaggagccctcgcgacaggccggcgtcgacgtcttcgctgagatgggagtcgaggtcgccgtggatgactttgtccccttcatgggcactggtgaggccaatttccttggaggtgtcgcaagagctaaaggagtgaaagatttcaatcctgaaagtgccaagaagagattttttgagatatatcttgacaagtacgcaaagccaaattctggcatcggattccctggggctctggagctcatcttggagtgcaaaaattctggtcttaaggttgccgttgcatccagtgccgacaggattaaggtggatgccaatctggctgctgctggtttgtccgtgtttctatttgatgctattgtttctgctgatgcgtttgaaaaattgaagcccgctccggatatattcctggcagcatcaaagagcttaggtgtcgacacaaatgagtgcattgtgatagaagacgcgcttgctggtgttcaagctgctaatgctgcagaaatgagatgtatcgctgtgacaactactctagaggaaatagcgttacgacaaggcagtccctcgttcatacgaaagaatattggagacatttcaattaacgacattttgtatggtggttctaatgctcgccacaatgaaggggcaggaagtactgagaatagtagttcggtagggaatgctttgtctgagagtctaaacggagcaactgctgctggacattctgacacaaaaggttttccaatctcaaaaaataaagggctgttgggttctcgacgcgaaatattgagatatggaagtctgggaatagccttgtcctgcctttttgttgcagtcagaaattggaaggcaatgcagttcgcatctcccaaaggcctactgaattttctcatgggtggaaatagttcagtttttgccagaaatgaagttgttatgtgtgtcttgcaggagaatctctgtcatcaagagttcaacaaataaagaagtatctagctgagtttgaatctgggggttctgccacatatgttcctgagtttccaagaaagcttgactggttgaatacagccccacttcagtttggaagagatttgaaaggaagagtggtgctgctggatttttggacatattgctgcattaactgcatgcatgttttgccagacctggattttgtagagaagaagtataaagaaaaacctttcactgttgttggtgtgcactctgccaaattcgataatgaaaaggaccttgaagctatacgtaatgctgttctgcgctacaacattactcacccggttgtaaatgatggtgacatgtacttgtggagagaactgggggtgaactcttggcctacatttgttcttattggacccaacggaaaggttctagcacagatatcaggtgaaggtcatagaaaggatctggatgaagtaattggtgcagcactggaattttatgaagagaagaaactattacaaaatgacccccttcccttggcattggaaaaagacaaggatagtcgtttactaacttcgcctctcaaatttcctgggaaacttgctgttgatgtgcaaaacaatcgattattcatatcagacagtaatcataatcgaattgtggtgaccaacttggaagggcagttcatataccaagttgggagttctgaggaaggattgcttgatggcccatttgatgctgccctatttaaccgccctcaaggtattgcttacaattcaaaaaggaatatcttatacgttgcagacactgagaaccacgctctgcgagaaattaattttgtggacgagactgtgagaacactagctggaaatgggacgaaaggatctgattacagaggaggaggacaaggaacaaaccaggtcctaaattcaccatgggatgtatgctacgatcccgcagaggaggccgtgtatattgcaatggctgggcaacaccagatctggaagcacaatttacatgatggaataaccaaagttattagcggtgatggctatgagaggaatctgaatggctcaagaaatgcatgagttacttgttgctgatagtgaaagtagttccattcgagttgttaatctgaagacaggaggctcaagattgctggctggaggagat

SEQ ID NO: 38120 - DNA, 2658 bp, Zea Mays
aatctgatacctatttggagacacaatatttcagttgtagtgtagaagagaagactgcagggatgccgacattactttctcttgaagtaactggtgatgcaattgaaggaacaactatgtttgccagtaaaaggtattggggaggagaagaaggggacacaatgttccgctggatactgacaaattctgatggaaccgagaaagaaattgaaggagcaacaagttcatcatacaccttgaaatgcaatgacattggcttctacatatctgtcttgtgcaagcctgttagaaatgatggagttgatggttctttagtgtcgactgaagcgattggtcctattataccagggccaccaacatgtcaatctcttgaactagctggctctatggttgaaggtggccgtttgacctttcatgctgtgtatacaggaggtttgcggggaagttgcatccaagaatggttcagattacatgatgatgggcacaaggacaagttgactgctgatgaatgtctagaccttgatctagctgatatcgattgccggattgaacttatgtatacacctgtacgagaagacggagtgcacgggttaccaaggagtgttacttctgatacaatcttacctggggagcccaagggtgtcaatcttattctacctgagtgttttgaggacaatgaaatttctcccatcaaaacctatttcggtggcaaggaaggcactggcaaatatacatggtttcgaaataaagagaaacttgataacttggaatttgatctggttgctgaatcatcagaagttgttggagaaaccttaaaatataagccttcattgaatgatgttagttcctatctgattctttattgggttcctacacggcgtgatggaaaggttggtgatcctttgatggctatctctgatgatccggtcatggcagcttttccatctgtttcggatgttcacttagagcagaaaagttcagatgtatattgtggactaggcatctattatggtggatatgagggattaagcttgtatagatggtacagggaatctagtgatggaactaggcttcacatagatggtgctgattcagtcacatacgaagtgacagatgctgattacagctgccgtctactgtttggatgggataagtggagaagaaaaactctctgaaccatctgatgtaattttgccagaactactcaaaatcgagacactcaatttcaaggggaatcaggttgaaagagaaacactgactgctgctgaacaaattccgtacagtgagattcaacaacatatatggaaaaattataagaaagagatgaaatatcaatggaaggcctaaaattgaaaagctggagattgaaggaagaggtttccacactgacctatatgccgttcagggtacctatagcggaggcaaagaaggcaagagtaaaatacaatggctcagatcgatggttggaagccctgatcttatctccatacctggcgaaactggaagaacgtatgaagctaatgttgatgatgtagggtataggcttgttgcaatttatacacctgtaagagaggatggagttgagggacaacctgtttctgtttcaacagaacagattgcagttgagcctgaactttacagggaagtgaaacagaagctcgatgatggttcagtcaaatttgaggttctgtgtgacaaggaccgaacacccaaaaaggcacaagtaatgggccatttggagcggagggttttggaagtcaaccgaaagaggataaaagtagtaaagcctggatctaagacatcattcccgagtactgaagtacgaggaacctacgctccaccgttccatgtcgagctgtatcgcaatgaccagcaccgcttcaagattgttgtcgacggtgatactgaagttgacttaatggtgcaaacacggcacatgcgagaccgcatcatcctcacgatcagaggcctcgcccagaagttcaacagcacctccctcaacacacttctcaggatcgagtcatgatagacctgacagtgtaaaaaccaactattacgggaagctgtaccccttgttccgattggttagagtgcgtggttttagtaggattcgtgacatgccagccttttgtgtgtatgggtgtgggacgggccgagcgtgttggattacaattttttccctgacacatctctcaaatcagagcagcatcagctggttgctctgactggtgccgtcgtgcgtcatgaaatgtacatagggtggttagagcgagaaagagagtggtgtttcttggtgctgtatttattatgcactggttgggttgggttttttcgactgccattctcatactaagtattggttctttcttttttcggtcgttgggtttgcatatacttgtaccgacaacacagcttggggtgattgggcgagtgctgttcagaatgcctggtccacacttgtgtacgactggaatcctacggtggcgtattcacatgctgttttatggtgcaaatgtaaattcatctgttcataaacgagaatcaaaatcgtcggccacgtgtattcgtcgtattcgtaccgatgtatactaccttataaaccagtactaatctcacggtggcatcaattatcttcctctgtttcacaaggcacacgtt

SEQ ID NO: 38121 - DNA, 2208 bp, Zea Mays
gacgatgaacagcagaaacaggcaggaccgtaggggcagcaacaggccaacggcgtgaagttgtgaactggtgatgcttttgttggcttttcgtccatgcgtaccaactaccacggcatggcagtatgagtagatccgagaatctgacaatccaagcgtcctgcactcctgctccacctcgattcctccacagcacactcccaaaaccagagccacgccggccggcacaccgtcgcctcctttgactagcctcgccgccgcagcgacagccatggccaccgctgcccgctccctccacctccctggtccgacgcctcctaaatcctctaccccctcctcccaccgcctccctgtcccttgccacctccgcccccaacgccgccgcctggccgcctcgtcctccgacctcacctccttccccgaaccgccccccgccaccgaggcggagctgcgggagaacgggttccggagcacgcgccgcaccaagctcgtctgcaccgtgggccccgccacctgcggcgccgccgagctcgaggcgctcgccgtcggcggcatgaacgtcgcgcgggtcaacatgtgccacggcgaccgcgagtggcaccgcgaagtcatccgcgctgtccggaggctcaacgacgagaaagggttcgcggtcgccgtgatgatggacaccgagggcagcgagatccacatgggcgaccttggcggagcgccctccgcgaaggccgaggatggagaagtttggacatttagcgttagatcttctgacacgtcgctcccagatcgaatcattcatgtgaactatgatggctttgctgaagatgtcaaagctggtgatgaactatttgcggacggtggaatggccaggtttgaggtgattgaaaagttagggccagatgtgaagtgccgctgcactgatcctggtctgttgctgccacgggctaatcttactatatggcgcgatggcagtgtagtgcgagagaggaacgctatgcttcctacaatttcgtcgaaggattggattgacatagattttggaattgctgaaggtgttgatttcatcgccgtgtcatttgtcaagtctgctgaagtaattaatcatttgaagagttacattgctgcgaggagccgtggaagtgatataggggtcattgcaaagattgagagcatcgatgctttgaagaacctggaggagattatccgtgcatcagatggagtaatggtagccagaggggacttgggggcacaaatccccctggaacagggctgaggttgctgatgtttctgaggcagtccgccagcgtgcagatgctctcatgctttctggtgagtcggccatggggaggtacccagagaaggctctcagcgtccttaggagtgttagcctgaggatcgaaaggtggtggagagaggagaagcgccaagaggcactggagcttcaaggtgtctcgtcttccttttctgacaagatatcagaggaaatatgcaattcagcagctaaaatggccaacaacttaggagtcgacgccgttttcgtttacacgaaggatggctacatgggctccctgctctcacgatgccgccccgactgcccgatcttcgccttcacgtcttcgacgtctgtcaggagacggctgaacctccagtggggcctcatcccgttccggctgagcgagtccgacgacatggagagcaacctcaaccgcaccttctccctgctgaaggccaggggcatggtgcagtctggagacctggtgatcgcgctctccgacatgctgcagtccatccaagtggtgaatgtgccctaggaatacgatccccatgtccagctggttccttgacctggaatgtagcatacaattaggaggggcttctttttttgtttgtttgtttgtcatttgagtgtatcccagttcgtagcatgtttctgcctcatgttgaggctctctggatgtcgatattgatttgcgtcagtgtggtttaggttcggactcgaatgctcgatttgaaaattcgaacagaactcggtttgcatcagtgtcatgattaactcaaaccattgttctgtactatatcagaacgtgttactacttatcttagtgtcattcctcagtttcacttggttttttttaaaaaaaatattgggaaaaatgtgcccagtaatctgggaacatatatcatgtgctgatgtgcagtcagtcctgttga

SEQ ID NO: 38122 - DNA, 765 bp, Zea Mays
tcatcagctatattagcttacccggttcagatttgcatgtagcgggcaccttgaccagcggatggagctcatctgatggaggcggaggcccgcgcagatcaagatcatggggagcccttcattttggggggaatgaagcctggtccgagatctacaccactcgtctccgtccgctcggtctcgatccaagagaggggggaagaggaagaagaagaagaagaagaagagagggatcgagataggagtaggaagcgaagagtagctgctaggagagaagagagactagagaaggaaggagcggcggcggcggccccgagccagacaacattcccctcaaagacgaaaggcttcctgatctatccatattatggagtatagtagagtatgtgtatctccagctagctagcttatccgccttgacctcgcttgcatcttgatggttctaccacctcctgtatctatgtgtctcagctcgctcccggcctacctctcagctttttgggggtacgagatgtggtgcagggaggaggggagatccggaagtgaaggtagaaaggtcggtatgtatggaggagggggaggaagaggagaggtagctggaagcaagaaagcaagctatatgaatggatgggggccggcgagttgaatgggcagggcacacagcaggaggaggacgaaggggaattgaaagggcgccggccccccacgaggcacggctggttccaagggggtgctgtccccgtcccggtcccggcagtgcgcgct

SEQ ID NO: 38123 - DNA, 1126 bp, Zea Mays
acttgcacgtcttccatccccggcggccttgtgctagtacccacctcgcgatcgacctccctctcgaactcaaagatggccggcaccacaaggtgtagtatcagaggcagcaacgctcccggcttggccctgccatgcttgctgctgctgctgctgctcgcgggcgcaggcgtctccaacggccagctccaggtggggttctactccaagtcctgcccggacgccgagtccaccgtggcgtccgtcgtccggcagtccgggtccgccgaccccaccatcctcccggcgctcatccggctccagttccacgactgcttcgtccgcggctgcgacgggtcggtgctcatcaagggcggcggcaacaacaacaacaacgccgaggtggacaacggcaagcaccagggcctccgcggcctggagatcatcgagggcgccaagacgcagctcgaggcgcagtgccccggcgtcgtctcctgcgccgacatcgtcgtgctcgctgcccgagacgccgtcgccttcaccggcgggccgtcgttcgacgtgcccacggggcggctcgacgggaaggtgtccaacctgcgggacgccgacgcgctgccggacgtgcacgacggcatcgacgcgctccgctccaagttccgcgccaacggccttgacgagaaggacctcgtcctcctcaccgctgcgcacacggtgggcacgacggcgtgcttcttcctccaggaccggctctacaacttcccgctgccgggcggcgggcggggctcggacccgaccatcccgccgggcttcctgtcggagctcaaggcccggtgcgcgccgggggacttcaacacgcgcctggccctggaccgcggcagcgagaacgtcttcgacacctccatcctccgcaacatccgcaacggcttcgccgtcatcggcaccgacgccgcgctctacaacgacacggccacggtcgacgtcgtcgactcctactccggcctgctcagcaacttcttcgggccctacttccggcaggacttcgcggacgccatggtccgcatgggcagcgtcggcgtggtcaccggcagcaagcagggcgaggtccggaagttctccttacagcaaggccatcaagaaacttcgc

SEQ ID NO: 38124 - DNA, 1078 bp, Zea Mays
ggcatcacgagcagcgacgaatcgtccgtcatcttccccaactccgatccatagtaggccagtccagaacacgaggcggcggctatgggcggacatggccacccttactcgccggcggagctgcagctgccggggttcgtgccgcagcggctgtcgcaggcccagatcgtcgcgcctttcgcgggcaccgccgtgttggccgtgctcggcgcctggctcgtctccgggagatgcggcggcggcggcagactatccaggaccgaccgcttgctcatgggctggtggctcttcaccgcgttgacccacctcgtcttcgagccacccttcctcttcaccccggacttcttcagcaaggagaacccaaactacttcgatgacctcttcaaggagtacagcaaaggtgactccagatacgccgctagggacaccgccatcgtcgcgcttgaagcgataaccgtcgggctcaaaggccctgcatcgctcctcgcagtctatgcgatcgcatcccggaagccgtacggccacatcctgcagttcgcagtctcgttaggccagctctacgggtgcctgttctacttcgtcaccgcgtacctggacggcttcagcttctgggcgagcccgttctacttctgggcgtatttcgtcggcaacaacagtttgtgggtggtcataccgacgctcgtcgccacgaggagctggaagaagatctcggcagcgtttcaggctgacaaggtcaagaccagatgatgatgatgatcctgcactgttcctgcgaccagcgaccctccgtttcgccgccacggcctggaggaagtttctttggaaggcacaaaaatgcaatgcatgttgtgcaagaacgggcaaaccatcatgaccgtgtagtttgcgagaagcaaaccttgtacctttttgtgaaaactgtgctgtttcacccatcttgttcagtcgtatgcatgccagggtgactgggtgagtgcatatatatgcaattatgcacacatatctgcatcgtgtttcaaaaaaaatgtatacctgatctttaaggtgacatacattttacattgagttagtgttgatg

SEQ ID NO: 38125 - DNA, 2715 bp, Zea Mays
cacgagtcctgacctccctacccccatctccagcccctccgacgcggccccaccatctccacctcccggccgaacagacacgaaccagggaccaacgacaaatctcgcgacctctcgaaatgagcggtaccggaagcagcgtgtagcgcgagacgaacgccgccctaatccaaaccctagaggcgggaggaagacggcgagcgaacgcagcaacgattcctgatctctaatatcctagcacggcggcggccgcggccggatctaggggtaacgaaggatgtcggactcggcatcgatggcggccgccatcgaggcgcggttcagcagccgcgacctcatcggctgcggttccttcggcgacgtctataaagggtttgacaaggaactgaataaagaggttgctataaaagtcattgatttggaagaagctgaggatgacattgaagacatccaaaaggagatatctgttttgtcacaatgccggtgcccatatattaccgattattacggctcttatcttcaccagactaaattgtggatagtaatggaatacatggctggtggttctgttgctgatcttcttcaagctggtcctcctctggatgaaatgtctattgcatgcattctgagggacttgttacacgcaattgagtatctacattccgaaggaaaaattcaccgtgatattaaagcggcaaatatcctcctcactgaaagtggagacgtgaaggttgcggactttggtgtttctgcacagctgactaaaacaatgtctaggaggaagacatttgttggaactcccttttggatggcacctgaggttattcaaaattctgaagggtacaatgagaaggcagatatctggtctttaggtatcactgccattgaaatggctaaaggtgaaccccctctggcagatattcatcccatgagagttcttttcatcatacctcgtgaaaatcctccgcagcttgatgagcatttctcgaaaccaatgaaagagtttgtctcactatgtttaaagaagaatccagcagagaggcctagtgccaaggagcttcttaagcatcgtttcataaaaaatgcccgaaagactccaaagcttttggagcgaataagagagcggccaaaatttgcagcaaaaagcatggatgccacacaaaatgggcaaacacatgatgaagaggaggattttggtacaggcactatcaaggtcaataggacaaaagatacagctccatctttgagtcaaggaacagttaggaaatctgcagtcagagatttttctgatagatcagagggcacaggaactgtccgagttgtttcaaggcctcctcaaatcgcctccacgaaggatggtagatctgatatgcctcaaagtccaaaagcaccaatacgcacagctgatcgagaaaatcagtggaggtcatcagggactggatctgaagaatctctctctctcagagatactcagagcggacgagggagagtagaaagttctactgatgacaatgatcactctgtaagtgggtcaggaactgttgtgttacgctctccaagagcatctcagttgtactcaacagctagcaaccacagtgccaagattctcctcttatgaagatatgtctaatagtgggacagttgttcggacccaaaatgaagacccagaaactccacgatcttcaaggtcaaggctggggatccaagaaaaaacatcaaatgctcctcttgaggatagtgccattaaccttgcagaggcaaaggctgctttgcaggctgggttaagaaagggaaatgctcgagaaagaccttttatcaacaggcatgaaaagggatcacatgagcatagatcttctggagtaaatagtcaagaggttcaaagcgaggatgtggacacgcagaaaggtcacaaattacggcaattacctgatgggcagtcagcctctcgtgctagttctgtagcttcacctgcagtctcatcattgctactcccttccctgaaagaggctactggtgacaagtttgatcggcctgctgttcatgccttccttgattccttgatggatttagaacgtgatatacctggatcatgcgaagtactggttggcagattgctacaccggctagggagctcaaaggattcctcattgcaaggtcttcaggagacggcgatgtcaattttcactaaggaacctgaacctccctctgaaaaagcaggcgacaagaagttagctaatatgccaccattggctgctcctaccgtgagcccactggcaaggttccttctcacaaggtggcaaaaccaagtttctcaagatcttaactctgtttgatccctgcgatgcagaaaagtgatttcatgttcgattcggtgtataattaatatttttcagtgtacataatgcaaactttagaactttatttcatccagtcggtctcaaccacctgttatttcatttgttttgttcatggcgaatactccctctgtccccaattaaaatttgttttacaattaatgtatgtgttgtatatatatgtttagtttcataatcatccatatgaatatggatgtaaaaatctagagctagtacgagtactatttttgggctagtttgagaacgtcattttccaaggattttcattttctcaagtaaaattagtttattttttcttaggtcatgtttttctctttattttgaggaattggaatctaac

SEQ ID NO: 38126 - DNA, 1242 bp, Zea Mays
ttttagcctccaccgctcaccccatttcttgattcctgctctaaatctttagccgtccgtcgttagcctagctcactggccgccgctacccttctctggtgctcgctcagcccgccagccgacgtccttcccctgctccggttcctcctcagcccagagctttgcctgtcgcttcctgttcagccaccatagccacggtcatcccaatcatctccggcagccgtgacatttcctgccggtgtgtcgccggccgatgcgagctttggttcaagctcgtctctatctgtcataggctagagcgccacccttcatcatcttgccggtccacccttcctcatcatgaacccctcggtgctaggcatcaacatcagttgtgcctccctggtatatgtacgatgttggtaaaggtccggctatgggttccttgtaccgcttctgtcaagtccggcagcgctaggctcgaccccctctcagctcgccgtggtttgtgggtgcatgttcgtgctgtatcagctctaacgacgtcgcgcccgaccactcgccgtcatgcctgctcggccttgccaccaggccccgcagcaagttcccttcgctgcgcgccctcgcctgctgctgtgtcatcgactcaccggcatcgcatagcttgctatgcgcgtggagcttgcgcgcgcatcgtcgatggtgccttgtccttctccctgcttgctgcaagcctgctagcgccgtccctcgccatgttgtgttgctcggcttcttgcagcacctgttcagcccatcaatgtctctacttgatcgctggtcgcgctcgactctgtgggtcatcattgggtgcgtcatcaagagatctcgggagtgggtgaagaagcgattctcgcatggcgttcgttaaatattcgacgaacttcttaaacatatgatcgtcgttttttctgcgaattacaagtcagatttaggtacgttaattaatcacgagatgtggaggacaagaactgagtcgaccccaagatgatgcagtgagtggatatctccgcaagacgatgtcgtcagtcgggccaacctgaaagctgcataaatcaagcaagtgctcggctgagagacgatcgacaagcaagtctcgtctaacaaacactaacctagtgttatcctaggcaagccccggtgcatgcaaccccttccttgtgtttttaaatgatttttacacactttaagtctagtgaaatgtgcattaggtttataggagtt

SEQ ID NO: 38127 - DNA, 2295 bp, Zea Mays
atgtccaatactgctatagtagcttctccaagttatgacactgttaggaagatggttcaacttctctcgaaatgaagcttctgtcttcctatgtatagacaagttgttcagttaggaggtctagattctcttaaaatggtgctatctacgagttaggaggtctaggagcacactgaatgttttagaggttgatgaaatcgttgttttcctaaaaaagcattttttctgctttgtttgaaattgtttgggttttcctccccaactttcataattacctatttctattgtatgtttgatcatttggacttctactccatccacaattttggtttattcagtgaggaactatgtttttaaccactctatagtttgtatagacatgcaacattcatctcagggtcaagaaagaagctcaacttggcatgcttcctgtttaaagcaaggcaagaaacatccccgccagatctctgtcgccaaagcagggctggtgaagaagttgtgtttccctcccggattgtcactactttcatatttgttcatttatgtttgttccaatttatgttggttttttacagttacagaatatgtttgttccagttgagttccagtttgaaaactggaacaaccactagcagatgcaaagttcacaaagtagcttgtcaaataatgtgcatgaactggaacaagcaacttgtgcacgaatgagcattactggaacaagtagcttgtgcatgaacgagtaatactgtagatgattggacatgtatgtctattttagatttttaatatttaatgttatatattcagctcataccatacatgaatttgcatttctgtactatactcacttaatgtcctacctgttttgttagcttcaactatccgctttaaactgacaaaaccagaccaaacatatgcaaatctcatatacctgtgaaagcaacaactgatttgccagattggttaattaaacgtaacaataaatagccccgattaaatggcttataaatatacttggatctgttcatttttcacatatcagctattaatgaagccttcactgggttcattttgtactactccattacttatttacagttacaagtattctaagaaacttaatatttcatcatcaaagttgtattcagacagtttcatttacattgctctgattttttgtactaggagctactgacaatggaaagcaacgattagagtaacttgatgagtgaggactattcattcagttgcttcgatcaataagtgaactaatggatgcatgtttcttttgataagtcacatatggaaagtgaagaacccaaatgatttcttcacaggaagcttggaccaatcttcaactcatggggcgcttcatcctcggcctcctacgcatgcacttctcctgcttctcctgctggtcatcgcccaaggatgaattgctgctcttgaccatagggattggagcagcatgtagtttatactttatcctggttttctctctcgagtgtgtcagatgtgccgtaacagatgactccaaaatggattgcatgctcttcaaatagctacagataactatcttcacataaaatggagagtacaatgtttataaaagaaggaatatggataaggatccagattctcctatagcatatgaagaggcaaaggaaatggcaagccaaagctgcacaatttctgatgatcactcgttgttactgttatccattatctcctcagaggcattgcttttaaattcaacagcagacatggcaggtgcaggtcctatcctatccattatctacccctgcatgtgtgccagctattctactctatgtttcaatagtttggaaataattcagagctaaggttttctgatacaggatttgttattttgtatatcgatctgtgtcatttgacaaagtactttgacttggtataatatgagtgttacttcgaccaaaagagcttggtaaagtgtgagaaactccgcaaacttcttctgcagacgatgactagcaacagttatgacgagggtcaagatagccgccatacatgatacattgagtacaacatcaagataaacactccctccccacacacaacttttgccttccgttcactctgtatgttgtgtttattacggttgcatatgttgtgtttattatggcatcaacacgttccattagaaaatataactattgtttgtcaagtacaaaatcataatcacatcagcttgtaataatattgcatcactgttttgtaccaaattgtaagttgttgtagcaacgcacgggcacc

SEQ ID NO: 38128 - DNA, 3118 bp, Zea Mays
ctctcgttctcttcgtctctacgggtttgcagctgacgctctccatcctcgttcttctcgctccgttcctctttccctcctcccctccgtcttggttcttcacacctggttcttctgtctcccgttgtctctatcgtctgctccggtgaacccgcatcgttcctattccttgtgctgcttccgtcgtcggctccagtaaatcactttgttcgccagctcgagatcgtggacggcttgctaaaatcaggtttgttttcattgggtttccatttctggaagtgattaaggcgaagtaaatcttctttcctcgaaacgtatacactttggtgcatctgtggaaatctgatttgttgggtttctgatctatttggctctttgcattttttaaatcccctcctacaaatcctgctacctccccgtctttttttgtttgtttggaaaatttgtttcgtatcttccctcctcgtttttttgcttcagttcgaaatcgatttggtgggtttctgatggcaaccctcgccaccgcctcatgggtacgtgccgagccgccttatctgttcgctcaccactttacattggttcttgcgcctgcgatttcggtgtcgtaggatcatgcttgtgcggatgtgatggtcgctgtggcttcgcgtcggtgggcggtgggatttgggctgggattctcgcgccttgtctctagggtttgggtttggtgcttcctcagtgcggaattggggattataattcctttaggtttgattttatctcgggtaactgcgggataatagcctagtagggaaatcgtggggattcttaaggattattaagtttctgatttatctctgccttatttagctcgtctgttgtggtggcttttccttcttgctgatgctgattatgcttccggttatgagccacaaaacaatattgatcggcaacctgtagttttgcctcagttcatcgcttgctgtctctgttaaatgaccaagaataaagtttagtacttcacacattaggcatccagtaaaacggtatcataattccaaaggtcagtaacgcaaacaaacaccttctaaatcttttccgtttgctgcagcagccatgagattctccttgatctgtttgcgacatttattcctctcttgaacaatatcttgactattccctccagtgaacagcgagacatatttctcattcttagggaagaactacaaatgagttgagatatagaagctttagctcaggattcaagcaggtacagataaaaaatggttgattagaacctccaatctaatgcaaagagaatgatacatcacagaaaacaaagttgtaatgatacttatatgtcatatcatcatgggcagggcagtaatgtaggaagcttactctaacatattcaagatcttctcgcaattttgacagattattgttgacaccatcaccatttgaacgttgttgcttctcgagtcgccttatcatcctctcaatcttccgtctctctttgtattttgaataccaacatcaagaagatggtaagtacattccatacatgcatagaaaagaaacttaaaatgaaaaggaaagtataacagaccaaagaactttatctttctatctctaaattgtaatgtccgctggacaacaagttgattctgaagctcttgttgcctcttcagttcttccagtttcttctcttgagcaaccctaatctcatccggaaggtcctgaaaattaaacatggagcagtaactaaacaacatggctagatgaaaagggggctatactccattgatgtaatcagaaaataaaatggaagcatatgtgctattcttttatacatgtaggttgctcacataaagtggccttgattttaaataacacaaccatggtaagcttatacccccctcccgctgtagaattgaattacacaaccagttgccacttatgcataggggtggtaatgggctctagattttacattataaaatttaaggatcgaatcgcgttaggaccatgctctattcctttttttaactaaaatttattaagggccctaactgaaaaataaaattttggatcgtggtccattaccacccttatgcctacttgactctttccaatataagatgaagattctgtcggaaagcaattatatttagttgatgcatagaaagagacatgaacatatccattctacactgttctaaaacaaggtcaattaggcttcctcacttcccctctgacaagaacaaattccctttcaccatttttcgaccaatcagtttgagcagcatagttaaaatttcagtatgttagtatttcaatcaatacttgatacttaatgcagtgcagtaatccagctacaccatgaactttatcccactacatgatgaaatttatctttgcagttaccataaacatgagagcattctcagtgacaaatagagcattttctattctctctatattaacaaaccatggaagacaatcctcagtaccatcttccctacttacctaccccgaacaacatcttatcacaagatgacgtacttggccttacaaccacgcaccagcgacatcattttccaaattatccacttctagcagccaaacaaacatggcccgacgattgctagcatatcccggtgtgccacagaatacagaggcggatgaacactacacagatcaacttaacaagaaggagctatcctcaccatcgaaaatgcatgtgtgttgatgcaacctctgggaaacaaatgctatcagctgctgacatatgctacttcaatactgcttgatatgtattgcactctcagttccgtctactgttggtccaaactgcatctgtgtatatacagacgagttgtattaaactttctaaatctgtgtatactaatgcaacctcttgaaaacagttgttagcccttgacacgtatgctattttaatgctacttaatatgtattgcaatttggttttcctgtacagaactgctacaattcacgttccaatattaatcggaagctactgcagcctagcaaaatttccttaagtctgctttgtgtccatgtatttatgtgcttcataacgaatatccttcatataacatttccacgctacaat

SEQ ID NO: 38129 - DNA, 144 bp, Zea Mays
tgtgtttggacccagctagcagcaacactctttctgcaagtggaaatggggagatttatgcgtcgttcagtgggcttctgatgctatctagatgtccccttccactgttgctagcttcaagcttgatcacagactctttccact

SEQ ID NO: 38130 - DNA, 972 bp, Zea Mays
acgctgtctgctcctaaacacgtattccagtgaattacgttttcactcgcgatatcgtacttttggttcgtcgtgtactcgtgtggaaggcggctgcctgctcccgcggtctcttccgtctcggaggtgggagagagcgatcagcggcgtcgccgggtggatccaaagcgcgcgagaaaatgcagggcggatccagcggcatcgtgtatggtggcctcaagtaccaggcgcggtgtatcgccgacatacgcgcggacgccggctcgaccaccttcctcgccggcaccctcagcctcaaggaggagaacgaggtgcacctgatccggttttcgccggcggagagcgagctggtgtgcgatggcctcttctaccaccccaacgagatttgggacctcaaatcatgccccttcgatcacagggttttctccacagtctacacgtctggtgagggctatggtgcatcagtttggaagatcccggagctcaatgggcaatcaaactcaccacaacttgagcagctctttgagcttagtgggcatacgggcaagattagacgtgtgatctggtggccacttggaaagcatgataaactaattagcattgatgaccgaaatatttttctttggaacatagacacgtcaaaaaaaatagctaaggtgatctcacagggatcaactgacatgcttccaaatttacgtggtggagcttgggatccacacaatcataatttagttgctgcaatatctgattcatcacttcagctgtgggatctacgttctatggaaaaatcaactgcaattgaacatgcacatatacgggatgtggattataaccccaagaagcaaaacattgttgcaacagcagaagaggaatttggaattcgcttgtgggatctcagaatgcttaagtatcctctaaaagatctccctgggcactcacattgcaaagatcgggggttttttatggtctcat

SEQ ID NO: 38131 - DNA, 3558 bp, Zea Mays
gcggaaccattcgaatttcgaacgccgccggtcgctccctgttccctagctctctcctccgcggctccgcctccggcctccacggtttcgcaggcagagatgaagaaggcgtccgcggcgtcgcgctacgcggcctacgactccccgtccccttcgccgcgccgcgcggcgccttccgcggccgccgcgaccccgggagcagcgcacggcagcagccgcgccctggtggtcgcggggagatccggccgcgatctactgggcgccaagccgcaagcccacggcaacctaggctccgtgctacggcggctcatctccatggacaagaagccgccttcctccaagaaccagctcccggttccccctgccgccgccgccgcagcagcagcagcagcgaagaacaacggtggcgggaagctgccggggctgtcgcggaagttgttccagaaagcctcgtccaccgaggcggcggcgcccaggaagacgaaggccctgatggaagtcaagaacagcggcaacaacgccaacacgcggacgctcggcatggtgctgcgcagcgagcgggagctcctggcgcagaccagggcgcaggaggacgagatcgccgcgctccgcctgcagctcgagaacaaggaccgggaggtggagcggctcaaggacctatgcctgcggcagcgggaggagatcaggacgctcaaagacgccgtcctgttcccggacgtggagccggagccagagcccgaccgccgcctccgacacgagatttccacgctcaccgaccagatccagtgcctcgcgcaggaggtcgcccaggttaaggccgagaagcactcggcaaggtcgtgctttgacgaggatggatacttctcttcccctaggacgcctgggtttaacgaggagaccgctttctctctggagtgcagcattggggaagctgagacgccgaactacggtagcccagacgaaatgttcagcaaggatcttaatccttgcttgaccccgtgcattgccaagagcagatctgatgtatccgcacaattccagtcgtcttcctcccagttcacaaaggaatctagcggttctcgtcgcagcagcggcaaggaaagagcagaccgctcttatggttcttttggcaggccaatgtcaaagagctctgaccatcacaagccggccgcctcaggaagcagcaacaagcgacgagtatacagatccgatcaagacaaaatcaatcagaacctgttttgagttcaccatcgtcatcagcttgccagtgaaggtagcctccagcttctactaggtgaaatatttataagcatgtggactttttatggtccgtcgataccggtgctcgtgatctgtcagtgaatgaaacctttggtttgtgctttttttgtgttatgctctagcttgcccagctatttggaatggaatgccagtttggctctgctatgtcatcgataggtgaatatttggcttctcatgttctccgttctctcacgaatcacgatggcggctccaacatccgtcggtgcgagtgcgcggtcgtcgggtcgaagcggaggagagtctcgtcgggcggggatgcgacggactccatttcagcctccatcgggggagctggagagggagggggcaagaaggcgctctatcactgcaactactgcaacaaggacatctccgggaagatacggatcaagtgctccaagtgccctgacttcgacctttgcgtggagtgtttctctgtcggcgctgaagtcaccccgcaccgcagcaaccatccttacaaagtcatggacaacttgtctttcccacttatttgcccggattggaatgcagatgaagaaattctcctccttgagggaattgaaatgtatggtctgggaaactggcttgaagttgcagagcatgttggtaccaagtctaagttacagtgtattgatcattacacatcagcatacatgaactcaccttgttatcccctcccggatatgtctcatgttaatggcaagaataggaaggaacttctagctatggctaaagtacagggtgagagtaaaaaagggactttgctgttacctggagaactcactcctaagggtggaagatgcacttggagaaggtccagcaggtcgatcaccttcacacatggctgttggtgcaaataaaaaagcttcaaatgtgggacatattaaggatggcgctactgtatcaaaagtcgaagatgttcatgtagatagaagtgttggtgtgaagaagcccagatattctgcagatgaaggcccttcgttgactgaactgagtggatacaatgcaaagagacatgagtttgacccagaatacgataatgatgccgaacaagctcttgctgagatggaatttaaagaaactgattcggaaactgatcgtgaactgaaactccgtgtgctgcgtatttacctctccaggcttgatgaaagaaaaagaagaaaggagttcatattggaaagaaatttgttgttccctaatcccttggagaaggatcttacgagtgaagacagggaactttaccatcgctataaagtcttcatgcgttttctttctaaggaggaacatgaagccctcgttaggagtgttattgaggagcgaaaaattcggaggagaattcaagaactccaggaatgccgttctgctggatgccgcacactggctgaagcaaagatacacatagagcaaaagaggaaaaaagaatacgagctgaatgcgcaaaaagctaaggatagcagtcaacttaatgcaaataataaatcagtacaaaagatgaatcgacctatgaaaattgagtccgatgggaatttggatccaaagaaaggtggtgctggcttggattctcctaagacaacaggacctacaagtgttaagcagtgggatgactgggatatagttggtcttcctggggcagagctattaagtgctagcgaaaagcttctatgctgtcagaacagattgctacccagccattacctgagaatgcaggaggtgctgatgcaggagatattcaagggtagcgtcctaaagaaggaagacgcccacgtcttatttaaggtcgatcctaccaaagtagatagtgtttatgatatggtatctaaaaaactgggcaaccatgaggaggccccaaccgtctagcttacgcttttgagcttgcctgctgtgacatgccgaaggaaacaaatcttggtctggcccttcgcagcgtgtctgaatcagggctgaaggtggtggaaccatactaaatcgaatcggccatagttagctgaaattcatatcagctgtcagtagcacagtaaggcattcccgccaagctgtaaaattattgccccgacgagaatgtgtagcatgaatttgaatttcttttctgctattgctgtgtactgttgcagggtagtgccttattgtagtatatgtataggtgcctgagttttatgtatcatcgtgtatgtaccatttgggcgctctatttatgccattgtaccaaccccaaacatcgattattataattcatctcgcagccaaattcttgtctct

SEQ ID NO: 38132 - DNA, 2872 bp, Zea Mays
cacacagttcgatccagcccaaccgaaccaaatctctagcagacgggaacctgggaacctgaaccctcaaaccccgccccttggcctcccatacctttcgcgccgaacacccgccgtcaccaaaactgacggctcctccccctctcccctctccccttttgtgattggactgaagtgggattcatatatcaggtgtttggattcttctctttcctctgctgtatactagcttcctaaaggatcgatgtcggctatctccaatcagaagaaacgcaccttggaagcccttcagcaacagtatactgctgcaaaagctaagaaattgcaagatgaacaggttaagagtcagaagaagagcaattttaatacccctaagcctaaatttgatgcaccaaggggaagcaaaggtctagtaatcactcctcgacgaacatatgcccagccttctcctcataaagatgtagcattttctagttctaattgtcaacaaaagccttccacgtcctcaggtgaagaaatcaatcctgtgtatgctgaactttcttgtgcttttcatgacactttgtccaaaggatttggatggcacagaggttgttcacaatgttatatatgacataattcagaaaggtggagatgctgggaaaattacaaagggagccaaaaagttgaaactggaaaagggatccttttggatgagggaaatttggatccataccattaaaagatcaccactttggatccataccattactatctcacttacatgtgggtccacatgagtcaatgacatgtggggtccatggtatatatctaaagtttggatcttttaatggtatagatccaattgttcctttggataattatgttcaaaggggttctagattagtggatgaccaagcaagatctttgctaattcattcaaagtgataaaaaggcacatgtctctgaaacaacataagaaatgtggttcatttgatttagatggtacattccacaagtactacctctataagctaatgcatgagatgtggaaggactatatcaaagagcttatggatatgagcccatacgactccacagtatccttttgtctgttattttggacctcttatcttccttttttattttctacatatttttagcggaaataaatccatgtgttatactgaaactcaacaaaataaaagacagtctttgagtgttcttgttatgagcggcagatggctgcgagggttagaggacgatggctagggttagagggcgacagctatggttaggggcgctggggaggtcggccgcagggatttgcccacgaccggcaagagagaagggatttttcttctaatctcttgtttaccttcaattgatacaatcactcttcttatatagtgagggttacttgacccctaagcactagatctaatcttattccaaactaatctatctttatctaaacaaccttgaggggtgtgctacagtgcgccgttactgtagtgggccctcttgggccctgacagttctgctgcttttggtctcaaaattttgactcttgagtcagcggcggagtcgctgtccacccctctgggccgccggctgggctcattggcgaagttcaaaagaaatatttctttatatcaaacaaaaatactataatttgctagctaaattttttgcataatgtgggttgtccagacacctgaaagcttttggctacgctactgtctccacttgaacttttttgtcgtttaatacaaaggcaggagaagctacagatcattgcattaatgagaaagtattttagtggacaaccccacacaagcacaccacccaacatatattgaactgggttctattgagaatgctatagtgataggtggatagtataacgtgatggatttaaacccactatgtctaatgtagcaaatagttaaagggcacggatttccagactttatacaatacaataaaatgagctttcttgtataagctacgtcgagaccactcaaagactctagttttcttgaactgaaatttattgaccatatgaattatgaactaaactaaaaacactaaatcatttgttaccatataagcattatattttatgaaatatcaacgaatttgaagatttgaacaaacaagaaagacaataattaacctgagtgtgaagcaagcgcattcagagtagtggaccaactcgagcttttggaaaactttaatgtaaaccctattattgtgcctgttcctgtaatatgtacccttgagctaattacatgtcctgtcttcaccacaggaaaaataaatttactgagaaccttctttcagcagatcttcatggggcccttctaatagtggcagaacacaaagctgcttcatataaaagtgtaaacggaatcatgattcgagatactgcagagacgtttggaattatatccgaggacaaccgcttccgggtttatcaaaagctggttcagttttcgtacttcaagcagaccgctggaagttcacactgatcggcgacaagctctcgcccagggagaagttgaaggaggatcagcgtcaacaacgtgcgcaatcgctaatcagatagtttccaatgtgccagctgttctctcacaaaatttttgctccacggaatacttgcttttgtttaggtcctgccactgtagcatggtagttttagcgctctagaggcgttgacatttcttagcgacttactggcagctcgagttgtggaggggtgtgtgatcatgagccatgtactccggtgactgattattgattagtataggcgaagcaagtccatttacgtttgtttcatctagtcacacaaacctgtggcaaatatttattacgccttgtttctgtcgcc

SEQ ID NO: 38133 - DNA, 412 bp, Zea Mays
agtaattccatactcagggttttattccctgttgtttttcaggttctaactttgtgctgttgttgatggtgttaagtgccggtgggctcggccttcttataagtctaagtactccttctatacttcttactgaggatggtcatttgagctagcatatatttcaaacttatacttttataatcactccgataaaataatgtaaaatttttgtaacttgtaaaatttggtaataagatttccgctgcaaaaatgttgtgtgtgtgatttgtattacttaatcccgcggttctggttgaaagtggtttatccgatgtccttggggcaatcggacagatcctgttaagttatctggtgcacatgcatagccgtctgaggtctttgggacaaggacaggtgcatgtgggcccaataa

SEQ ID NO: 38134 - DNA, 3531 bp, Zea Mays
ctagacaaagaattgagggggtggccagaaccgccagatgctgcgaaggcgcagagcccggagcacccagcagcgacctgttccgttggcgttggctcaccacccgaccaccgtgcgcgcgagcaaagagagcccctgcccccctgctgctctccgcgcccactgttccctcttcatccaggcacaggtgacacgggcacctgttcacctttgcagggccctgagcccctgcggccggcctgtagccctgaactgatgaacctgcagttgcagctcattttgcaagacacggacagctctctccttttcgtgctccctttgctcccttttctttcagtcgcttcacactccacggactcgagctttggctttgtggcgcctgtgaatctgccaacaaagaaaggactgaagggggagggaggagagggctgatccaagtgctttcacccatctgcttgtttctccatttgttggcctgcaatggcggggagcttcgacctgaggacgccaaccagaggcgtcgagcaggctatcgttgctctgaagaaaggcgcacatctcctgaaatgtggcaagagggggaagcctaaattctgcgccttcagaatatcatctgatgagacaacattaatatggtactcaaaagggagggaaaaacacttgagcttaagctccgtgtcagctgtggttcttggccagaagacgataaaatttctgcgacagcgttgtccagagaaggaaccccattccttttcacttatatacaaaaacggagagcgctcacttgacttgatctgcagcgatagagatcaagctgaaaactggtatctgggcttgagggccctattaccaactccttgtaatccatgttcatcaattgaatcaaggagcagtaggcagatcgacagttgtacaaatactcccagcagctatattcagcttaagagtaagttactaagtgtgcatggcacaccaaggcacatacaggttagttcaggaagttacattgtagcatctgaatgataacacttgtatagctcgctttggcatttttctctggtatttcatgtagcaacatttgttttttttctcgggaaaggggattcacgtggcaactacagggcagggactgtctgaatttgaaattcaggaggccaattgataaacacaacattcttaagttgtaccaacttatatcaatctcagcaaaccacacatctatgaattatgattgcaagggtactagtaaatgagatcaacattgaaatgattttgactttatgaacccaacaatttgtgtagtttaatcttgtccatatgtaagtaggcataccttactgatgcgcttttctgtttctaaacacttaattctcttggttaaattacagtcttctgtttgggtctaacaattcgtctaatgcacttcatgttaaggtatgttcatcgcaaaggaagcccaagaaggcacacggaacattttttggtggtagcgctgattgttcagaatcattattttacacaaggcagcgaacattctctgacataggtacctacttggaaaatcttacacgcaagatgtcaaatccagaaatacatgatttgaaggatgttatggttggtaaccaagaaaaggagcagaaaattacccaaacacctaaactgaaaacctttgaaggaccccgtgcagcatgtaggttagattctctgaaggatgtttttttctggggtgatgcttttggaagtattttagagtgtggtgatacctcaaaaccccttccaatgttagtggactcaacgaacatgcttgatgtacaaagcattgcttgcggagagactcatgcggccataatcactaagcaaggagaggtctactcctggggaaatgagagcagtggcagaattggaaatcaagtaaatatcaaagtctcccggcccaaggtcgttcaatctcttgcctctttacatgtgaaggatgtggcctatggatcaaagcacacttgtgcagtaactgtttctggtgaacttattgaatggggagaaggaccctatatgggccagttggacagctatgcgaggaatcaatggtttccgcataaattgtttagtccactggacggcatatctgttgtgaagattgcttgtggtccttggcacacagcaataataacgtcttctggtcagttatacacatatggggatggaacatttggtgttcttggtcatggagatacacaaggaactacccggcctaaagaagtagagtctttgaaaggctcaagagtgaaatgtgtggcatgtgggccatggcacacagctgccattgtggaagtgatcagtgatttcaagagcaattcaccaagaagcaagctgttcacatggggcgatgcagatcgggggaagctgggtcatgctgacaaaaagatgaagcttataccaacatgtgttgattcactcacagactatgattttattcaggtgtcctgcgggacggcactcactgttgctctctctgttactggtgtggtctttactagtggcagttcgatgcatgggcaattagggaacccccatgcagatggtaaaactgtttctgctgttgaaggactacttaagagcgagtttgtcagacatatatcatcaggttcttcccatgtagcagtggtgactacaaatgggaaagtgtttacatggggtaaaggcaaggaagggcagcttggtttaggtgacttccttaataggagcactccaactttagtagatgcattggaaggtaggcatgtggaaagcctatcttgtggttacaactacactgcagcagtatgtctgcataaagtaatctcaaggaaggacctctctgtatgtagtggttgcaagatggcttttggtttcactagaaagaagcacaactgttaccattgtggatccatgttctgtaattcctgtagtagtaacaaggttgccaaggcagcacttgcaccagataagagcagaaggtatcgtgtgtgtgatgggtgtttcagtcagctactgaaagttgtggattctggtaaggtaaagtctgaactaaataccagcaaaggagctgaaattataaggtcatacacaccaaagttgtctcgtatattcagggatgtaaacttacctgtggaaaaggaaaaggtggctttagtacaacgctccaatcagagaaatgaggtcctgtacactccagtccaagcgaaatctcagagatgggggcaagttgagtgcccagctcaatttctatctgcagaagacagttctcattatcaatctatatcgaagaatcacatgtatagtgcctctgtttccgagagaatgcatgaccccacagtgctgaagtctggcagatctttgcaacagcctaatgatgaccagaggaaagatcttaacagcatagaagaaaccttgctcactgaagaagtaaagcagcttcgttcacaggagttggggccctagggcggccgccctagtggctctatgcctagagccggccctggaccagctcttggg

SEQ ID NO: 38135 - DNA, 1533 bp, Zea Mays
caaaatgctgacgcggcacaccattaaatatgcatgaaacttacattgagaatagcctaataaaaactctggtacgaaatacacaaatgccatgttagtgttaatccaaaattaaaaaaaacacggatatgaaatgcacaaataccttgtttccgtacataaaaagccacatgcagaagaaaactaaaaggaaaaaatatagaaagacatagatcaaaattatcccaaaaggaaggacaaaatcgtaaaacgtgacaatctgatttgtgcattcctcctcccccaccttccacccttcgatcccacgtcttctcaacctttcttcttctctcctcgagaaccccaatccaaacccccaaccgccaaaattcctacgagatatatcacagaaatatcgtcttggctcagatcgtgcccgaggtgatccagatctctactggttcattttcctctcgtcgtaacctggtcccgttaccattacctgtttttggattgcatcagtgaggaggcagtgagttttgaggggacgcaggatcatggcgtcgtcgctggccgaggaggaggaggccttcgagcacacgcttctggtggtgcgcgaggtgtcagtgtacaagatcccgccgcgcaccaccagcggcggctacaagtgcggcgagtggctgcagtcggacaagatctggtccgggcgcctccgcgtggtgtcctgcggtgaccgctgcgagatccggctcgaggacccggccacgggggagctcttcgccgcctgcttcgtgctgccggggcagcgggagagcgccgtcgagaccgtgctcgactcctcccgctacttcgtgctccgcatcgaggacggcagggggaagcatgccttcgtcgggctcggcttcaacgagcgcaacgaagcattcgacttcaacgtcgccctctctgaccacgagaagtacgtcaagagggagcaggagaaggagaccacgggcgctggcggcgaggagactggcggcggtgagattgatatacatccggctgtcaatcgccgactcaagcaaaatctaccttcatctgctgaacccggacaaacaaagagcacaggagctggatgggcagcattctgacgatggatgcatgatctactgctactattggcatttgtttatctgaagaaggggaatgggtagttgaagcaccgaacaaggatctggaactgctggatgcctctacccctttcgaaactgaatggttaaaatgattgatcaacctaccagttccagttgtcacttgtcagtcgagaaataaacctttcccagagttgtattacccgtctcaccacatgaatggatgctcacattttctggatttagatacagcgtcccatcttgtttttatgttattcgtgctatgtttcacaaagcaataccagaatcatactgacctcgatgtgtattttgcggcgaaagattggaaatactgttacaagtgtgtcaaaagactgtttgcaatggtcttcaggcctgtttggattatgggactaacgttttg

SEQ ID NO: 38136 - DNA, 2966 bp, Zea Mays
ctgtcttccttccggcgtactgatgatttcgccgcgcaaccttcccatattaagcggcaacctccgctccgcctccccccccccaaaaggcagcagcaaaacccccattaaatccctctcctccccgatcgcaggccgatcgacggcggcgatggggcagagaatcgatatcaattggactgaggtgtttggcaagtcatcctcccccgaccgcgaggccgacgtctgcttcgcctccccctcgtcggcgtcggcagcaccgcggacgcgggcgcgggcgttgggcgccgcgaaggtgttaccgggcgacgagcggcggcgggggtccccagacagacaccaacggaagaggctcgggaagctgcgcatcgacgatgactggtccgtcggcgggcagcgccacaccgccgtgcatggggatgacggggcgcgccgaccacggacccgcggggccgccaaggctgcagatggtcgggtacaggatgctcattccgtttctaaggatgtgtatgatttcagtccagaagatgagcaggcggaacgtgtgggcaacagattctgttcgaggttaactcccattcaggaaaataaatactgccagttacctttgaataatctcaaaaggcaagggtgtgcggaaaaaaggaaacctatatcggtggacaagatgtactcagagtctgaccgaccaagttccacatcttcatctgcgaagaggactcatgccattgatccagaggtgtcagatcatgaaaaatgtcacaagactgaaagttcccatcccagtagattctctaagaggaggaaggaacaacttcagaattcatcttctgtgtaccctcgaaaggttcaagatgtggttctattggatgacgaagatatgcagcctgaggaagaagtaaactgtgacatgtctgacggacagaatggaccaaagatctactacccatcgagagataatcgggaatctgttgagctcagcagatctgatattaaatgtcttgatcctggagtatatttgtcatcaccagtgataaacttctacatccagtacattaaaaggaacagactgtctagtgaagattttagagacaaattttacatatttaacacatatttttatggaaagcttgaagaagcattgtgtcggcaggatgagttctcaaagttgagaagatggtggaaaggtgtcaatatattaaataaagcatacataatcttgccgatccatgggatggcgcactggagcttggtaatcatttgcattcctgcaaaagagagtatttcaggaccaatcatacttcatctggactccctagcgatgcatcccagtactaagatcttgaacacagttgagagataccttgaaaaagaatggtgccaattatcatcatgggaggattttaaaaataatatacataagcaaagcgttgaggttccacgacagaataatgagtatgactgtggcatcttcatgctttattatattgaacggtttataaaagaggctccagaaagattcacaattgataaacttgatatgtttaatcggagttggttcaaacctgaagaagcatctggtctaaggcggagaataagagagcttctgctggaagaatttgaaagtgccaagctggatgatgctttaccaggagcggatgcatctgagcgtgatgacagcataaatgatggagaattgaaaccagatgcatcttctgacagttcagaaatggtcgtagaggtggtaggagggttgggaggcactgacaagagcaatgaaggcatcaaggttgtagcatcagaagaggcaagtggagagtcaggagatgctggtaagagtaccgaaggtactgttgcagcatcagaagaaaagagtattgaaggcatcaatgttgcagaaccagaagatgcttgtgagagtataggaggcatctatgttgcagaatcagatgaagcaagtggggagtttggagagattggtaagaccaacaaaggcaccaaagttgcagtgtcagaaggagcaagtgtgtctggatacactgataagaatatggaagacatctctgactctgaggttgcagtattagacaaagctcccactagcagctacagacgtggagagaagaccacagcctgtgttctatcagaagcagcttcactttccgatagcgtcaaagatgaacaaggtatggtgaaaccagattctggcagctcaaaagctgagagagaaggagatttgattgtaattgcatcgccggaaagatcggaagggaatgatgagatcattggtagcatgccaattacagatgtagtttgtgacagctgcgacagcgacaccgagaccaagattttggtaatgatattttgaggttcctgtggccgtataccaagcacatagatgaccaggccaggcggtgatctcagtaaaccgaataggtagcgggtcgatgcatggcctgcttccccctgatctcgggcactaggctcctggaaagcagttttgggtaggcagttcattggcttgggcccgggacttgtaaagtgtacaggcgattggacgttattacgtatgttatggtgtttacattagaagatctgtgactgtgaacacctgccacaatttgagataatatgcgcgtaaggtcttgcgttttcctttttgttctgccccagagctgccaaacatgcatccttgttcttctccagccttgatatgatggcatttcttttgaccttggagtagagttatcgtgtgaatgaaggaagctattacagtacagtgcaaatttgcaacggcatgatacatgtctagctctctagccttggtgttcgtggaagtgacatggatgacactggcatggcagcagcattcattcgtgtgagttcgcatgaacaacacattcttgttaggccccgtttggttaggggtaactaaagtttagtgactaaattttagtcacttttag

SEQ ID NO: 38137 - DNA, 2419 bp, Zea Mays
atctctctctctctctgtctcccaccacctatcttccctccccatgtgggcggcctcgagctctgcttaggtctcacagctgtgctctcgttggttgggtgatccgccccttgtcggctcctttcaactcgagagctccgggacagcgagatctgcgctgtcgccgccttacctttcttacgagctcgcgtgcaggcaccttcagagatggattttttcacagagtatggcgaaggcagcaggtacaagatagaagaggtcataggcaaaggcagctacggcgtggtttgctctgccgtggacactcatactggcgaaaaggtcgctataaagaagataaacgacatcttcgagcatgtgtctgatgcgacgcggatactccgggagatcaagctgcttaggctcctgcggcatccggatattgtggaaataaagcatatcttgctccctccgtcgaggagggagttcagggatatatatgttgtctttgaactcatggagtctgatctgcaccaagttataaaggctaacgatgacttgaccccagagcattaccagtttttcttgtatcaattgcttcgaggattgaaatacatacatacagcttattgcagcaaatgtatttcatcgagatctcaaaccaaaaaatattctggcaaatgctgattgtaagctcaaaatatgtgactttggcttagcaagagtagctttcaatgatactccaaccgccatcttttggacggattatgttgcaactaggtggtaccgagcaccagagttgtgtggatctttcttctccaagtatacaccggcgatagatatatggagtattggctgtatatttgcagaattgttaactggaaaacctcttttcccggggaaaaatgtggtacatcaacttgatataattacagatctccttggaacaccttctcccgaagcaatatcaaggattcgtaatgaaaaggccaggcgctacttgagcagtatgaggcgaaaaaagcctataccgtttacgcaaaagttcccaaatgcagatccacttgcactatgtttgttagagcgaatgctcgcttttgagccaaaagacaggccaagtgctgaagaggctcttgctgatccttatttcaagaatatagccagtgtggatagagagccttctgcacaggctgtcacaaagcttgaatttgaattcgagaggcggagagttacaaaggaagacataagggagcttatatatagggaaattcttgagtatcatccaaagatgctgagggagtttcttgagggaactgagtcaagtggtttcatgtacccaagtgcagtagatcattttaaaaagcagtttgcataccttgaagaacattatgccaagggatctacaggaactccacctgagaggcaacataattcattgccgcggccgtctgttgtctattccgacaaccgatcacaaaccacagccaacatcaccgaggatctttccaagtgtatgctcagagaaaatacacagaagacacatccatattctgcttctgttgcaagtaaatttccaccacatgttcctcaaggtgatgttgcaaggcctggtaaagcagttggttcggtgatgcagtacagcccatgtccagcgcctgctgccgagcgatatgagcaacgaagaatcgctaggcacccagcagttgccccaaacaatatcccttctggaagctcataccccagaagaagccagacctgcaagagtgagacaggtgatgccgaaagccatatggatgcgaaccaagctcggcagccaaagccatatgcagcgaacaaactacctgctaccgttgatagtcgtggtggtcactggtaggatttctgcggtgcaccagaaagccattccaaaccgtttcttaacatgttatcagtatcgattacttctgctgagtgctacattattctgacaaatccagaaatgtagttctgtacagatttgtgttctttttccggatacctgaataccgaaagactgtacaactgtagtttctgattcctactccttgtcgctattcaatcgctaaaggatctgtccctggtggagaagaaccggcagattcaatgcaatgttcttgactgacgtcatggattttgttcttcaacctggtagctctgaagacgaattgaatagctgctagtttctgctaatcatctacagtcaggtgcagagtgttctgggagctagttctgaatatcactgtcacgctgtaatctgcacgtttctgagctcctaacttctaagcatgccactaccgtatccctttgtaatttaatcagctgtaccatccagtactctgtttacatttgtagaaacgctctgcaaagaagctattatgtgggagtttctttgctattattataaatgttctgttgttataaa

SEQ ID NO: 38138 - DNA, 2729 bp, Zea Mays
cacgctttgatcgcttcttttttctctccatcatttctccccgtttcgtctcgcttcttttctgtcgcctcccgtttcgtctatctccggccggcctttctgctgcaaggaaaccaatattgtttgctggatctttcaaaaagggaaaccgaattcccgagagcgagcagcagggaatctctgctgaatccgtaggctccgaattggagctggaagtgtagtgatttcctgattggggacataaggtggggtttgtccctactccccagtgagctccacgcggtccctgctgttcttccagtcaaaattctgtacccttcggtgctggggtcaaggaactaggcgtgttgtcctgaactcttgattcctgcttcatggaaattgtatatgtttttctctgaattcaaaatcgtccctattctcccaaagctttctgaggaagaaggatattgtccctctccaaaactataaacatgggttggttgagtaaaatatttaaaggtccagtaaatagagtttcaagaggacactacaacgggaactcccatgaaggctattcagctcagcacactaaatcatatgtactgctcagttgcagcttatcctcttaatctttatctttactggtgcaaattagttaatttaagtagaacctaatataaaaaatgaagaaaagaatcatagtgcactgaaatgtgcccccaatattatatactatgagttgcttagtgcacttgccgtatttgtttacttaatttgaaatgggtccttccctatttctaataaataatttttattaaagtatattgttggcatgcctgcctggaaaaatataagtagtgaacaacttaccaatctgtgcttgactaatgaggatccacagtattttttaatgtatatcaggactcacaacaggttgcatgttcctcagtcggagaggaaaggagtagcactggatgtgctttttgcatacttaaccgttccctgcttttttactgtataattaaaatttaatgtagggtgtgcatggcaatgaggacgaagacatggatcatgctattgcattatccttatcagaggaagatcaaaggaagggaaagaccattgataccgggcatcatttagatgaagatgaacagattgcacaggctctgcaagaaaatattggtcataacctagctgaagacgaacagcttgcacgggctctgcaagaaagtatgaatgatggacctcctcgtcagcacattccagttgaagatgttaactcagaaagtactccagcaagcatcttgccctcaaatattttccgcacaagtggcttgagggtttgtgctggatgcagaagtccaattggccgcggtcggtttctcagttgtatggactctgtttggcatcccgagtgcttcaggtgttatgcttgtgatagaccaatatcagagtatgagtttgctgttcatgaaaaccatgcctaccacaggccctgctacaaggagcgtttccatcctaaatgtgatgtttgcagtagctttattcccacagataaaaatggcctcattgaataccgggcccatcctttttggatgcagaagtattgtccttcccatgaaaatgatggtacacctaggtgctgcagttgtgaacgaatggagccaaaggacagtcaatacataacattagatgatggccggagactctgcttggagtgtctgcatactgctattatggagaccaatgaatgccagccactgtacattgatattcaagaattttatgagggtatgaacatgaaagtagagcaacaagttcccttgcttttggttgagcgacaagctttaaatgaagccatggaagcagagaaatctgtgcaccaccttcctgaaacaagaggcctctgcctatctgaggagcagattgtcagaactatattgaaaggaccaattggaccaggcaacagaatcatagatatggtcacaggaccatacaaactcattagacggtgtgaagtgactgcaattcttatactgtacgggctgccaaggctgctaactggctcgattctggctcatgagatgatgcatgcttacctccgacttaaaggataccgaaccctgagtccagaggttgaagaaggcatctgtcaggttctagctcatctttggcttgagtcagaaatcacatcaggttctggtagcatgtcaaccacctcagatgcgtcatcgtcatcttcaacatcttcatcatcgaaaaagggcgcaaagacggaatttgaaaaaagactcggggagttcttcaagtaccaaattgaaacagattcttctgtcgcttatggagatgggtttcgagcaggcatgcgagccattgagcggtacggcttgagaagcacccttgatcatatcaagatgacggggtcttttccatgctgaagctggtttttttttacctcggcttggatatgggtatacatattttttttggagaacttttggttcaggttatacatacgaaaagccgaacttctgtgtcgagaagaggcataaggatttagctatactgtccattgcaggaaaaaaaactgtttcccttttcaattataaaatttcacagtgcagacatgaaggtatgtggtctttagcttggccaaccttgtggaatgctgtcacttgatgcaaaagaaatttcgaatacatatgctttgctgtgcttgaaatgcaatggttggatgctatgct

SEQ ID NO: 38139 - DNA, 1856 bp, Zea Mays
atggatctggaacacaatatccatactcctttatctccttatgctgctcagaaatatcaaacttttcatgagcttgtcaataaccttcagaattctagagctgataaagacaaatggacccatccgtggggcaactctactttcagctcatccaagttctatagccttacttttcaatcaattcagccccctgctgcctttaactggatttggcagtctaaggctgtacagactgctgaagttatgtgggtttccattggaatcatgagcttgacttcttctcgataattcaagacgccaaggatgcctttggccacaattttttcatggaaattctggccctggtggtatggtgcatttggaagtggaggaatgacttcatctttaggaatgaggctccttttccttcttggcgatgctgcttcaacgatatgttgaaattgcaaacgttgagatttaacccctcttaaatctagactgctgttttgggtaaattatcgatagcttctttcatgttttctttgactccacctttaatttctcttttttaaagttttaataaaagtgtgttgtaggggtttcccctacagccttttcccctcaaaaaaactatcgtcccatattataactattgttcaaacatacatctttattgtaactattgttcgaacatacaacaatattgtaacttatgttcgaacatcacacatgacttcctagttagaataggactatatcaagggtcaacttgagcctttcctttactttggtgatggatgagatcataagagacgacaagagaatatcccttggtacatgttttttgcgaatgatgtagtgctagttgatgaaaaccagacaggaataaataggaaatagagttgtggcaggagactagagtcaaaaggttatagattcagtagaactaaaactgaatacatgatatgtggcttcggcactactacatatgagatgcgacttcggcactactacatatgagaaggagatgttagtttggaagttcaagcagtgtctatgaaggatacctttcattatttaggatcaatgctcaaagacgtgtatattgatgaagatgttagccctagaatcaaagtagagtggatgaagtggtgtcaagcatttggcgttctttatgacaagagggtaccacacaagctaaaaggcaagttttataggacagcgcttagacctgctatgttgtacggtgtagaatattgacctacaaaaaagacatgttcagcatatgagtgttacagaaatgtgtatgtcgcgctggatttatagacatacaaaaagggatggagtccagaacgatgatatacgtgataggatagaggtagcaccaattgaagaaaagcttgtccaatatcggttgagatggtttggacatgtcaaatagaaacctccaaagacatcagtgtgtagtgggggtcctaaagcaacaccagtgagtagtgagatcctaaatcatgatagtagtgggaagagagataggagaagaccaaagttgatgtaggaagagacattaaaaggagacttgaaatgatggaatatacccaaagattttgccttgaataaagtgcctggaaaacagctatccatgtgttcgaaccttaaattgtgggttttgttgggtacttgggtttcaactctagcctgcccaactttcttgagactaaaaggttttgttgatttacagcatagcaaccacctgttaaaattcatatagaactcaagccaattctagctaactagacatgcaactaagatcctcatagataacagcgccaagccgccaacagcatgtacccattagcgtttgccatgatataaag

SEQ ID NO: 38140 - DNA, 1934 bp, Zea Mays
ccgtgtcttcttccttccatccctaaaaactgccctccgctcgcgcgacacggaccatgcatcccgattactatctgccgagccgaccagcggcaccagaacccacaaggttcactcatggcgcccacgtccatgctcccgttcgcgccctccaatacgtcgctgccctattcctcccgcgccacaactgccgccgcgttcgctcctcgtgggctccaccacgccgcggccggaaggagcggcggcggccaacggctcgcgtgcgctgcgcctcggcgccgccgcggagggggtcttgtggtcagggcgtcggccgactactacgcgacgctgggcgtgccgcgcgccgccagtaacagagacatcaaggccgcgtaccggaagctcgcgcgccagtatcatcctgatgtcaataaggagcctggagcgactgaaaagtttaaagagataagtgcagcatatgagatgaaaagaagagggcgttgtatgaccaatatggtgaagctggtgttaagagtgcagttggaggctccggtggagcttacacaaccaatccatttgatctgtttgagacattttttggagcaagcatgggtggtttttctggcatggaccagagcgcgtttaggacaagcaggcgaagcactgctatacagggtgaagacatcagatatgatgtgattctggggttcacagaggcgatatttggaacagagaaagatattatattatctcatttggaaacatgtgatacatgtggtggttctggatcaaaggctggctccaagatgagaatatgttccacatgtggtgggcgagggcaagtaatgcgaactgagcaaacaccatttggtctgttctcccaggtttctatttgccccacttgtgcaggagagggcgaagtcatttcagagtattgcaggaaatgttctggagaggggcgtatccgtgtcagaaaggagatcaaagtaaaaatccctccaggagtgagcaaaggcagtactcttcgtgtacgtggggaaggtgatgctggaccaaaaggtgggcctcctggagatctctttgtttgccttgatatagaggagccatcagatatcaagagggatggtataaacttgtattcaactgtgtcaataagctatcttgaagctattttgggcactgttatgcaagtcagaactgttgatggaaccagtgaccttcgaatacctccaggtatccaacctggtgatgtaattgtcttagcgaagcaaggagttccatcattgaataagccgtctatacgtggtgatcatctcttcactgttaaagtcgcaataccgaagcgcataagtgggcgtgaaagagaattacttgaggaacttgcatctttgagtaatggtcgctttgcacgaacagacactaagccaaaacctgcccagccaaaagccatacatcaagagaaagaagttggtgctagtcaagaagatacaagcaaatctaaagaagcagagggtgactggttgaagaaacttacagattttgctgggtccattgttaatggcgctgcgaagtggctgaacgacaacctgtaggctgtaaatatttactgcaggatagaagattgtcttacatggtgctgtagtccaatcaaagttcttagattcattgggggtccccacgagctcgtatattcgttttattggagagctgcaagattttcaggctgagtggcaaccgagggagtgaaagttgtcaactaatatcgtcgcggcgttggtcccttgtcattcttgccaagcaattatttttatgtagttggagtccttttcagtctggcaagcggcgtagaagtctgaagctgtgggatgctgatcccaaaccccgggactagacaaacactgtacttgaggttttggattaatcaaattcaccgatatcgaattgcaaactta

SEQ ID NO: 38141 - DNA, 1891 bp, Zea Mays
cttttcttccctctctgtttcggctgttcgtttcgactgttcatttgcatccacgagcgccgtggagggaggggatgggatggcagcagtgagctcggtctgtgtcctgcctctcgcgccgctgagccagtgagccgtgctgctaggaatgtgttgtagggaggagggaaaagggcttcgagtactccgcaactcgcgaggtatggactgcggcgcggacgccctgctgctgctgccatggccggggatgcggagttgcctctcgaagaggcggaggccgcgatgagatccgccgacgacgacagcgtcacggccacggtggtcaatatgtaccacttttaatatttgatggaccagttaacaaaagctttacctgatcgaatcctaaaatgacttacatttggcataggatgcattagttactagttagagcagctggcacctcccttcgtcaataaaccatatttcctgtacgaggctggccgttgtcatgtttatgttcctcatgtgaaatctgatcatacaactgatcttatctacttagatgatactgcacacagctgtcatgtttatgttcctcatgtgaaatccgaccttatagctgatcacctatgctatgtatctaccatatttagatgatactgtatacttaagttagtctttgcctagctactctgtccgctcgaattaattttatgcacattatgtgtgctgcttatgctaataatgctcttaagatgcatgtgtcttactgtcttcaacatgtccttttctcaggttttatgtcattatgaagactggttagctccttgcttttgttaggtctgttcaaattagcctgatttcttctcatttattcaagtttgtgagtaacaagttattgtacaacagatgcttcgtaaattctatgtcgcacttgaaccacatcgtgcttcaatctgaatcttgcagtaataacatgttttgatcagttgcgtttctggggtgttcatatatggtgcctttcacaccaaaaggtgatagggctgttactggtgttggggggatgaacacctcggcactttggatgaatttgatattattaacatcaaatctgcctgaattgttgtgcaatatacactaataactctgaaactgaaatcttgtatcttatatttctctgttgcttgcatgttgaaactggggctggttaggcattgacttctggatagggaccttggaaacagaagctacatctacatttaatattatataaatttctgtttgttattcttctagaagagcaaaatatcttgatcgttcctttgtgaattgtgccaagtgagctgtgaggatatatagagaaggtgggaatggactggctaccttgcctacctattgctggactatggtctatggagtttggagtatggacatttgcagcctccgcatagcctggtgattgggaatggacatgttttttaaagatgtgtcttgtatcgattatttttcttctaaaatgaagttgatggtgttgaaattgcttcatcgactttggaatagcagaggctgtgggctgtggctagaccacaaggaatggggaggaagcttcttgtcagctctccctttcttcgcagacaaggagttatgtatcgtgtattcatgactgattgagcatgacagcatctgaagtttctttgttcgttgtgtagatctgacctatctacccctgacgtggagcacatgccaaactttattgacttttggaatctggctattttgttcctgtacatgtgaaggtcaattggtctggggtttttaaaatacagtaattggtttacgggtttttttgtttaaccagaaaatgtgccgtataattaagggaaaaaaataatataatagcttaaggaga

SEQ ID NO: 38142 - DNA, 3897 bp, Zea Mays
ctctctctcctcagccccagtcgaggagacgccgctgcggctctcgtcccatgttccaatgattgttaggtgattgagacttgagagggtctggaggctaccaactggtttggtggctcggccaagccgagcggttccacgctgttcttgccgcctggtgccggagtttctatgtcgaaggctgtgttcggagtttctgcgttgaaggcggtgttctgctgattggagaaactggtttggtgcggatgtttgatgccgtgttggttatagggaccgggagggtgggtgctggcatgaatttggttttctgtcgattcaattggtgcttaatttgagcctttggaggctttttgggatcagggagttggtctccgtcgaaggaggctgctagcttgcaggctcatcgccattggcgccggacctgcctgtcgtacggtctttcctgtgccgaagtttttgctgctgtgaaaacgctttaagcgattacctttggcgacctttccatgcaaaggcttgaccttttgggttccggaactgattggtggtcgaggagtcttggagtgctggtctacctgcattatcaacagggcatttctgcagaacaaaagttgtatcctgtgcagatagccagatactgctttgctagtgtattaaattgcttcttgtgtttgaacaaagattctattcagccagaagacagtgctcttctttatatcctgtccggagctcaatacagtgctccaaatccatatcagcctgctaggagtggataaggatctttgcctcaacgagtggagcaaaaccatggatgtgcctacgcctcccaaccgtgccggctgcaacagtaacatcagcaacatcggcagccccatgcaatcttttgatgatccctttggtggtgctgccatgacgagctttgatggatactcggagctcagcagcccatcagttgctgatcacatattctccctgctgaatgatccctcgtctgtgcaacatatgtttgccttgtggtcatcttcggggtcatctccgcgtgcttctgctgtgagagaagacatgtcgtttgacacctatcctggacctatggacgtgacagcatcacttgctcaaaggatcaactcagcatcagtattcaatccaactgaagtggacagaggactaaaagactcagatgggcttgttccaaataatggttcacaacaagggagtagcatcattccgaggtcggttggcaacattcttgcagacaggatgctcatggcgctatctttgttcaggaagtcattgagcgatggtgttcttgcccaagtctggatgcctgttgagcacaatggtcgtgtcgtgttgagtacatccgagcagccctatttacttgaccaggatcttgcaggttacagagaagtttctagaaatttcttgttttcagttaaggaggagcctggtctgcacctagggcttccagggagggtcttcatatctggggtgccagagtggacctcaagtgttacgtattacagtaagccagagtatttgagaatggagcatgctcttcttcatgaaatacgagggtcacttgctatgccagtttatgatcccagcaagggttcttgttgtgcagttcttgaacttgtcacaaacaaggagaaacctgattttgatgcagagatggacattggtgtgaacttgcagacaacaacagatcgcagcaatcagaaggtttactctgaaaatcagaaatatgcttctacagagattttggatgttctaagagctatttgccatgcacatatgcttcctttggcccttacatggatccctacatcaaacggcaccgctaatggtttttgtgtcgcaaagaatatcaggcttgattcgcaaccaggaaaatcagtacttcgtatccatgaatcagcttgttatgttaacgatgcaaagatgcagggatttcttcatgcatgtgctgaacgtcatcttgagaaagggcagggtattgcaggccgagcccttaaatctaatcttccattcttttcgcctgatataagagagtacagtatcgaagactacccgcttgcacaccatgctcgtaagtttggtctgcatgctgctgtagccatccgactgaggagtacgtacactggtaaggatgactacatactagaattctttctcccagtcaactgcaagggctgtggagagcagcagatgttattaaacagcctttccagcacaatgcaaagaatatgcaaaagcttgcgaacagtttctgaagcagagaccgatagtgttagtgctactgaaccaatgtatgagaagactaatggaagttgtttaccaactggtaactctgaaagttcctcacatgatgaccagccaatcacagaatctgcattccatgatctatcttcgggtgacaaacaaggagacagagaacctgctaaggcacggagtagctcaaagcgagttgcagagaaaaaacgcagtacatctgaaaagaattttagtctggatgttcttcgcaaatacttttctgggagcctcagggatgctgcaatgagccttggcgtttgtccaacaactttgaaacgaatatgcagacaacatggaatttccagatggccatctcgaaagataaacaaggtcaaccgttcactgaagaagatcgagaaggtcatcaaatcggttcatggtgtggacagatccttgcagtacgatcctgccactggatctcttgttccagcaacctcccttccggataagatgcctacctcatctgcgggcgtaaaaacagtggaggaaaaatctagcccagaaccaggacaggatttctcttcgcctgatggatggcaaagagaaagtagccaacttcatgcctccagtatacctacaagggtaggtgatgaagtccaaatgctggcaatcaacaacgaaggcagcaggaactatgcttctggtatcgcaaatatcgcgcagcattcaaactccgaagacgcacacggtcctttatatcccgtcggtgctgttaattcttcgcgtaccggagaaacaggctacatcgattctccaacctccctccacatggatagcgtcgaaggccaaacaacggtgagggactcaagatctgtacagcaagcagatgtcaccatggccaccaaggagcagacccttccctccacctctggcacaaccgattcttcgagcggcagcgcctcaagtcagcctgctttcaaggggaacccaggacgtgccctcaaagttagcagcagcgatgcactgacggtgaaagctacctgtaacggcgacaccgtgcggttcaagttcctgccggcaatgggctggtaccacctgctggaagaggtagcgaagaggtttaagctggcgacaggagcgttccagctcaaatacaaggacgacgaggacgagtgggtgatcctggcgaacgacgccgacctccaggagtgcgtggacgtcctggactcgatcggctcgcgcagcgtgaagctgcagattctctttcttacaaacttgctagtcgtgaagcctcgttgtgacatggcactaccatctaggtgctcccatgagatgttaggcaaaaaccagggagagaaggttggtggtacctctagagggcggcacaacaacatgtggaggggcatcggctctaggggtgttgtagcgggatggcatagggtcgagtgggagatgcataaaaaaggaatggagatcaggagggcgcaaggaaggaggcgtgggcaacgagtgagggtgacacaacaagaagcaagggatagggatcgggagggctcaaggaagatgtgggtggtgatggtgaaggaagaaggaattgtgggcgatgaatgtttcgatgggttggatcgagggataggacaattgtag

SEQ ID NO: 38143 - DNA, 2409 bp, Zea Mays
aagcgtgggcctaccaaccacacatgtcaattctcggaatttctcagaagattggagacgggcgttctcttttcatttggagttttggactagtcgaactgacgaactggcagagcgttcaggatagacatggctgccacctttgccttcatccctctcctgctactggtctgcgtccagagcgcggctcctgttctcggcttcacaaggagcgagttccctgaagatttcgtcttcggatccgctacctcggcttatcagtatgagggtgctgttggtgaggatggtaggagcccaagcatctgggacaccttcactcacgcagggagaatgccggacaaaagcaatggtgatgtagccgccgacgggtacaacaagtacaagtttgttgggctgacgtactgtcacttctgagatcagcatgctgaatttttcagcatatggaaaggagcattcttgatctgtttcttgctttgatcttaaccatctaatgttttaggacgatgttaagctcataattgacaataacctggaggcatataggttctctatctcctggtccagacttataccaaatggaagaggtgctattaatccaaaagggatagagtactataacaatctcatagacgagctagttacacatggtgtccaagtccatgttatgatttaccagctggatctccctcagatcctggaagacgagtatggtggatggttaagtccaatgggaggatttcacggcatatgcagatgtgtgcttcagggagttcggtgacagggtttcacactggaccactctggatgaagtcaatgtggctgcaattgggtcctatgataatggacaaattgcaccgggaagatgttctgatccatttggaacaaaaaaatgtacagtggggaactcaagtgtggagccatatatagcagctcataacatgctactggcacatgcatcagctaccagactgtacagagaaaaataccaagctgtgcaaaaaggagttgttggtataaatatatatacaatgtggtcatacccactaacaaactccactgccgatttagaagcaactcaaagatttctggacttctattccggctggatactagaaccattggtgtttggagattatccaagcgtaatgaagaagaatgttggttctcgccttccgtcattcagtaaagttcaatctgaagccattcgtggcactctagatttcattggaataaaccactattattctttctatgtgaacgaccgccctttagaaaaaggcatccgtgacttctcactggacattgctgctgactatagaggtaaaacagtttgtcactcgatacatgattatccttttattgcttgcaattctttagatacattccctgggacttctgattcatttatctagagtcacacacacaatggcctacagaagttcaaaacggtgtcacatggaccaaataatttgatgatacttctgaaacatattcgcaattttatgaaacctacaagctaaatgctgtatataacaaaacaattatctgaaacaggttcgagaactgatccgccaataggtcaggtaaggtttttcatcaacaatcttcagaaattcgacatgatagatacatcccttttattttactgcagcatgccccaacatctattcccgctgatcccagaggattgcaacttttggtagagtacctgagtgaagcctatgggaaccttcccatctatatccaagagacaggttatgcaaccacaaacggcagcctccatgatactgacagggttgattacatgaagacccacataagcagcacattggctgctctaaggaatggggctaatgtgaaaggctacttcgcgtggtgcttcctggacgtcttcgagtacctgtcagggttcatgtcgcaatacggcctgtaccgtgttgatttcgaggacgaggcgctaccaaggcaagcaaggctatctgctcgctggtattctaaattcctagagaacaaggggatccatgtagaggacgagcttgatgatgcgggatcacacgttgagcaataagttttctacagcgacacattgatctgtacatcctctagcgagactattgaatactactgtgcgttgcaataagaacacttatattaaaaaaacaaattccatcaaaacctctgtccaggactccaggtaaacaccaccacaatattagggacacggtcctgccagaacaagggaccgtttgtacaactcaagcccatatctgctagagtgtgaggagaaatttcattatttgggtcttaattcggcttcctgtgatctttagggcctgttcgtttttcacggattcaagccctggaatagttcctagccggattacttctctaatttatataaattttgat

SEQ ID NO: 38144 - DNA, 3330 bp, Zea Mays
agtagacacccaaacccgagaagagaagtgagaaccctcccaaacaagccaaagccagcaaagccaaaaggaggaagacgcaccaggacattgacgagccgcagtccgcggcagcaggtccagcttcatcccccggagccccagcactggggttggcaggcaggctcgctcgccaccgccgcgtgaagcgaagcgcgcgcccccgcggacgctgacgctgggacccgcctgctgggggctgggagtgggcccgcccccctgatgggcgcctgcgcgccggcggcgaggggaagcgtgaggacgaggagcgccggcgggctccgcgcgaagcaggccgggcaagcgagccaccgcgccgcctagtgagggcgctcgccgcccgtctttgcttgttgccttgttgggttgctcgcacgtcctgttccagttccaggccagagagagcggggcccggggctgcaggcggcggcccgcggaggagctagggttctctctcccactcccccctgcgtcgccaggatggcggttggggacgcgctgcgccggctctgcgaggaggtcggctggtcctacgccgtcttctggaaggccatcggcgccgccgaccctgtgttgttgctgagatgaatcatcagtttgcagctggcattcagactattgcaattattcccgtgttaccacgaggtgtactgcagctaggcgctacaagtgtggtagtggaaaataccaaccttgtgctccagtataagaagctgtgttctcagctgaacaatcggtcgagtatggcttcatcgtcatctgttaaaaacgatttgaaccctaaagttcagtcacaccctttgaatggtcccacaagtatataccctgcagatacgcgctcaaagttttttagtggatccccaatgtcatatcaacagtgttatggtcctgatggcacaactgtgtctagtagtatattgacaaacatgggcagtaatgcttcaatgctcatggttgcacagagaaatgctcaagtgggtaaagaacacattctatatgcccctgacatgaggttcagactgcaaaacccttactgtgacaggagagttgagagtaacacccaaagtagtgttgtgagctctggttttatctcgtcgatctcagcatcaatggaaagacatccatggatgaccaacagtcaacagttagaacaaggaaacactggagaaccatcagatctcagaaatgttctcttgaaatctcttgcataccgtcaccctttgttcaatgacaacacaaacatggttttagtgcatggcaaaggccaggtgccaggttttgttaatggtcatgggggttttgattttctcccagaaggtactatggtattcaagggtaacctgtatggcagcacagcaaatcaaattttagaccaaagatgcagttctacttctgagatgtcagggcacagaccaactatttcatacaaaatgccccaatctacccaatgtgttaggaaaacagagtctccaaagagagagacatgcgaaacttctgctgctctgtcatctggctctgatattcaggtttctggtggcctgaaaacagtcatttctcaagagaataatatgagtagctcagatcttattagcccaaaaaaacccaatgaagtgcatgcccctactggtgcaattgttaaagctgtcaagaatatggatagccgcaggctcccagacatatctaatgagagatcacctccgcttcgtatggatgctgctgcagaaagtgatttgtttgacatgtttgattctgaagttcatcatttgtgccgcaatgtggataatgatcttacctgtaaagctgcaaaacccgagaattcaaatagagatgtacctgaatcctctgttcgtcttggttcctcttcatctttcaattcagtggatgacaagttcccttattctgggatcttctcactaaccgataccgaccaacttttggatgcggttgtctccaatgtcaatcctggtggcaagcagatctctggtgacagtacttcttgcaagacttcagcggcagatattcctaccacttcgtattgtcgcttaaaagaaccaaagcagtccgaatcatcttcacctttgctaatcaagaatgagttagccgtttcaaattttgtcaaacagtcatctttccaagaaaaggcagaggatggctgtctttctcaaaataatgcaatacagaagtctcagatacgcctctggatagagaacggacagaacatgaaatgtgaaagtgcctcagcctcaaacagtaagggcgttgatatgtcaagcaaggcaagtcgaaagaggtctcgaccaggagagaatcctaagccacgaccaaaggaccgccagcttattcaggatcgtataaaggagctccgggaactcgtacctaatggggcaaagtattgatgcattactggagaagaccattaagcacatgcttttcttgcaaagtgtgacaaagcatgcagataacctcaaggactcaaacaaatctgatattcttggtggtgagaatggtccactcaaagactacttcgaaggtggtgcaacttgggccttggatgttggtagtcgatctatgacgtgcccaatcattgtcgaggatctcgagcggcctcgtcagatgcttgtggagatgctttgtgaggatagaggtatcttcttggagatagctgacttcattaaaggactaggattaaccatcttaaggggcgttatggaagcacgcaaaaataaaatctgggcacggttcactgttgaggccaacagaaatgtgactagaatggaaatcttcctttccctaatgcgcatgctggaaccgagttgtggagcaggagagaattctaataacaacataaaaatgcctcttgggattgtgcagtatcccataatccctgcgacaggtcatcttaggtgagccagccagcacaaagataacaggatgcatctttgaaatgctaagagcggggggaggtccacccacttctgccatgactagcattgccaacccaggacgagctggaatctcgtgacatgcggtgcatcgtccctgcagtgtgcattcggaaagcctaacagtagacgggaacatcgacatggatagttggttcgccggatgatcgacgttttgactgtaatcttagtttatgtttgttgctgatgctttagccttttgttagtctgcatattagtgagtgaattttgttatgttctgctgctgaatggaaattctgagttgaattgtaggccttgttttggtactgactcgaactcggagttctctgttttgaatggtcggggt

SEQ ID NO: 38145 - DNA, 1346 bp, Zea Mays
cggccggcggcggcgaagggagagatttctactcaaggctatcaaattctttatcttcagtttcagactgttatttgtgacgtcaagatggttaatttcggaaagaaattgatggccgatcaagtggaagaatggaaaggatactacatcaattacaagctgatgaagaaaatgttaaagcaatatgtccaacagacccagcatggtgggaaagatcgtgaacaagttcttaaagagttttcaaggattcttgatgaccagattgaaagaatcgtgctttttctgctacaacaacaaggccatcttgccagtaggattgaggaattgggagaaaaacgctctgctctggaagagtatgacatatcacaagtttatcagctacatgatgcatacagagaagtcgggcttgatcttataaagcttctccgctttgttgacgtgaatgctaccggtatacgcaagatactaaagaaatttgataaacgctttggctacaagttcactgattattatgtcaccactcgcgcaaatcatccttattctcagcttcagcaagtctttaagcaagtgggaattgtagctgttgtaggtgcattatcgcgcaaccttgaatatctgcaacatcatgaaggaagctttgtatccatctatgatcgtccagcagttactttgaaggcccagctgttgatatacttcatgctcaagtacgcaatggagatactactctcagaatcaagcgttgtcaccacatactattttagctggtctactagttctgtggctatctttctagcgattcttggattaacggttcttccagtaaatgcaatcgttggaagctacattacgaacttgtttgaggataggcaaattttgctggcatctgaagtcatggttctcattggtataatcatgagctttcgtttcacacctcactactccattccgcaatatgtcatttcagctctcatcacatttgtattttctgaggtgcttgaaggagtgaatctgtccttgctttcacgagtgatgtcgtcaaggctttcccgagggacctacaatggtggactcctttcaacagaggccgggacgttggcccgtgtagttgcagacgccaccattactgcagccggttatctaggcacggacctccttctcaatgtcactcttctgccacctcttgtgatctgcatagtctccatcgcagcaacactctacacttacaacaatctctactgaagaagcatgtctcttgtagctgtacaagtgtatagcaatgttcctaagctaaaacgattcctgcccagaatgggtttgtatatctgttcgagcatggtttgtaaaca

SEQ ID NO: 38146 - DNA, 3086 bp, Zea Mays
atggcggtagcgccggtggtgcgccagcagagccttacagagggattgatttcctgtaggactgatgttcaatgtttgcatagatggcagaaggttttgaaccctgagcttgttaaagggccttggtcgaaagaagaagatgagatcattactcagatggtaaataaacttgggccaaagaaatggtcgaccattgcccaagctcttcctggacgtattggaaagcaatgtcgggaaagatggcacaaccatcttaatcctgggatcaataaggacgcatggacacaagacgaggaaatcaggctcatccatgctcatcaaacttatggaaacaaatgggctgaattgacaaagtttttaccaggaaggacagacaatgcaattaaaaatcattggcacagctcggtgaagaagaaagttgattcatacagatcatctggtttactggctcaatcccagggcttcacacctgttgaatacactgctggtggtttaaatgttgattcttcatctgcaataaccaatcaaattagcgaaggcagtggttttaatgtttttcgggaggctgaagattcgatggagttaagtcagtcttcgtttgccaagggttcttgctctcaggaggagcaaaatgatgtgactttgggatctcatttgcatgtgcatgaatctttgtgtccagatggttccactaatgatggcaatggtgcttctggtttacctgacattcatcaccgcttatgcacttctgacatggatcaagataaacacttgcaggaaggaatggatttggataaacacttgcagcatgaattctctcaaggaacggatttgcatcttgatgtagatgaagtgccaaacaactttgtgataaaaggtagccagtcatctaatgagcttgcagttcaatttcatgacacagagattatgaatagttcaaaaaatgatggagtgtctttggtaccacatgctataacaccatgtgttcccatcttacctagtgtttctggatgtgtgcataacataaatgtgatatacgaaatgggcataaaaaatgataattgtttccaatctgaaaagtgccaggatatttccattcaatcaggtgcatactcgtctgaagctgcaggcagctttttagcaccactttacccattgcagacatctgaaccagcaataatgatgggtggccctgtgtactatcagagttctgtaatgtcattaccaccaggctttatttcttctgatggtgcttctaatgcatctggtgtcaaatctgagacaagttactatcctgtttctcgccaaaatttggagattaaaacttgccacaatgcttctggtgatcctgaacaaaattcatatattagcagcgaagatgacagaaacaagacttctgaacctatgggcagaatatcagaatctgaaaagaaacagcaagttgatgttgaacaatcatgtttggagcctgcagcctgcattggaaaggaagcattatctagtcatggtgacaccatattaagtaaaaaggaggatgctggagctctatgctatgaacctccttgctttcggagttttgaatttccctttgtcagctgtgagcttgtaaactccagcgatctcccagaatatagtcctcttggcattcgagagttgatgaggacatccttgaacttccctaccccagtaagattgtggggctcccctactagggatggtagccctgatgctgtgctaaagaatgctgccaaaagattcatgtgcaccccgtccataatgaaaaaaaggcacagagatcttttatctccagtttctgatataagaactgacaagaaaccaaatactgaaagggattttatgagctcaggcatatcctctacaagagttgggaaatcttgcatggatagcgctgatgattcagctgatttagtttcaccgaaagagagtgcatttcaaaagaagctgaagctttgtcacgaaaacaaagaaaatttgaatgaaattgctgatcaaggagaaaatgaagccaatgcaaagcattcttcagggattcttactccgagcagtgttgacaaccataatacacataagcatggtccaaattttcgaattcaggagctaaataccactgtacaggctttgtctaactctaaagacataatattttctagatcaaagccatcagaacatgttgaaaaatctgcagcctgcattgatgcagattacgagtatttgaacatattggctgatactccaggtattaaaagaggcttagaatctccttctgcctggaagtctcctgtgttcacaccattccaggatgcatacttcatgagcccagcaagcagagcttttgatgccttaggattggtgaagcagattaatgagcagagtgcttctgctgtggaggaagcacatgaagttctggcaaatggaagcccatggaaacaacataacaaggaaaactctgacaaagaaaatatagaaaatacagctttgaagcatgagcatgtcacaagcaaacctccatcgatactcatggtagaggcacgggtgctcgatttcaatgaatgctccacacctgtgaggaagaaagacgataagaaagtggaaatagttttaggaggacctgcaacatcccctgttacttcctcgcatctttggataaatatgcggtagccctttgaggttgcgacatcgcctggcgctggttgcaagtcaccatgggcagcatgccgatgccgcgccgacgctcccttccccagtccctatcgccacgccggtgtcaccaccgtccgttgggattagggttgcgtgtgcgtcatgtcgcacgtcaggcgtgcagagaggcaacaaccctccaatcaggctaaagattgttgggtccgatgggccacatgatagagaaagaggctggttgatatgaaattttggtccaaatagctataaaacattgttgttttttatgtttttacaatattttagtgtgtatacattgcatatacatgtttacataatttgtttcaccaaaaataattggtattcaaatgaatacctttgattcaatatgggctcgcccctgcgat

SEQ ID NO: 38147 - DNA, 626 bp, Zea Mays
caccctcctcaaaggtgatgccaagaacagagagggactctattaaggcgccataagcttcaagttaaaataattatttgctttatttagtctgctatctctccaaagaatgtctctcgtttagtctaccatctttctaaagaatcctttagtacatgttcttacatgtgaacagtatcaaaggtttattttcatttttcgcccaaagatctttagtatcggtgctttataagaacagtactaaatgttccttttcagtgcgcgctcatatgtctttagtaccggttcttaatttgtaggaaccaatattaaaatgccccctgataactttggctttcttcatgcccttctcattctcttcttcttgtgccctccttggtgagctcgtcaagctctctccttgcaccaccattgccttcgtcgagcccatgcacctgtgccttccccattccaccactgctcctattgaccctgaaaggatcacgatgcccaagagagggggtgaattgggcttttctaaaaatcaacactaattaaaagctaagcaagagcccaacttcaccccaacaactagcactaagataataatactagaaatacaatcatgctaagacaatacttcaaat

SEQ ID NO: 38148 - DNA, 1256 bp, Zea Mays
cccccccgccatccttcaccggagtccgatgctggtcccgtccgtcctcttcgctccacccccgcccccggtggggcctgcgccggccaaggaccctcgcctgcgtcgtgccgcccgactccgcggagccacagacgggtgagcaagatgcgaaagttgagtctgccgaagaagaggctcggactagtataccccaggatgctgagcttccagctctcccaaacaaggatctcaacagaagggtagcactactgtctactcttgggggctggggcggtagctctctttgcatcccagaggctcaatcttagcgagatatctcttaaagatgttgcagccaatgcggttccatatgaagagggaccgtgtcaatttcgtaatgctgaatgttgacagcacaaagtgggaacaggagctcgacgagatcggggtggaaggcattccccactttgcctttctggataaggaaggaaatgaggaaggcaatgttgttgggagacttccaaagcagtatttccttgacaacgtggttgcgctcgcttctggtaatcccagtgtacccgatgcacgagtggtcggtcagttctcgagcgctgagtctaggaaagttcaccaagttgctgatgccaggagtcatggctagcagttgtttatgtgggggcagcagtggttctagtttaactggcaagaccatgtgacagttatagcaagattctatagtgggtcaccacaagtctagaaaccgtggatttcttttgcacactgaaatgacttctggccatcaaaaaaacattggaccttttgtgaaggcaggttttggaaccaaggagagatggaaggctatactatagtgtattcaatcttctcggtatcgagcatgcgggcgctggaaagagctgttagattccacagatcacagaagaaaagggcgtgatatgctgtgcatgtgcgtgtggattccgggtccactcccatcgtcggcgcgggttcgtcagcgacactggaacggttgcatgctgtacggcaaatgcagagatgctgtatgtttttttagacacagcagggtgtgggtggctcacgaaagaagcttttgcttgtattcgttgctcgtgtaacacatgttcacgctgcccttttcaagaattcaaggtgccgtttggttcacataattgtaacgtaatgggtaacggataacgttaaatcatgtttgttttagtccaactgtaatcagataccacactaaaatttgataccag

SEQ ID NO: 38149 - DNA, 3794 bp, Zea Mays
ctcgcgtcgcaccggccaccgttcacccctgacccccatttcgttccttccagatctccccgcccccgcatctcgcccgccagctaccggcgagtgggcgcgcgcccgccgccgccgcgatgtacctggcgtacgggtggccgcagtcgatccctctggacccggacgactcggaccgcgtggtcctcctccgcgtgctcggccgcctcctcctcgccgtctgtccggcttcgcttcacctctggtccgccgcccaacaccgggtccgcctagcccgctccgatcgctccccggagtccctcgccacccatggccacaacgcgcacgccgcgtggagccccgacgccaggaccgtcgccgtcctgacctcttccttctacctctacgtttacaaggttcagcactcgggaaagcaactgatcgtcggtggcaagcaggtcccggggctttgcctggctagtatatccctaatcatcaccgagaaggttcctctcgccaatggcgttgctataacgagcaatttcgtgtgtgacagcaaaagcatgctcctcggactatccaatgggcatgtgcaggtcgtgtcctggaacgctgaggcaattcttctattgtccatgttgagctgtcggtgaagctgagattgctggttgctttgtactcaggctgtcgcattgccctctgtactattggtaagaagggattaaggcagcctggcagcaccagagtggagagatggttggacactgatgatgcgatgtgtacttctgtggcttctgagcaacagattcttgctgtcgggtgcagtagaggtgttgttgaattgtatgatctagcagaaaacacacgccatatacgaaccatttcgttgtatgattgggggtattcagtggaagataccggtcctgttgcctgtatatcttggacgcctgacaattgtgctcttgcagttgggtggaaatttaggggacttactgtatggtctgtgtctggatgtcgattgatgtgtactattcgtcaaactggttcaaattctgcctcatctcctatggtgaaacctagcgctctaaaatttgagcctcttatgggaggaacatcacacattcaatgggatgataatggatataagttatttgctgtcgaagaaagcttgtcagaaagggttcttgctttctcatttgccaaatgttgcccaaacagagggctttcaggcacaacatattcccaccaggttctttatggggaagatcgaatccttttggtgcaaccggatgatgccgatgaactgaagatattgcatcttaatgttccaatttcatacatttcccagaactggccagttctacatgtggtggcaagcaatgatgggatgtacttggcagttgctggctctcacggactagtgctatatgatttgcgaaataaaaggtggcgtttttttggtgatgttacacaagagcaaaagatccaatgcaaaggcctattgtggatgagaaaaattgttattgtgtgcaactatgttgaatcgtcaaacacgtatgagctcctctttttcccaagatatcatcttgattatagttctttactctaccggaaacaactgcttggaaggccaattgtcatggatgttttccaggattatatattagttacttacagtccattcgatgtacatatctaccatgtggtggtctcgggagaattatctcctgctagcaatccagttttaaagctttcaacattgcgagaactttcaatcatgagtccaaaaagcccacctgtttcaatgcgcttcattcctgaacaaaatgacaaaggagcgctgacagaagatactcatggattttctgatcttttgtcccagcaaccatcaagatgtttgatcttgcggaccaatggggagctttctgtgcttgacatggacgatggacatgaacacactctcacaaattcaattgaactcttttgggtcacctgttcgcagtttgaagagaagggtagtcttatcaaggaggtttcatggcttgattacggtcatcggggtatgcaggtgtggtacccatcacatggagcagatcgttttaagcaagaggattttttgcagttggacccggagcttgagtttgatcgtgaggtgtatcctcttggtcttcttccaaatgttggtgtggttgttggtgtttctcagagaatgtccttctcaactgcggagtttccatgctttgagccttcacctcaagcccaaacaatattgcattgtttattacgacatctccttcagagggacaagattgaagaggctttgctcttggcaaatttgtccgcagaaaaacctcatttctctcactgtttagagtggcttctgtttacagtatttgatgcagatatatcaaggccaagtgcttcaaaaaatcaggcttcacaaaaagttgattctcccaagaaatctcttcttgagaaaacttgtgacctactacggaattttcctgaatatatggatgttgtagtcagcgttgctaggaaaactgatggacgacactgggctgatctgttctctgcagctggacgatccacagagatgtttgaggaatgcttccaacagaggtggtacaggactgctgcttgctacatactggtcattgctaagctggagggccctgcagtcagtcagtattgtgcactccgtttgctacaagctacacttgatgagtctttgtatgagcttgcaggggagttggttcgcttcttactaagatctggaagagattttgagaatgccacttcagactctgagaagctatctccaagatttctaggctattttctgttccgttcaccttataagcggcaatcttctgatttgaaaagtaactcaacgaaagaacttagtccacatattgcttctgttatgaacattctagagcgccatgctagctatttgatgtctggcaaggagctttctaaactcgtcgcttttgtcaaggggactcaatttgatcttgtggaatatctacaacgagaaaggcaagggtctgctcgtctggagaattttgcttctgcactcgaactgattggacaaaagctccaaatggatacactgcaaagccgacttgatgcagagttccttctagctcatatgtgttcagtcaagtttaaggaatggatcgtggtgctagctactttgttgcggcgtacagaggttttggtggatctctttcagcatgatttgcgattgtggaaagcatatagcattactctacagtcacatgatgtattcagggaatatcttgaccttcttaatatcttggaggaacagctttcgtctgtctctgatcttacattgcagaatggaccattgtcatgaatgctggacggtgacactgattgaaaaaaacaactgaatacggcgttttagccttgagttaattaacacatacggcgggaccaggaatctgatgtaaatagattattcagggtgtttttctctttgagcaacaccccgaggtgctatggcagttttttgtacagtgatcagctaagcacctattgttgtatcattagtttgttgcagcggagttgagtctgcattcttcgccttactgtaaatatgtgctgcgcccttaacattgtaagccatataccattctgagcagcaagttcttttctctgttccatagaatcgtgtttaaagctagaagcctagaacatgtagatagtcttcacctgatgtttgtagactccgagatattattaaaactgacactatgatttcttaattgcattttttccatggcata

SEQ ID NO: 38150 - DNA, 461 bp, Zea Mays
aaacgcaggctaccgcgacgaagaagagcataagcaaacataaacgggcttgtgctttgtggaaaacatgccgccgccgccgccggtgaatccacagcggctttcgccggcagagtcccgagagcggacgctgtacttcttccatggtctgggcgtggacgtgcccctcccggtctcggccgagcggcccgacgcctacacctcgctcgtccgcgccatcgtctcctccgccgcagtcacctcctcgcgcgtctcctgcaccctcaccgtctctcccgccgtcgcgaaccagtacaacacgctccacggcggcgcggtggcggccgtggctgaggccgtcgggatggcgtgcgcgcgcgccgcggctggggacaaggagatgttcctcggcgagctcagcaccgcgtacctcgctgctgcgcgactcaacatttgcagtatttggttgatccaggatcaga

SEQ ID NO: 38151 - DNA, 1970 bp, Zea Mays
ctcgctcctgcatgctactattaaacaaggaagccatgggagagaacaggaagatcacccgcgggtcaaggctggtgacaaacaagctgctgcaccgctgccagcaactgcatggccacggatctgtatctggggtttctgaaaccttggggaagagacccttgaatgggaacaaggatacacttgtgtacagtgtgtttgccagcacctggaatgtcggcggcgttacaccatccgatggcttggacttggaggattggctggacacaagggctaacgcctacgacatctacgtcctagggttccaggagatagtgccactgaacgcgagaaatgtgctgggtcctaggaagagccgcgtgtctgccaagtggaactcgctgatcggggaggcgctcaacagaaggtgtcgagaagaaggcggggcgaacacgaacagcagcgccaaggacgacgaaggctctgtggagggatcacagggcttcagatgcatcaggagcaagcagatggtcggcatcttcacgtcggtgtgggcgagaagcagccttaggccgctcatccgtcacctggatgcgtcgtgcatcggctcgggcatcatgggctgcctagggaacaagggctctgtttcgatccggttcgtgctgcacgacacgagcttctgcttcgtctgctgtcacctggcttcaggcggcaagcaaggggacgtgctgctgaggaacttggacgtcgcggacatacttgcaaggacaaggttccctggccctgcagctcacgagttgccggagaagatccttgatcatgagtaggtgtacattagctcacccttcaaactgcttcaacctcagcctcatatttccatcttctagaatatggattctactataagtgatccctaaactaatgctttagtctgatgtgacatgtttaaatttttactaaatgtgcctgtctcctttgtgaatgaaaaaaaaacgaaggggggtatccgaaatggcatcacgcataaactgcagacatcaccctgtgcaccatgtctctgtggactgtttatccaaacaatatgtgttttctttcccgtttgtgcagccaagtggttttgctcggtgacttgaactacaggatatccctggaggaggccgagacgaggtcgctggtgagagccaagagatggcccgtcttgttggaaaacgatcagctgctgttcgagttctcgagagggcggcattttgagggctggcaggaaggcctgatcaccttctcccccacctacaagtaccagcccaactccgaccagtaccactggtgcttcgacagtgcgggcagcgacaagaagcgtgctccagcatggtgcgatcgcattctgtggcgaggcaaggggctgaagcaagtgcaatacgagacgtgcagctacaggctgtcggaccaccggccggtgagagcggttttccacgccgaatgcgacgcgttatcggaggcggtgtcgcacaagtaaaaacattgccaggctgctaccccgccgcacagagcgcccagcagcaagcaaagcgactgatgtgatgagacgtctattcaaccagagagtgatggatatggacgacggcgcgcgagtgccgccaaatcgagagagaactggacgcaagattggaccaagcgagtagagccaagaagagatttcttctgagacgaacatgaagttgttgttgttttttttttctgtctctctgtctctccctctgaacgccgattgagttgtgtgcagaagaggtgcatggggatagagtaccgggatccaagaagaggtgctggttttttttggcattgttctgttggtggcggtgttcagattcttttttccctcgtttaaaagctagctccttctgggctttgggcttgtgtctgaaagaatatcagagcctaaaaacggcatctgcacattctgttgcttaatagattggagattaccgactaag

SEQ ID NO: 38152 - DNA, 255 bp, Zea Mays
cgagcaaggggcctcctccacacccgatgtacaacccgttgcattcaaggcaacggaggagaagaaagaagactctacacctagtagggtccccatcgacgccttcaagctcgacaatgaggagatggcactcatcatcaagagctttcaccaaatcctcaagcaaagaaggggaaggactacaagccccgctccaagaaagtttgctacaagtgtggtaagcccagtcattttattgcaaaatgtccattatct

SEQ ID NO: 38153 - DNA, 3024 bp, Zea Mays
gccgtcgccttcttcttccccaaccctattacaaaccctggttcagacgacagtgccaatctccaactcatacccctattccagaccctgattcttccacaagggggcagttgtcggtgatggaggcgttcggcgggttcttcgtggacgagaaggcagcgcgggtggagaacatcttcctcgagttcctgaagcgattcaaggagtctgatggcgcgggggagccgttctacgaggcggagatggaggtgatgcggtcgcgggagtccactaccatgtacgtagactttgcgcacgtcatgcgcttcaacgacgtcctccagaaggccatctctgaggagtacctcaggtttgaaccgtacttgaggaatgcatgcaagaggtttgcgttggagcaccgggctggcgagaaccgtgccccgctcatctcagatgatagccccaacaaagatatcaacattgctttctataacatcccgatgctgaaaaaactgagagagcttgggacagccgaaattggtaagctcacatcagtaatgggtgttgtgacacggacaagtgaagtgcggcctgaactattgcaaggaaccttcaaatgtctcgactgtgggaatgttgtgaagaatgtggagcagcagttcaagtacactgagccgataatatgcgttaatgcaacatgccagaacagaacaaaatgggcccttcttcgtcaggaaagcaaattcacagattggcagcgggtcagaatgcaggagacatcaaaagagatacccgctgggtcacttcctcgttcccttgatgtcattctgcggcatgagattgttgagaaggccagagctggggacacttcctgatgttatggcactaacttcacctggcgaacgagcagagtgtcgcagggaagctcctcagcgaaaaaacggaggtgttcaagaaggtgtaaagggcttgaagtcccttggagttagggatctgtcttatcgccttgcctttgtagcaaattcagtgcaggtcgcagatggtaggagagaagtggacatcagggaacgggacacagatggtgatgacagtgagagacagaaattcacagaagaagaggaagatgaagttgttaggatgaggaacactcctgatttctttaataagatagttgatagcatatgtcctaccgtatttggtcatcaagaaattaagagggccgtgcttcttatgcttttgggtggtgttcataagataacacatgaagggatcaaccttagaggtgacatcaatgtctgtattgttggtgacccaagctgtgcaaagtctcagttcctaaaatatactgctggtattgttccaagatctgtttacacgtcagggaagtcatcatcagctgctggtctgacagcaactgttgctaaagaaccagagactggtgaattctgtattgaggctggtgccctgatgctagctgataatggtgtttgttgtatcgatgaatttgataaaatggacattaaggatcaggtcgctatacatgaagcaatggaacagcaaacaattagcattaccaaagcaggaatacaggcaactttgaatgcacgaacatcaattttagctgcagcaaatccgaccggaggccgttatgacaagtcaaaaccacttaagtacaatgttgcattgcccccagctattctttcaagatttgatctggtctacatcatgatcgatgaacctgatgaaaacactgactaccacattgctcatcacattgtaagagtccatcagaaacgtgaagaagcacttgcccctgcatttagcaccgcacaactgaagcgttatatttcttttgcaaaatctttgaaacctcagcttagttcagaagcaaagaaagttctggtggagtcgtatgttacgcttcgtaggggggacagtactcctggaactagggttgcttataggatgacagttcggcaattggaagcattgattcggctgtcagaagctattgctcgaagccatttagaaagagttgttctcccagctcatgtccgcctggcagttaaattgctcaagacatccatcatcagtgttgagtcaagtgaagttgatctctctgacttccaagatgctgaagatggaacaaatgtaccttctgagagtgacgccggacagccagctgaagaagatgctgctcctcagcagcagggtgcagaaaatgaccaagcagcggataatggtaagaagaaattggtaataactgaagaacacttccagagagttactcaagctttggttatgagactaaggcagcatgaagagtcagtcaagaaagatggagatggtttagctggcatgaagcaaggggatcttatcatctggtatgttgagcagcagaatgccaaaggggcatatagttctactgcagaggtgaaggaagaagtgaagtgtatcaaggccattatagagagacttatacagcgggaaggccatcttatagtcattgacgaaggtactgcagccgcagccgaagatggcagtggcgcaaggagaacatcagagagtagaatactggcagttaacccgaactatgttattgattagcaacggcatcttaacatgctgttaacccaagccagttgatgtggttagctaactgaagctatgattctggtgatgtgtccgttgtgctctagagttgttgtaccatctccgtcactggtgtgctcgttccaagggagcacatgatctccaaaactacatactacgtttagtgatgcaggataattagcatctgtagtcttactaattttgacccgtgtttccctagtgaattttcgtagcaacagctttgatttatcagtcactgagtgctgcaattttctatttgctttctcaagttcaccctttgttgatccatctagatgggatcagagaatagctgtgctaatttatgttacaatgtcgcagaacccatttatttatttgattgctttgtgaggaagtcagtttattaagtttggccatcaaatttcagcgttg

SEQ ID NO: 38154 - DNA, 2201 bp, Zea Mays
aaggccccacacgtcagcgtcaagggtcggagcctataaagaggctcgagagagacgagcaagcaggcaagctcactcaaggacaaaaaaaaaaaaacagagcgcagcattggaggcgaggaagagctgtcggccggagatggacaagtactgggaggagacgcagcgctacctggagtacgaggagctcagcatctacttggaggcgcaggaggacgccatgtcttgctacgactccagctcgccggacggctccatctcccactcgtcgtcgtcggcggcggcgtgcggcaacaagaacatcctgatggagcgcgaccgccgccgcaagctcaacgacaagctctacgcgctccgcagcgtcgtgccgaacatcaccaagatggacaaggcgtcgatcatcaaggacgccatcgagtacatccagcagctgcaggtggaggagcggcgggtgctgcaggagctgcgcgtgctcgacgacgacaccgccgccgccgccaccgcgcaggtggagtgctgcgacgtcgacgggggcctgctgcgacgggaagccgagcgcgcgaagaagatgaagcgcgcgcagtccgtcgccagcggcgcgcagtctgctccgcctccgcccccgccgccgcacgtcgaggtgctggagctgcgcgtgtcggaggtgggcgaccacgtgctggtggtcagcgtgacgtgccgcaagcgacgcgacgccatggccagggtgtgccgcgccatcgaggacctccggctccgtgtcatcactgccaacgtcacctccgtcgccggctgccacgtgcacaccgtcttcgtcgaggtacgtcgccggtggcatggcatttggcatcacatgggatcgggatactctgtttttttttctccttttttcatccttgacgatggatatgactgacatgacatgggcgtcgtgctgatgtcacgggccggccgaatacgtgttgacactgacgctgacttttaccacggcaacacccactgttcactacgccttttcgtttccggttttcagtgtggaaatggaaatctggatagtcacgtgctcgatcagtcgatcggatccccacattcacatggcgtactgtagtagtactagcaaccactttttgcctttttttggtgattcagacttgatgaaaatgaaacagattaagcgcgtgggggaggacatttgtaagaaatggacttagcggctgtttgtttaagatcataatttaacttagggctagtttggtaactctatttttttaaaggatttctatttttctaagtaaaaataaactaatttttcttggaaaaattaaaaattttgggaaaatggggttgccaaactagcccttattttgagctaagtgtcggtttgtttgagattatataatctctataggttatataatctaacttattttaatctagcacttaattcaaaataagttatattatataatctggacatattagaatcctgaacaaacaaactctaagcgtaagttaaaaataagttataaactacataatctaagcaattataaactcaaacaaacaagcatcatagggaactcaaaaccccaagttatcctcaatgggttttgtagtttcattttttcgacgtaacaaaaaaaagcaacaaattaaaactcactatggttagacagaaacatcatcttgaatacggtatggacgcttactctcaatgcactgtctgtatattcaggtagataaaatcgaccacatccaagtgaagaacatgattgaggctgctctcacgttgctcgacgcccccggaagcccccacagctcgatgagctattacgagacctaactatgttgagcaatgcttttcggacgtctactaggtcaacaactcagtccacaattaaccagaaaggagtatgtcgtgttttgctacaatgtgcttgttgtgttttttttcaacatcacccctaagagatgatggttgtttcctctaagatgcagctagtgtaccaagcaatgtttggacttcgtgtcatacatcaccacgagagtgacatgtatttgtgtactataacatgtatatgctaaagaaaataacaaggggacttgtctttcgaatgaagagctatcaaatatgctatgataatataatgtgcgtgtctgaaaacttaagccataagtaagtaacactttttagaaaatga

SEQ ID NO: 38155 - DNA, 1845 bp, Zea Mays
ccaccagtcttcttcttcttcctctcctcctgtttttcttttttgcttttgcctcctcatcctcttgtatagttcatactactactagtcttcttctccaccggctgactcgtccacgcaaaccctataaaaggcatccgagtcccactagctccggccccgtgtcttccccagttaactccgttagtgctgctactgctggcggcggcatgaggccggccggcgcggcgacgacggtgaagaaggcgaggcaggagctggagctggagcaggagcgggagttgcggtttccgcaggcggcggcggccgcggatcagggcggccttgacgaggagctccggcgcgggccgtggacggtggacgaggacctcacgctcatcaactacatcgccgaccacggcgagggccgctggaacgcgctcgctcgcgccgccgggctgaagcggacggggaagagctgccgtctgcggtggctgaactacctgcggccggacgtgaagcgcggcgacttcaccgccgacgagcagctcctcatcctcgacctccactcccgctggggcaaccgatggtccaagatcgcggcgcacctgccaggcaggacggacaacgagatcaagaactactggcggacgcgggtgcagaagcacgccaagcagctcaactgcgacgtgaacagcaagcgcttcaaggacgccatgcgcttcctctggatgccacgcctagccgagcgcgccgcaacagccgcccaccagccgcagccgcagcacgtcgctgccgcctgcaacaacgtgctggtggcggcggcggcggcggccaacagcagcagctgctgctggtcctccccacgcagcagcgccgtcaccacggccgcctgcagcggcagctcctcctgcagctcgctcacgtccgagtccgcgcacaacgacgacgatggcgcccggccgcacgccgccgccgtgctggcggcggcggcggcggcgacgggcgacgacgactactggggcgctgtcacgacgactatgcagcaaaatcatcatcagcagcagcagcagaacgagcagttcgacttctggtccacggcgtccgcgctgcagcacctgactaccgccgccgccgaccaggacctcaccggctgggtgcagggcttctccgacgacggcatcctgtccggctcctcgtcggacagcctctggagcctcgacgacatctggaggatgcagtgacagtgagacgtatagtacggcgcgctgttgtctgtcgtttacgtcaatttttgcccgcgtgttagttgcgggttcggattcaaattgggggacgtacagtacagtacgatacaggcaggggaggcgaccaaaaacccaagcgttctcctcatatatttttcgtgttcagttattacgctctgactttatcacatatatatatatatatatatatacatatatacactgtataatgtattagctagtatatatatattcacacactgtggaaagttgatttttcttcttctttcatccggtgttgacttcgtttttgtttgggtggcaaactaactacgtactccgttccgtcactgtcctcctgtcaagggtttttcttttcttttttatttttgtccaccttgtactgaatatgtatatggtaagagagtgagacatagacaacgaccaatgttattaaattacagaagacctctcaacttgagtgtgattttttttcttcttcttctcgtctcttcttcatattcgattttttctatttcgtgatttttttattctcggaagctaaaaaatcatgcacctaaatttttaaaaattaagcaactcgcgtcagtagtccatc

SEQ ID NO: 38156 - DNA, 2057 bp, Zea Mays
tcgatggccctattgcgtaaaacaataaacccgccttccccaccactggtcatcagtctccactccacgcccgacagagcaggaggactcagaaatggcaatcccagtgcgatcggctgccgcgccccgccgcctcgttccgtcgatacctccggcgagctctggacatgttcgaggactggcgtgcttcggtacccgaaccgggcctcgcggtgcaagagggttgtcaatggtggtcgccgactccaccagccgtcgggccaagcaagcggacggcggggacggcgtccttggggcgcctgttctcggagggctcgggatggagggattgggggatcagctcagcgtggtgatgaagttcggggggtcctcggtgtcgtcggccgcgaggatggctgaggtggccggcctcatcctgacgttccccgaggagcgccccgtcgtcgttctctctgccatggggaaaaccaccaacaaccttctccttgctggagagaaggcagtagggtgtggagttatccatgtttctgaaatcgaagagtggaatatggtcaaaagcctacatatcaagacggtggatgaacttggacttccaagatctgtaatacaagacatgctagatgaactggagcaactattgaaaggtatcgctatgatgaaagagctgacgcctaggaccagtgactaccttgtttcatttggagaatgcatgtccaccaggattttttctgcttatttgaacaaaattcgtgtcaaggcacggcaggggccatgtaaccagcctagctgcaaatccccatatgacgcatttgatattggtttcattacaactgatgaatttggtaatgcggatatcttagaagcaacctatcctgctgttgcgaagagacttcatggggactggatacaggatccagcgatacctgttgttactgggttccttgggaagggctggaaatctggtgctgtaactactttaggccgaggtggtagtgacttgactgctacaaccattggtaaagccttgggactgagagaaattcaggtatggaaagatgttgatggtgtacttacttgtgatccaaatatctacccacatgcaaagactgttccatacttaacatttgaagaggccacagaacttgcttattttggtgctcaggttttgcatccacaatcgatgagacctgctagagaaggtgatattccagttagggttaagaattcatacaaccctaaagctccaggcacccttattaccagacaaagagacatggataaggttgtactaactagcatagtgctcaagtcaaatgtcactatgttggacattgtgagcactcggatgcttggtatttgctatatttgaagatctatgtatatctgtggattgtgttgctaccagtgaagttagtgtttctgtgtcacttgatccatcaaagatctggagtagggaactgatacagcaggaacttgaccatgtagttgaagagcttgagaaaatagcaattgttcgtctacttcagcagagggcgataatttcacttatcggaaatgtggagcaatcgtctctcatactagaaaagacgggacgtgtgctgaggaaaagtggggttaatgttcagatgatctcgcaaggagcgtcaaaggttaacatgtcgctgatagtccatgatagcgatgcaaaggcactcgtagaagcccttcatcaggcgttctttgaagacgatgtcctatcacaagtcgaagcggagaacctactcgtgggctgatcaacgtaggctttgctgggtccaggcgtgttatctgttatagattcccactcgcctccatgaacggcatgggcattggatcattgatcatgttttgcttgaaacaagtatgtcttccaggttctcagccaatgactgcaaaactgtgtttctgttttagaactgtttgcagacaccacagtctgagctgcgagcaccgattgtcaacaagatggcaagcctgtgatataattccaactgtctctaatcaatatatataataaacattatcaatatctattaatt

SEQ ID NO: 38157 - DNA, 797 bp, Zea Mays
acaccacccaaaagggaagtcaagtcaaccaaaggccgcacggggtacagccctacccctcccgtcacaaatcccagcggcgccaagcccaagtcagcgcgcgcggcgatggagcggcgggggcaacagcctggcgacgcgcagcagccaggcaaggacggcgccggcgactcccctcctccaccgccaccgttcctggaggtgagctgcaggagctccggcaaggttcggcggttcgcggcggggacgacggcccgctacgcgctgcacgccatcaaccgcaagctcggccccggggccccgccggcgctgcacgtcgaggccgtcagggacggcgaggagcccgtcagcttcggccccagcgcggccctcgccgactacggccgcggctggaggctgcagaccgtcaccgcgcacgacgcgcccgggatccatcacgcgccgcacgcggacacgaaacagggcgacaggcagccgtccaaagaagatgccgatggtacggagacagtcaggggcacttgcatctacgtcgccaagatcgtgctcgcgtttgcgtttctcttcctgctaggtggatcgctcacgtacctgctggaggtgatccctgacatgctgcagactgcatcggcgcttgagttaactgattttttctacgacccgctgactgaaaatgtatgacgcatgtatcatttcattagcattaattatatggcattgtgtggggctttgtaacttggtcaattttaattcgtgtcgctgcagctcatgataattcatcgtctttgttattaggtcta

SEQ ID NO: 38158 - DNA, 3093 bp, Zea Mays
cgttacacacagttcctttcaggcttcacccgttttgctctcgagtctctcccggttcggatccaaattcagcaatccgacctgagaccaagaccgcgcaccacgcggctcgccgccgatggcgaacgccgacgccgacgaagcgccgctgctctctgtggaacacctccgtccaggatcctgcagccgcgagctcgagctgcgggagttccgcgaccgctacgtgatccgttcgctcgacggcgccgccgctttcgccgtccttcgctccggcggctccatccgccctctctccccagaggaagccgtagctgagagcgactgcaaggtttccagaatatacggcgtggtcggcaccataagattgctcgctggagagctgcatttcattccattaagaagaaaaacagagataatacaaaacagccacctcgcgggggccaagtacaagcatattgatactcatccatgaataaaacacccaaaggaagctatgtactcgttatcacttctcagaaagatgctggctcttatctgggctcccctgtgtaccaagtgaactcaatgaaattcttatgctgcaacgaggctatcaagcacttgactccacaggaaagaagggatgaggcatacttcatgtctctcctgagaattgcagaaactacttgtggattgtattattcatatgacagggatttgacactaaagtaagtgctttgtcatgcatgtatctgaataaggcaaccaaaagacattggcttaatattcagaaaaggccaacaacctttgtgtagtgattatgcacatccttaagatatttttttttctcaaacaacacatgagaactgtgtgcatttcattaagtagagaaaaaaaaccaaaggagaagcagtgtgtggcgctgttagccttgtactaggtggcctagggaagttggcctcctggaaaaaagccgaaacagtcagagcaccctgaatgtcctggatccagagattctgatctaaatcctcctgtaccgttcatctcctcgtcgacatttgtaactaatcgattgcctgttagttccattgttccttgcagatgtgtagtaggttcttgaagtatggatctattgagcacttcttaagaggttctagttgtatgactgttatcatgtactgaatgcctctgtggtgcatttatttttcttttgttatactggattgtatctaactgatgagatagaaataatgcgatgatggaatgctcctcaatgtaaagctataaacactatgattatgtagcttgcagagggcatccaagttggctgctgggagggtacataaaccactatggaagcaggctgatccacgttttgtttggaacaaaaatttgttagaggaacttattgaagctaagcttgatgagttcatcatcccactgatacaaggaagttttcagtcagcacaatttaccttgaaggatagaccagtgaggataacattgttctcaaggagatgcaacaggcgtttaggaacaagaatgtggagaaggggtgcgaatcttgaaggcgccacagcaaattttgtagaaacagaacagttggttgagtatgaagatctcacatcctcatttatacagcttcgaggttcaattccacttctctgggagcaaatagtggatttaagctacaaaccacggcttagcattattgaacatgaagaaactcataaggttgttcaacgccactttcatgatctttcacaacgatatggcaagataattgttgctgacttgactgataaacgaggtgatgaaggagatttgagcaatgcatttgctgctgaaatggacagaattcctggtgtcaggtatatacattttgatttccatcatgtttgtcgtggaggtaactttgacaatttgcaagctctctacaatcaaattgaggaagctattcataagcaaggctgagcagatattttcttatgaacactaaaggagagattttgctggagcaaagtggtgtagttaggtccaattgcattgattgcctggaccgtacaaatgtgacacagagtttccttgcaagaaaatcattggattctcaattgcagctgatgggagcattattgtcatctgaaagcatttctctctctgataacattcatgatacattcaaaaaattatgggttgagcacggtgatgagctgagcctggagtatgctggctcttatgctttgaaaggggatctagtgagatatggaaggcagacattgcctggactaattaaagatggaatgagtgctctttcaagatattatttgaataattttcatgacggagtgcggcaagatgctcttgaccttattagcggttattatacagtcagccaaggcagctcttctccttttcataatggtgttgattcttcttcgtatctgccggtggcttcagcaatcatagttggtgggattaccgcgacaactttcactctcagtcaagttggacggaacgcgcagcacttgatctcctccattatctgtgcgggcttaacagtcggagtagtagccttggtgaaagccaatgggaaacagttttgctctaggccccgtctgtgtggtctaatctaatccttggtcttttccccccttccctttcatattgccctttgttagaaattgaatgtaaaaggattagaatgttgttttattcgttgcaagagtaaggttaaataaggaggcaggatggcctgccggtcccgtaatctgaagctgctaatttgtaagcctatagtttggatttgcacattctatttgttatactttttatgtatccatgaatagaaaattacgcctcgaaattccaaatttgtaataaatccgagagaccacatatttttttagtgtgactggttggtagcgacggtcttggcgtcttgcatagttgctgacacagaaaagacacctccgtccctctgtctggtacagtgagggtggggcatcaaaaacacaaagatgctgttcttatcaggcacagatgtttgccaagtataattccacgttgcgctatacagtcgggtttgctcgtatgcatttatgatctagatactta

SEQ ID NO: 38159 - DNA, 263 bp, Zea Mays
cgtgagaatgatgagctaatcgttctcccttcagatggggatgcttggaaggctctcgacacgtttgatctagactttgcagctgaactgaggaatgttcgaatcgacctcgcgactgatggattcacaccttttgctcaaatggcatcatcatactcatgttggcccatctttgttattccatacaaccttccaccttctctttgtatgaaatatgaatttatatttctttgcttaatcattactggcccagactatcctgg

SEQ ID NO: 38160 - DNA, 6886 bp, Zea Mays
gggaagagagagaatcgcaggaccaaaccctaaacccccgctcccgcctcctctcgctgctgcagcttgccgggagctcacgcggcctttgcttctcgcttctttcgctggccacctgatcccggttgttcttcgctgggctcccgagccgctgcactcgctgggtgctgccgcctgccaggaggagcggcacggccgtctacaggattaaagggagggaaggtttgtggtttaagttcccggaggaagacttgtggcggaactgtactgacttcagattgaagtcaaggagctaatttgggggaagaatgtcttcaaagtggcggtcactgcagcatcggcaccggtacacctacacctccattgtgttcccgaagcattaccttgaggccctaactctcgtgccagctgagatctcctcatccaatttctttgtccgattgagcaacttgatttccctgacctccacttactcccaagttgttgtggtcaaggatcttgcctcggcatatgtgcagtttctgtccactacagggactcctgatgaagcagtgctcgctgccacaaagctttatttggagatcctctttcttgagaattccctccctctccaccggacactcatatcagtgcttgccaagtgcaagaaattctccacagtgatcagtgggtgttttgccttgctctgtgaggagtatggtggctctggtagtaaggcaaagaagagatttatggtatctcgagcagccttgtcgcttattgggtacccaaagttgggatttttggatgaggcagtagagaggtgtgcagagatcatggcactggatgttgttgatgggcttgatggagtgacaaaagacattggtgaagggtcacggccatctccagtcgtgatggagcagtgccaggaggccatgtcttgcatgtactacttgctgcagaggtacccgtataagtttattggccttgacaaggcgtcaagtgtcttcaagagtgctgtcaggacaatactatctgttcttaagtcatctgccttttcaagggattgcctggtggcctctggagtaagcttctgtgcggcaattcaggttttcatgagcacagaggagatttcctggttcatttctcaaggtctatttggcatctatgcaaatcatgaagatagaaaaaatcagtctgtgcacaatgtattttcggactttgatctgtgtgaacaaatcagagacctttcagtgttgagtagactttgtctactaagagggattttgacatctattccaaggacagtactcaacatgcaccaacttcattccagtggacctttatggactgttttatatgatggaattttacctgagctttgcaagcattgtgagaacccagttgatagccacttcaatttccatgctcttacagtgacacaaatatgtttgcagcagataaagacatcggtttcatctgatatcaccgacttctctggggactataagcctttttcaagagatgttgtcaaccgtatattgggaatcatatggcgcaacctggaagatcctttgagtcagacagtaaaacaggtgcatttgatctttgatctcctattagatattgaactatgtattgcatcagaagaccgtgaacataacaacaacttgttcctttgcaatgttgcaaatgatttacttcgcttaggtccacgatgcaaagggagatatgtccctttagcttctttgacaaagcgattgggtgccaaatctcttctaacattgaaatcaaatctgctttcagaaacagcttatgcgtacatagatgatgatgtttgttgtgctgtcaccacatttttaaaatccttcctggagactttaagaggtgaatgttggaatgacgatggtgttgagctaggatatgatgccttcagagctttgtgcttgcctcctttcatgcggggacttgtatctggaaattcaaaactacgttctaacttaaatacttatgctttacctgctctaattgaagttgatgcagagagcatattcacaatgcttggattcatctccattggccctagcacaaatgaaactaaactagatgttgttttgaaaaatgaccagtgtatagctgcactggtttctctgcttaaggtctcacggaatctggctcttgttgaaggggacattgatttagatcctgatgaattgtcacagattcagcagatggatagtaagggtgctgcagttatatctgttaaagggattaaagttacagttccttttaattggtttgctttggcactgacacacagtgatgaaagtctccgtatagatgcagctgaatccctctttctaaatccaaagacatcaagtcttccatcctccttggaactgagcttgctcaaagaagctgttccgttgaatatgcgttgtagctcaacggcatttcaaatgaaatggacaagtttatttcggaagttttttgctagggtgcgaactgcacttgacagacaggtaaaacaggggtcttggattccatcattaacgtctagtgttaaaggggctggctctattgatacttctaaggccactgttgtcaagagggctgaagatctcttccaattcatgaagtggctgagttcctttctgtttaattcttgttacccctctggcccttatgaaaggaaaacaattgcaatggagctcattcttacactactagatgtatggcctatttgccgctctgaagggaaaattgatctttatccttacaatgatagcataatattgccagactcaacaatttcatttgttgggtctataattgatagttgggacagattaagggaaaactcttttcgcattctactgcagttcccaacaccgcttcctgggatttccttgagtacatccataaatgatgttatcagatgggcaaaaaaacttgttctaagcccacgtgtccgggaaagtgatgctggtgctttaaccttccgccttatatttaggaagtatgttttgcagcttggatgtattcttgtattttctaaagaaagtgattgccttgaatgttatacacaatctatgaatggagatacagaagttactagtcaaaacccagttgcacagtatatatcttcactcattcaatggctctgtattgttgtcgaagagggtgagagggatctctctgaagcatgtaagaagagctttgttcatggagttcttcttactctgcgctacacatttgatgagatggattggaactctgagatatatatgatgatcaacctactaccacttcagaaagagaggagaagaatgcaaaaccagggagtaatggcaaaccagccgaacaagttgttatggttggttgctggcttgctatgaaggaggtcagtttactttttggaaccatcatcaggaagataccattgcctggctgttctcattcagcttcatctcagaatggcttgcctgacagtattgaagagacaagtatatctgaagaaattcttgatgtggggcagttaaagatgatgggtgaccattttttacaggttcttcttaaaatgaagcataacggtgcaatagataaaacaagggctgggtttactgccctttgcaaccggcttctttgctcaaatgattcaaggctgtgcaaaatgacagagtcatggatggtgctactaatggataggacaattgctaaagggcaaactgtggatgatttgataaggaggagtgcaggaattcctgctgcatttatcgccctgttcctggcagagccagaaggaacaccaaagaaactacttccaagggcattagaatggctgatagagtttgctaagaactctttagctaatttccagaaagactccaaccagaggtctggagtaatgaaagagctgttggaatcacagtcagaaactacaagtgtatattctaatggtaacctatctaaaggtcgagatgagggtgttgttcccactgtgcatgtgttcaatgtgcttaaagctgctttcaatgatgcaaatctggcaaccgacacttcgggtttcagtgctgaagcaacaatagttgctatacgagcattttcatctccctactgggaagtgcgcaatgcagcttgccttgcgtatactgcactagttcgtcgcatggttgggtttctgaatgtgcagaagcgtgaatcagcacgacgatctttaactggccttgaattcttccacaggtatccagcccttcatcctttcctttctagtgaactgcaaaccacaactgaacaactagctgatggagtgtccagcaatttggagtcacacattacaaaagcaatacaccctagcctgtgtccgattcttattcttttatcaagacttaagccttcacctataagctgtggaactgatgattctttggacccttttttgcttttgcctttcatccaaagatgtgctacccagagtaactaccgggtccgtatccttgcatcaagggcattaacttgtttggtatctaacgagagattgcagtacgttattagtgatatactggataatttacctcgtggaagtcacaaagcaatggctcacagtgttcagcatactgatcctgccatatcagctaatatgggaaaagcaaatgtacttctgctgtctaagtcattcaattcaatacatggccttttgctgcagctggcttctcttctggataacaactttagaggtttgacagacggtagcatgaaggatcagattattggcctattactggaggttctttcaagatgctcttggcttggctgcacgaaattatgctcatgccctatcgtaattacatcttacttgcgggtattggatctcatgcttgatgttgcaaggacagggaaaagcagacatactgaagtcattcaggcattgctgctagagttaacttcccagtgcttgagcaacacagcatcaacccagtacgcattccatgatccaacccgtattgaactaaaacaacaagcaactgaatcatttttgagctgtgttggtctttctaagaaaaccgatgaaactaacgatgatgatgtgcagttgcaaatactcggtgaaccaactttagagatgcctagagtggattactcccttcatgaagtacacaaggagatcctgtcatgtctcactgatccttcatatgatgttagaattacggtgctgaagaggattctttggctcacaaaatcaatcagacatggttatgcagataacattttgcaccagtgggcaggagttaatctgcagcctgctttaatggaacggttgtttgtggaagaacaccctaagtgcctttattataatctgaagatcatcttttcatggaacatggaattcccattcaacaatggagaagattctagcacacttttgtccttgtgggataggttagttcatttaaacagcaccatgtcacatgcaaaaacgagagaaatagttctatgttgcatgggtatgtgcatgaaattgttcactaaacaatctaggggtggtatttcaatggattgtcttaagaccagtgagatctctgcatcctttgtcagaatcaatgaaggggatggattatctgatgccatgcttagattaaacttgtttgtcacacttgtcaagaaccaaagtgaaccatcagaaagcatgaatgctcgacgggctgctgctgaggcaattgttgcttctggtcttcttgaagaagcaagctacgttgcttcatctgtgtccaacatgtactctccttcagaatttgatgaagaccataccaaagagaaatgcatggaagatagcgtttttgaatttgttagtctttatacatgcaagatacttgacttgtggtttgtatgtattcagttgctggaggatgaggatgcatatctgaggcaaaaacttgcgaaggatattcagaaaataatcgctaagggttcagctaataccttctgtgatgattccacaccactacaagttgatagagtcattgaattaagcttggactatttaacttctttgtttggcctctggctgaaatacgttgaattcttgttaaggatagtcttgggcactggaaacgctctgaactcccgtggcgatttggtccgtcagatatttgataaagaaattgataaccaccatgaggagaagctattgatatgtcaaatctgctgttcaaacattcagaaacttctgaattcaaaatgccagatggaagcaggagcagagactaaactgttcctgcagaattggagggagatatttctaaagcagctcacatcgctgactggtggctatattgagaaagaggggaagaacgattggattggcggcataggtaaccacaaggacgtgttcatatcagtgtatgcagtcctactcggtttatacgcgctcacgcagtctggctctctggatcaattggaggaccactgtgcagtttatttgcaggaatttgcaaaccttgaaaggtctatcacaccattcctcaagaacccgttgatttctaatctttacgctctggtaaaattgtcacacgagaggttcatatcatcagataagcctgaggaccaagtgggtgattcaggatcaagttttgacccatattttcttatcagatgattttcgctaatgtactagtaattcttcattgttattcctccgttgtaagactcaatactaattgcttttttatacaaattaccatactatagattctttacttgatgccccttctctgtgtatcagtgcattttaagtgccttgggttttctagcactcaaaaaatgtatgacaaggttgtgactaacgtccgaacaactgataatgatataaatatttttccgattaacataggactacatcaagattcag

SEQ ID NO: 38161 - DNA, 776 bp, Zea Mays
tggctgtcaggctgagaatctgtatggttcagaaaaaccagtggtacagggccaacttcaggatcaggtggagctcgatttaatgggtaattggctaagacctttatagcaagattaaagttggattataggggagtaactttggtacagtcttcttctctggttgttgtacaaaaattaatgaaacaatagcccaaagttgctctgtcagaactgtgttgagatactaaaactgaattctagaacatgaatggtcacagtggaatggggccgaattggaagcgccatatctttaattccattcagttttgtaccaaggatcctatagtaagtttgaagactgatgttcagtaaacaatctttattaatggagatcaccttgttcttaacacaaatcaaaagaaaaggagggtgaaagggggtcggttcagaaaagtgctgaagatcaggacaccgaaatatctgaaaaagcgaggacaaagattaggggcactatagaatcagatgtatttgagtgatttggggtaagaatcgaccgcggggagatggcgtcggacgtgtcgcgatcccacagacctagcccgagcctagccggagataattcaccggcggtcaccgtggctcggtcatttccgccgccgtgtcacccatgcctcgctcctccctcactgtgtctcttctttatgtggtaaccatgcacgaactatgtaatccgcggccgtggatcgctagctggaccaccgcgcctataaatagccccgccacccacggtgagg

SEQ ID NO: 38162 - DNA, 3234 bp, Zea Mays
ccgacctcacgtcctcaccccacgccaatggcggccgctctggcgagccgcgtggagagttgggtgcgggaccaggcggcgcggctgcagccctgggcggcggcgctgccgcaggcgccgcggtggccctggcccccgccgcggcccgcctggccgtggcccggggaccgcagacgccagcgggaacgcatgttccgggaggagtacgaacgtcgtagcagacagctccgcgagctctgccgcgctgtccgcgtcgacaccgtagccgagctccaggagttgctctgcgccatggtactcgccgagtgcgtctacaagagacctgtttctgagatgatgagatatatcaacaagtttaagtctgattttggtggaaatgttgtgtccctggagcgtgttcaaccatccttggatcatgtaccacatcggtatctgttagcagaggctggtgacaccctatttgctacatttattggcacaaagcagtacaaagatattattgctgatgtgaacatattccaagggaccttatttcatgaagatactgctcatgatttagctcctgatgttgaccctgaacaaaatgatacccaaaagggtgaggaaagccatgggaaatcttaccgagaaacatcaaagaagctaagaaaaccaaaacctgcagtgcaccgaggtttcttggctcgtgctaatggaattccagcactggacctatacaatcttgcacagaaaagaaacaggaaacttgttctttgtggacactcacttggttgctgcattggctactcttgcaattttgagagttattgctaccacttcatctgaagaggataacaggcttcatgtgaagtgcatcaccttctctcagccacctgttgggaatgctgctttaagagattatgttcacaaaagaggatggcaggactacttcaaatcctattgtattccagaagacttgaagttatggaggcaagtggggaaaggcccagaggaaacaacagggaacacctcgttctcggtgttggtccagtgcaaaagtcattttggaggctttcaaaacttgttcccttggaaggggtgcggaaaagcttaagtgcaattcaaaaacaaacaaatgtttttgggaaggcaccatcacaattggatagctatttgcaatcaaaggttgatgaatcagaagaaccacctcaatctcttgagattcaagaaagttcacaaggaattgctcttacccctttatcggataaagatggagggaacactgaagataataataggactgagaaaataaatgcatctgaagcaggggggtctaaacgctggagcagggtaccttctttgccttcatatgtgccatttggtgagctttacctattgggagattcatcagtcaatacactttcagattcagaatactccaagatgacgtcggtgcagtctgttatatcggagttaagagagcgtttgcagtcgcactcaatgaagtcctatagggctagatttcaaaaaatatatgattcatgcatgtgtgcaaatgctcccatttttactggcattgagcaattgccacaattttcacatctacaagaattaattggtctaacagctactgattctgttgaacttggagatatcgtggaccctcctgttatccgaactgctacttctatccttcctcttggatggactggactccctggtggtaaaaatgctgagccactgaaagttgatataattgggcatgacctacaaatgtgcactcttttccaggcacaaataaatggaaactggtattccacagtaatagagactctaccatcagctacttcatactcaccaaatggagaactgcaacccacattacagaaaatgcggattcttgttggacaaccactaaagcagcctccaaattacattagtggggatttcatgattcctgtgatggcaggtgctgattcaacacccgactttggatttgaatcattttttgaagataaagattgctgcaagggtttgagtggatttctaatatatgggacaagtgattttgtaactgtacgtaaagaggtccacgttaggactcggagagtgcgattgcttggattagagggggctggcaaaacatccctgcttaaagcaatgttaggacaagttaaagaaagaaatagcactgttcttgaatgcatacatgtcgatttgcatggcaagggaatatcaaatggattgtgctacatagattcgacaacggtaaacttgcaggagctacctttggaggttgggcggttcaaagaagaactgttgttaggactccatgatatcagcaggaagactgaccttgttattgcggtgcataacctagcacaccgaattccacagtatcaacggtccaatacttctcagcctcagcctgctctttcacttctcttggatgaagctaaggcgctaagcattccttggattcttgcaataaccaacaaattctctgttagtgcgcatgagcagaacagattgatcagctcagctatggaagcatatcaagtttctcctgagatgacaaaagttgttaactcttccccatttctgatgccaagtgctagaaacagtttgcagcagatcagatcagctactgggaagttgaagaaggatccagcaaatagatctggttatcttcctgtaaactttggattgtcatcatttcagaggaaggacattgttatgcatgtggagggtgttagttcccttcgtcaacttgtacatcaagtagtcctcaacaatgaagaaacagcatttgaggaacttgctcgtgagagattgttgaaggagctagcgtcagagaaagcagcgtccctgcaagtgaagcagaagccccggaaaagagatggctctgttacagctgctgctgtaggtgcatctctgggcgcgggcctgggaattgtaatggctgtgataatgggggcagcatcagcccttcgaaagccgtgattcatgtattcttttgatccattatttacttcttgatttaaggatgtctgaacaaaagcactagtgtaggcatgaaaaatgaaattttagggcagaatagttagctgataccgtagtgccacattttggctgtgtatagaatgtaggttgagccttttttttgctgatctgaattttgttgtgttactggagtatggcttggatatgttctacatcatgttttaatttagttataaatctgtatcatgtcta

SEQ ID NO: 38163 - DNA, 1784 bp, Zea Mays
aaacggaagagaacacctggactcctccgtcaatccccgctccactgcctctgcttctccgccgcgtcagggtgtaaaactactcgaaccgatcaccgacgcgacgaaccccgaacccgaaccctccaagccggcaggccggagcagagcgcgctccaagctgaatccccccatctcctatcgccgtcgaaagccgcaggtgataaagtatgcatctcctacttctgctggagctgagtgcattgatcctgattgtagctgggtggaacactgggttcatcgtgcaggtcctcgtaaggagatatattacgaacctgaagaagtaaaggctgccattgttacctgtggagggctctgtcctggtctaaatgatgtcattaggcagatagtatttactttggagacttatggggtgaagaatattgttggaatcccatttggttatcgtggattttttgagaaaggcttaaaagaaatgccgctctcgcgtgacgtggtggaaaacataaatctttctggaggaagtttcctaggagtctctcgtggaggagctaaaactagtgagattgtagatagcatacaagccagaagaattgacatgctatttgtaattggtggaaatggtagccatgcaggagctaatgctattcatgaggagagtgggtgcagggagggagggtgcagagctgggtacgcaagatttagccggtagcgggatgcaggatgggcttgctttgaggatagggcctgcgcagtgtcgaaagagaaaactgaaagtttcagttgtagcagttccaaagacaattgataatgatatactttttatggataagacgtttggttttgatacagctgtagaagaagctcagcgtgctatcaattctgcctatatagaggcacgtagtgcataccacggaattgggttagtaaaattaatgggaagaagtagtggattcatagccatgcatgcttctctttccagtggacagattgatgtttgcctgatacctgaggtatccttcacacttgatggagaacatggtgtcttgcgacaccttgagcatttacttaatacaaagggattttgtgtggtttgtgttgctgaaggtgcagggcaggatttactgcaaaaatcaaatgcaactgacgcttcaggaaatgtgatacttagtgactttggtgtccacatgcagcagaagatcaagaagcatttcaaggacatcggtgttcccgctgatctaaaatacattgatccaacatatatggttcgggcctgccgggcaaatgcatctgatgctattctctgcaccgtacttgggcaaaatgctgtccatggagcatttgctgggttcagtggcatcacgtcaggtgtttgcaacacacattatgtctaccttcccatcacagaggtcattacaacaccaaagcacgtcaaccccaacagcagaatgtggcaccgctgcctcacatccactggccagccagacttccattgactacttcattaacacctgagagcaaggcgccaggagaatatttaatcccacaagggactgctaacaggaaacttgaataaatctggctaacccaaaattttgtgaggctggaggagctcataacgaaattgccagagccaccccctggtcatccagacgttgaggagacacaggcaagggtgatgacccttcgtctaggagtcgaaaggacagagaacgtgggaacgtgctcaacagtcacgtcccaagaagccctgtggaccaggagccgtagactaaaatgagtgt

SEQ ID NO: 38164 - DNA, 2254 bp, Zea Mays
ctcagaattcttcgcccgttttctttgccccacagtcgtaaaataaaatctcgtagagactgacgcgttgtcgcggagtgcagtaatacggcacgccgttcaatctaccgggacggcgagacggagaatagaagacgtcagcactcagcagttcagcactgacccgtcggccgtcgccctcccggctcgcaaccgcatctctctcggcttctggcctcttcctagttcctaactaccaccgccacctctaccactggcctcaatctgcaaaccctagccctcgtcgccggcggccatggccgagaccgtcgacgacaaggtcagctactttcaggccgtcaccggcatctccaacacggacctctgcacggagatcctcgccgcgcacaactgggacctgcagctcgcggtgtccaccatcaccgccaacccctcctcgccctccgcttcggcctccacctcctcgcgtgacccggccccttccgctccgttggcggtagatgcggagtacgtcgcgcccccgccgccgctgccgctgccgctgccgccccagcagcagccggggatcgcgtggaagctggtgacgctccccttccacgtggtctcgggtggggtcggcctcgtcgccggcacgttccgccttggcgcctgggtagccgggggcgtgctgtcccgctccctctccctcctcggcctcgcggggcaagccggcagcggtgaccgcctgctagagttgccgccgtcagctgccgaggcggccgacttcgtcgctgagttcgagcgcgagttcggcgctggccgcggcccgcgcttcgtggccgaggggttcgctgatgcgctgaagcgagcgcagcgggaattcaagcttctgttcgtgtacctccactcccctgatcacccggatacccctgccttctgcggtggctgcctctgcgctgaacccgtcgcggcctttatagatgagaacttcgttgcctggggcggtagcatcagaaggactgaaggattcaagatgagcaacagcctgaatgcgtcgagatttccgttttgtgctgtggtcatggcttctacaaaccagagaatcgtgctattgcagcaggttgaagggcccaaatcacctgaagagatgataacagttcttcaacgtgttgttgaagaatgtgctacatcacttgttgctgctaggattgaagctgaagagagactaaacaaccagcgattgcgtgaggaacaagatgctgcttacagagctgcacttgaagctgatcaggccagggaacgtgaaaggttagaggaactgaaaagacgtgaaagagaggctgcagaggctgagaaaaagcgtaaagaagaggaggaagctgtagcaagggcatcccaagaagcagctgagaaggaagctgctcttgcaaggaggaggcaagagaaggccatggctcttggagctgaacctgagaaaggaccaggtgttactcgggttctcataagattcccaactggagagcgcagagagcggagattctacagttctgcaaccgtcgcttccctctatgactatgtcgattctctagactgcatgaaagcggagaagtacaccctagtttcgaatttcccacgcgttacatatggtccagaaaagcaatccctgacgctggaggaagcaggcttgcatctgcaggcgagcttgtttatcgagatagaacaatgatgctgtaagctaaagaaaagccgaaactaaagtacagacgctcctttttcgaagttgttcagcgacagttaaggatttccagatggtaatacaccacagtgcttcagggaggtaggcaaaactggaaggcttgtagccacaccgccatacatatgatttgctcccgttgtcgttgagcagccggagatccttatgtgttgtggattctgaaacttcagagtttccgcggttctcctgatcctctcgatcagagctgggttgcttttgcagcaaaaagtcaggcctgacggtttttaggcgccagaacagtgacaagcctggcctggcctggtcctgttagccgaagtatgatgaagtatttgtttgcctatccttctgacaagttcggtatccaaaaaatggcattttgagagttccaaactggagacaagttcatgaagcgcataaacgatattttagaacttcaggatctggattgcatccacaagataggtatagtgaccgatttattccatacttcacagaataacattttagagtttgggacac

SEQ ID NO: 38165 - DNA, 1041 bp, Zea Mays
cgactatggtgtggggcaccagcagaagcctgggcactctgcagcatgaaggagaggccatcaggtgttacaagaaggctggagaccttcatgatgcaaaatcacgtgtggaggacatttggaagaaaatgaacagtggttttcctaataagatgcccaaacctgcaatgacaaagctcagtacaacagaaaaacaaaagaaaaataaaccaacaaataattggatgactgttctaggcctttcaccaagcaaggcacatagtgtcgatcaaggatccaaaaatgggctacaacagacacaacatgaaatgagcgaggatgctaaaaaacttgcagccaaggcccttgcagctgccaaaaatgctgctgctgtggcatctggacgagggaaagtggagatcactgaggtaagggactttgctgggaaggacatcgaaatcaagaaactggttgatgctaattcaaaggaggcaatcgagaaggccagggcaggtggtgccgccccatcagctgtcgataacatcctagagcaaatacggaagaagcagaagctgagcgtcctggacaagacgaagaaagactggggagagtacaaggaagagaaccggggcttgggggaagagctggacgcctacaagaagagctcgaaccagtaccttgacaagcaatcatttctgcagcgaaccgattaccgcgagtttgagcgcgagcgggatgcccggctgtcaatgatggccaagcggaggacagatacgcgggaggactgaaatgtttccctgtaactccgttgtagacattctttcgagataatggtagacactaaattgtcaatgccttccagccccgttaaatcttcttttttagaattataatgtgctgattataatttacaaagatgcaccgtgcatgtgcgtaaattgcatctggtggttttggcaaacatttctgagctgcataaaatgcagtcatgattggatatttctgaaaccgggaaactttgacgaaccagcagcactaagctctgaaagctcgaaaaactaa

SEQ ID NO: 38166 - DNA, 646 bp, Zea Mays
gaattttttcctcgtgtcatccctgctcctcgcgtgttgggcaccgggagactttccctgcttggtctggcatgggctgtagctgccggacaagcgtgcccctatttcctttgtcgccggtcgtcgactccaactttgccgtgagccagctctggtctccgtttgacctcgtcctgctacgcggttcctagtcataaccatctcggactgcgctatcgcccagatccgaaaccgaactccccaacgccctggcgctcaatgaaatgtccaagcctggccttcgccacattcactgcctttgtgcgcacgctactgcttccgtgccgcaacatacgccaacaactcgagctaatgtaaagtttggtcaactatcattgactcgtggtcgcccctgttccctgcgtacctgtgaattagtcgatgtcgtgagtttgggtgcctgattaaagaaagaaatcctagggttttgtgtggaaaagaaatcatagttcaacgcttgccaaatatctaataaaatgtttgcgctaggatttatcgtcaatttcgcagatccgagtcgtttatggtgtggtgaactatttcactactcccgctagccgactcatgaagtagatcgagtttgtatgttggtcgcgactcgcgacga

SEQ ID NO: 38167 - DNA, 1684 bp, Zea Mays
ttcgtctactgagcccaaggaatagaatcaatcagtgtctactctctccacaggcccaaaacgcctccaagccgtccaagggtactcgagctcgagctacactcggcgtttacggcgccggcgatcacccaccgcgtcctccgccttgtcctctttcctcaacctaacccccatccagcgaggtttctccgctctcatatagatatgaagagggcggcgccgtctcaggagcccctcgacgtttcttccggggactcctcgggctcggattccgatcaattaggcggcaaggataagggcgggagcgcctctaaagctgctgcaggggctgaagatgtgaagagggtggtgctgcataaggaatcccaggacgtatcttctgatgatgaccttagctcggattctgatgatgatgctgggaaggggaatgcttggaatgcctttgggctgcccaattcctccaaagctgcttcgacggcagaaggtgctctgatcaggagggccgaaatgtatcagcaatacatgaagcgcattccggttcctgcttaccgtgattctgtaatcccattcacatcgtggctgggactcgccggatcgctgaagcagctgtatgagcaacccttgcattacctcaccaatgtcctcttaaaaaagtgggaccagcaaaggattgggagcgatgatgagcaccggcgtctggacgctatcatccaccctgccagagctgagaccctggtttgggccactgaagaggtccataggctgaccacctctggccagcacttggctagcctctgggcctcagatcccatgtatcatgctcacgtagatcccgtgtttgcttccgtaaagctggagtagccaccgttatgaattggggggttttggtgtttccatggtgtaagcctgcacattttgatttgctaaaacagcaagtaccaatctagtgacgcgaactccagtccagatgacgcttgttctgagtatgatatcttgtcgttacggttcattttaacattaatcttagctctgtgaacagcagccaggtcaaagaagaagaagaaaaccggtgtggatttcagcgctctgagccggcacggataccatggcggcccatccgtcttgacagttcgtccggcagcggaggaaccgaactggtcctggtccactgggaaagaccgcgacggcaaagaggacgcacacgcacccgagtcctacgaggaacgcgagcgtaccagggccgcagtaaccgaaggggagaagttcatcgggctgcagaacgcgccgccgaaccagctgttgctggagaaagacaggaaggagaaggacgcctccttctcgcagaaagagaagcggaagagggaccggggccaagccagcagggggaagaactacgtcgaggaggagaagcggctcctgaggggcagcggcgtgtactctggctttgacacttagcaaataccaagagctctagcatgtgtgcataccgagggttagctgcctttcatcgtgtgctttggctgtgtttatttgggctttggatgtagctatgcattgcgttcaaatagtaccgctgccatattctgtgtgccatgtcttgctgcattcgcgagttgccattgatataaaaaaaattggaacttcaaatatcttatgaacatatttgcttcaaattggaagttac

SEQ ID NO: 38168 - DNA, 258 bp, Zea Mays
gatgcctcgtgctggaagtcccatcgccatagaccaaagcagagagtgagaggggatcagagggaagaaggtgccgccgccgcagattctgcacgccgccgtgggctgggcttctgaccgcgccaatcaaggagaagaacaggtggtcgaagaggagccgcataacgagaagttcgacttgatctaggtggtgtttccgagtcagctttgtggcgctgggaaagtaatatttagttcgctttacatttatcatttatt

SEQ ID NO: 38169 - DNA, 488 bp, Zea Mays
ctcttggattccaaactacaatagcccaaagtttgctccaattgctgcaattcagaatctgaatttcactaagtctgaaatctacaatttctgacagctctacttgggactagttttagggtttcaattgagtttcatttgtgtttcagcttcttctagggattcatccctttgatccctccacctagagcaaagttactctctagctcaagatccaatcttctcaagtgttacttccactagactaacacttcaaaacaaataattccaggttcttaaagctttcctttaatacttaagactccaagtcatcatattacttgctcaagagatgatcttccctcattttgcttaaaccaggcccttaactaagtccactactcaacacacaacatcacacttgttgtaaagttttaacctagtaaatgcattctaggtgtaacaaacacattaatgcagatgcttgtgatgacatgtcagagttttag

SEQ ID NO: 38170 - DNA, 2038 bp, Zea Mays
taggctgctgttttgcctacgacatcatgaatacgtgattacaaggtggagaagtcatcttatgtggagagtattcttcacatctgccgtggtggccgttgtggtgcgttcagccatgaattggtgcaacagtggaaaatgcggtcattttggagctggaggttttataatatgggacatatctggaggtcaagaagattactcataccaggaattgtttcctatggcaattattggtgttatcggtggacttcttggggcattatttaatcaactcaccctctatataactaaatggcggcgaacgtgtcttcataagaaagggaaacgagtccaaatctttgaagcctgtcttatatctttggtaacatccacgatttcctttgtgttgccactactgaggaaatgcagcccatgccctaagttagaaactaattctggcatagaatgccctcatccacctggcacagatgggaattttgttaacttctattgttcacaagatagagagtacaatgatttagcaaccattttcttcaatactcaggatgatgcaatacgtaatcttttcagtgcaaaaacatttcatgaatacagtgcacaaagcctctgcagttccggctggccagttcgttcccggaataatgattggatctacatatggaaggcttgttggaatgtttgttgtcaagttctataagaaactaaacattgaggagggcacgtatgcactccttggtgctgcatcgtttcttggaggttcaatgagaatgactgtatctttatgtgttatcatggttgagattacaaacaacttgaaactcttgccattgatcatgcttgttcttctggtttctaaggcggttggtgacttttttaatgaagggttatatgaagagcaagcccgattaaggggcatccctttactggattccaggcctaagcaagtcatgagaaatatgaatgcaagggatgcgtgcaagaatcaaaaggttgtctgcctaccacgtgtttcaagggttgttgatatcatttctgttttgcgaactaacaagcataatggtttccctgttgttgaccgtgggcagaatggcgagtcacttgtcataggtctcatacttcgtagccacttattggtacttctacaagctaaagtagatttccagaacagtgctttcccctgtgggccaggcgtactgaacaggcacaattttagtgactttgttaaaccagcatcaagtaaaggaaagtcaattgatgatattcatttgacagaggatgaactggggttgtatttggatcttgccccatttttaaatccttcaccatacatagtgccagaggacatgtcgttggcgaaggtgtacaatctcttccgtcaacttggattgagacatatatttgttgttcctaggccttctcgtgttgtaggattgataaccagaaaagatttattacttgaggaggataacaacaatgtgatgccggagctccaatcgacgagtgggcttgctgaacggcaaaatgctcgggggtaatatacatctggaacgtcctcttcttgacaacctagttattgaatagacacgtagcagcatgtatgtcaaaataattttgatagctagcagttaaccttgcactgcatgttgggacatggcccatgggtattatacttcacatgaatgatgaagcagcagtgagcggataatgcagcatggttttggattctgccgactgttgcgcatggatgttggcgttgcgcatcattttttgctccgtcagcagtggctagggaggcgattccccggtgccgtgtgtttagattaggtgattgtaacttacaaaggcgtccatacatacacaccatccatgtatcccacggtaaatttcgaagactgtatgtataagtacatatttgttatacgatggtaaagacaaaagctatgtaggatttgcgtgctctcatgaaactatgatacgtggctataattacttccggttcccgctgaaatcgctagaattttccattgactacatt

SEQ ID NO: 38171 - DNA, 2692 bp, Zea Mays
  misc_feature (2691)..(2692): n is a, c, g, or t
ccctcgatgtccagcttggcgacatcattgaccatggtgtcgacgagctccgcctcctgcaccccctccgcctcctcgccccttctgctgaggtccgcgtcggcgcattcctgccatagtcggcaaccaataggagcataaaactggagctagggattgcagatgttgcagtgactggacacttttgcccctcgaacaaaaagcgccggcatctcaaacccgacggcgctctcttctctatcctctgtcccctccaccaaaaccgacggcgacgtcgctctcctccaccggtgcttggcgctctccctccaccggggcggtccaccgacgctcggcgagctccaccggtgggcgctggtcagatccgcttggcagtcatccacctggcacatcgggtagctcacgcctccgttggcagtcccaccgccgcccggccctcccccagcgcccccggtgatccggaccgcacccgcttgctcggcctaacgaccggctcctgccccgccgcagccgaagctcccagcgtcctcctgcaggccgagctgaaggttcagcgcgccggtggagttcgacgacgaaactccgtcacgtcatacctctccgcctcccgtcttccagacgtctccaatcggggctcccagcgtctcggagaagaggagcagcacgacacggcggctgtggcgaggaatgctcctgtcccatcccaacccagttagcagccgcccaaggaggaggagatccaatcggcgtgcgggcgtccacggtccatccatcgatccaattccaatctgcaggttgtaggaatcctactgttttgattaaatcactaccgcatcatcaaatatggaagttgatgatgacgtggaggaggatgacatagattttaaccctttccttagggaaggatctccgtctgagacctcatcaagccttacctcagaagcagaatgcgaggaacatagttctgaaaatcaaccaagtaaccatacatatcagcagaatactgtagttaatgaaaatacaagtgacagtgcacttcctcaaaatagattgtcgtctcaagatgctgttaacgaaatgtttccagaagaaacgtctacccaggttaatattgagaatgatggtcacttgaatggattggaaaaagacgttttagcaagcgaagctgcttgctctccaacagtgcaagaccctcatcatctatctctcgaaattagtgaggaagatgcaatttgcaaacggacaagggcaagatactcactagcaaactattcactcgaggaattggagacctttctccaggaatctgatgatgatagtggtctgcaaaatgttgatgaagaagaggaataccgcaagtttcttgctgctgtcctgtctggtgtaggcaatgacacacaaacattccagggggatgaaaatcaagatgaagatgataatgatgcagactttgagctcgagattgaggaggctctagaaagtgatggtgatgaaaatgttgagaactatcacaacacaaatcctagaaaagagaaagatgtccgtaggcctcagactaggcagaggcggccattaactgggatgtctggggctggtagtgatcaccaggaatccaataaaactcatttaagaccaattgtgccatatattccgtctgcattggtgactcctgcgcatgcttttggatggcaatatgctaaccagaatgcctttttcccttcatccttggtttcactaacacgtccacctttagcatgtggatttacttatcagcaactcgggcaattgcatgtgttgatatatgagcatgttcagctccttatccaaacattttccctatgtgttcttgattcatctaaacaagatgtggctaataatgtcaaaaagatgatagttgagttggttggtgctcgtgatcaagcattggccaggagctctcctcaacggcatatcttctttgaaacccaacatctctcatctagttttgtttcttctgataatttggaacgccaatggattccgttaatcaagagtcctattatatccgtccttgatgttgcaccgcttgagttggtcctcgactatttaagtgacgtcgcaactgctgtcgtgaagtatagaaaaagtcatgtggatggtactgctgacaaaacccgcaggaaagagcccctgtttccttcagcagcgattaacagttgcaaacaagtgaataatgtttctcaagatagatcaaatggtgtgcctacagcatcacctccatctgggcagttgcagcagaagaaatcgttggctgctaccctgcttgagaatattaaaaaggatacaattgctcttgttcctgctgacattgcaagattagcacagagattcttttcacttttcaattttgcactctttcctcataagtcacctccttcacctatggccaatagggttcttttcactgatgcagaggacagattattagctctaggaattctggaatataataatgactgggcagcaatacaaaagcgctttcttccttgtaaatcaaagcatcagatatttgtgagacaaaaaaatcgtagctcctccaaagctcctgataatccagttaagggttcaaaatttaatattatggtcaaggtgtccattgagttgcatagtactgtaacaggttagcagttcatagtaacaaattgtatgttnn

SEQ ID NO: 38172 - DNA, 1313 bp, Zea Mays
aatagagttttaaaaagagagtaatatagggagtgatatagaagtttgctatcaatttttcttctctcgtggctccgacgctcctttctttctcggaggcgacagctcgaactcgaatccctcatccagcctggcgctggcgtcgccggtcgccgccgctcgattgcctccgcctgaatatcccttgccccataaggcctgaccttgaaagcctcgcctcttgatcccggcggcggcggaggggagggcgatgccgaagcggacgacacacacctactcgagcgaggacgcactgccggagggccccgagtccgaccttttcgtatactactgcaagcactgcgcctcacatgtcctcatcaccgatacccaattgcagaaaatgcccaagcgaaagactgacagagcacatgttttagacaaggctaagcatctttcaaggctaaatgttaaggaggcaggaaaagtaatgttgaaacgtggtgaaggaaagcttgaaaagcagtttcgcatgagctgtgtgggatgtgacctttttgtttgttaccgatcagaagaggatctggaggttgcccctttcatatacgttattgacggagcactgagttcagttgctgctgagacaaatccacatgatgctcctgtacctccttgcatcacacaactggaaggtggacttgtccaagtagccattgaagtggaagaccgggcacaacgttcagcaataacaagagtgaatgctgatgacgttcgagtaacggtagctgcccttgctgctcgaggggaagctaacagtgagttgctagaatttatgggcaagatgtccatgttgatggcttgtgaaagcaggttcttggcctaagactgactcagatgacccttcaaagaggatggaataacaaatctaagcttctaattgttgaggatttgtctgcacggcaagtgtatgagaagctcctagaagctgtacaaccttaggcacccgagcgatggagcaatgtggtatgcagtatgcgtctggatattctctttcgagggcataggagaaggtttccatctatattgtgcaacaagtggagcagaacgtgtcgagacgaggtcgaaacatggctcaaatgtataactagaccatagcagtatccggttcattgtttctgtcgtgactcagatattgtatcctgtggtctcaagggaggtggttttgtgatttccacattctgatccagactgtttttgtggccacgacgcgtgctcgtgttatttatttgcaaaataaatagatatatataaaattaaagcgtgcgagcatgagt

SEQ ID NO: 38173 - DNA, 3323 bp, Zea Mays
ggcagacaggcagagagctctgcctccccaggatacttcgcccctcgttccaccgcgagcccttccgcgttccgcctctgttccgccgctcgggacccgggagacgagaagtagtagccccatccccaactggtcctaacccacggtacccaatccttgactcggttctctccatgagcttactgccccatctccatttcttcaatcattactcgcctttccgttcaagggcgttgcttgcctggataaccacggcatcgttctacccgccgggcccgagctaagtcatacgtgcaaacaaagagcagcaaaagaagaacaagtggggcgacagggacagggaggaggggaaggcagaggaaatggaagcctctttcttgaggaaagatggcggtgatcaagccagtgcggcgacaatgtccggcgagcacaggaacaagggccttgactgggatttgaacgactggaggtgggacgccaacctgttcctggccacgccggcggccatcgtgccgtccgagtgcagcagcaggaagctgagtcgagctcagggggagatcgacttcggcgtcgtcgttgacaagaggcggaggctctcgccagaggaggacggcagcgccggttgcagcaattctggggtagcagatggagacaacaatcatgtggtgcctgctcagagagggcggagcagcgaggaggagacacccaggaaaggtgccagttcgagcaccactccgtcctgccaggttgacggctgccatgccgatctcagcggtgccagggactaccataagaggcacaaggtgtgtgaagcacataccaggacgactgtggtctgcatcaagaatgtagagcatcggttctgtcagcagtgtagcaggtttcagcttcttcaagaatttgatgaagggaagaagagctgccgctcgcgtctagcacaacataatggaaggagaaggaaagttcaaccacaaactgttgtgaatgggaattccatgagtgaaaatcaatctctaagtaacacctcaatccttctgttaaaacaactttccaggctagagtctggtagctcctctgagccaatcaatcatcctaattctttggttaaccttttgaagaaccttgctgctattgctagcacacagtcatatcaagatattctaaagaatgcaaattcaaattcaatattgtcaaatgctggtaataatgctgcaaatggatctactgtgcatgagcaaactatacggtcaattccaatcagaggagaatcattagcagaagagcctccagtgaaaaggcgggtacatgattttgatttgaatgatgcttgctttgaagaagttgagataaaattgtgttcaagctgtttggaaaagagccaaaagattttcctgtagatctacgggaacagatccaacactggttatcgcattatccaactgatatggaaagctatattaggcctggttgtgttattctaactatttacctccgcctccctaattggatgtgggatgagcttgatgatgatccagcttcgtggatagaaaagcttattagcatatccaatgatggactttggagaaaaggatggttgtatgctagggtacaggactgcctaacactgagttacaatggtagtcttatgtttgcatctccctggcaactggtaattggcgacaagcatcagagactgtgtgtaactcctattgcagttgcttgttcttcgtctgtaaaattctctgtgaaaggtttcaatatagttcagccaactacaaaattactttgtgtgtttggtgacaaatatttaattcaagaagagacacaaatgctacttgaagattcaactgtgcagcaaggccctcaatgcctgaccttctcatgttccttttcttgtacaagtggaagaggattcatagaggttgaagattatgatcaaagcagcctttgtgttccctttgttgtcgctgacaaagatgtatgttctgaaattcggatgttggagcatggattgaatttaatttcatttgatgaaacctcggaaagaatagatgatctgatggcttatcgcaatcggtcgttacattttttgcatgaaatcggatggctccttcaaaggagccatgtgcgagctacatctgagcagccacagtattgtccagaccgtttccctgttgaaagatttagatggctgctatcctttgcagttgatcaggaatggtgtgctgttttaaggaagcttctgaacaccatgttccagggtgatattgacctagatgttccgtcaccaattgaattcgccttaggagaaaatgtgttgcttactgctgttaaaaaacgctcaaagcctttagttgagtttctattaagatacacagcaacagattacgccccagtgggcagtggagccggcgctccagttcagttcttgttcactcctgcgatgactggactgtcaaatattacacctctccatattgcagcaacaatcagtgatgctactggtgttttggatgctttaactgatgatcctcggcagttgggaatcaaagcgtggaagaacgctcgtgacgccactggcttcactcctgaggaatatgctcgaaagagaggccacatatcctatatccaattggtacaggacaaaattgacagaagggtgagcagagctcatgtctcggttaccatccccagcacaattgatactgccggaaagcatgctagccgattgaagcctgccgaccaaatcacatttggtgtggagaaaaaacagcgagggatgaaccaaacattgagctgcagacaatgtgtccagcaggtccagcagcttgcattccactcccggacaaataggttcttgtctaataggccggcgatgctttccttggtcgccattgctgccgtttgtgtctgcgtaggattgatcatgaagagcctgccacaagttggtggtatgaggcctttcctctgggacaagatacgttggggccccaattgatagactgcacaagacccaacccaattgtatcagtgtatgatgaagatgtttgcgccgagcgaagctagattcttgtaatgtacatgtttcttagactaaatgcctaaattgaaatttctgttccatagtaaaacctgtgaaatgctctaatttgcctagcttgtagctccattgcatttgcatcctgactgaggtaaagcttttacttgtttttattgagaggaaaaaaaactcagtcttagcttgaaaaaatactcgaagtctcaccctttatcactggcgggccgttactatctactctgcaacgatcacaaggtatagtgag

SEQ ID NO: 38174 - DNA, 3559 bp, Zea Mays
ctcgctttctcgtccccgcgcggaagcggagcacccaacccaacacgcctccctcccctcccctccagatccagcctccctttcggcctcctcttcctctgctgagttcctcttcctccgtggaatccgcacccgccgcccgcccccaattcggccgggatccttcgattcgcttcttcctccctcgtctatagttgggaaatctcaacgctggggagtcggtcatcactgttgaaggccatgatatcactctgccagggcaccacaggaagttttggcaaactgaatccatgagttttggtcagcttgggacccaaggaaggacaataaggtttggtccgagagtgaagtagcagagtggtgccaaaaaaatttttgcccaacacaccatgcttgaggatttcttcactcttactgagatgaaggaagggatatcaacggttgcaaggatcacagagctcatatctgagatgcgcaagctggaaaactccgtggacatcaacacatttgacgtgataaggcagtgctccacggctgccaacacactagcatccaccaaaaacgaagagtgtcttcagcattttgttcagctaaatggtgtttccattctcaaccattggcttcaggatgctcaaaattgtggtggggacgtcagcaatccagctgctgaggatctcatagttgcgatattgactgcattggactgtcttccgatcagcaatgagcaatcagtctcctgtggggttatgcctactgttggtcacctgctggctcacagaattgccgtgatcaaccaaaaggcaagagcactctgtcacaagtggggcggtgtaccaaaacatggtacaaatggagagcattttcatacagaggagtcaagccacactgaccagcttaagtctccagatgccggccacaagacagaaactaagagaaagtgtgtagtggacgaaggagagcctgatgaagaatcaaaacctgaggtgacaactcactcagatgcacctttgtccgacccttctctgactaatgataatgcagatgcaacagagcaaccagcagggctaacttcaccaaatccatcaaacggaaatgcaacattaggggatgtgaacaacttggtcaggtctcctacatctgcaggtcatgtgggtttagaagatgggcagtccacccccaatgaaatttcttccaatgatgctgaactgcccattaatggcatactccggtcaaactctactaatgcaaaaagtggtactggacaagatgctccagtggaatcaactccagtggccatgtctgtagaccataataaacctggaaagttgtttcctggtagtaaaatgggtctggaggatagtattatttcagttagctcaagtatcaaggagtctcagccatttgcagctggtagatcacatttggagaaggatacaactgaaactttgaaccatcttgcagttgtaacccgtgatttgcaagatttgtccgaggaaagtacaagcaaagaagatgaacctacatcatcatctagtacagatgatatggacatgagcggtgattatatattgcaaagatgcatgtcgagctttgggggctcctccaaggcagcagacacaaaatccactgcattggaaggggagaaatcaacacgaatggcagactttgatgatacagatgcactagaagttgcacgtctggtagctattgaggtggagcgggaagtcattgactacagagaacccttttgtagttctcctgatactaattccaggaatgctgacagtcctgacctggaaggaccacggcagcctgtagccattgccagtgaactgaatgataataaatcttccagtacagaggctaagtcaggaagctcctcatctcataaggaggatggatcaggcatcacagatggcagcggtccgttgagtagaaaacatacacacagtgtcgatctggggaacttagaccttaatgaaaatcagtgtgccgaggaaactgactttaatccgaagtcgatccttagtaattctgtcaatttgtcaatgcctatagctgtggctgcatcaagaggctcatctgtgtttccagctcggctccactttgaaggtggacttgggtggaaaggctctgctgcaaccagcgcctttcgaccagctccacctcggaggactcctgatgcagagaagtcactttcagcttcttcacataaaacaagcaacatattatttgatttaaatgtagctgacaacggcagtgctacttctggtgaaccactttcgacagcaatcctgccagcttcttctgaactaccttccgaggttgcttccaaagcagttgatgtgagcggaggactgaaacttgaccttaatttctcatgtggtgatgaggaagatgctatcactgcaagcaatgtgccgtcattgtggaatcaccaacaatttaatggcaactggagtcagccttctttctcatcttcaaagcaacctgcagccagaaactttgacttgaatgacaacatgtcgatcgctgatgtttctgtgcgaggaatggacgggtcttctgtcaagactccttcaaggccaagggatatgtcggaccattctgccgtcacaattatggcgttctttgccccagggggcagtccatacttggtggatgcaaaaggtgcaccagtcataccaccgctgtcaggtctaagcctcggcatttctcatccatctttcaacaccagagcaacacagccctcatctaatgaactgagttacttccatcctagcgtggatttcagttatggagtgtcatctgaaggcgcacgtagggaagcagggagctactggcccatgtcctaccagggtcagacaatgtttgtggatgaacgcatgaggaatgtatcacaggatggtacttctgggttggtgctgaagcgaaaagagccagagtcaggttgggatttgtacccacgtcgttgagcgtgagcctgaaggtttgttgcagtcgcaatcgattttgtcccactctcttaaaaaggatatgttcaatgctccgtttatggcggcaccttggacattgtattttagggtatttctttggcacgggcccagttctactaggtctgaagacatacacggagaactgaataagagatcagctacaggtagatttgacagatgttgacatggcaaggacattgttagctgctggaaaccacctcgtgtagatctggttctttgtgaatgtattagctttgttttagttgacataatatagccaaattgctctctagggagctaaattatgtaaatcatcatcgtataactcatagatgaaatgcatccctttttatctatctttatttttccagtgttggtgcaagttgtactgtgatcaactatattgtatatatgtcattgtttgaagctgcgcatccaggttttgtactttgttcttttttatttgtcgtggtttagtttaactagcgaatcatgttgcatgcagattgcaggtttagagagtcgactgttagcatgtcggaaccagatgctttatttggata

SEQ ID NO: 38175 - DNA, 1509 bp, Zea Mays
ggttaagattagcaatagtacatgcatccttttgcccggcaaaacggcgtagcatagtggcttcgataattacgagaagggcagggcaggtcgggatggtctctctctctcacccccaccgatctgggaaggcattgtcttgttgtactttcccttccggcagtggcctcgattcgcatctccttttcccgtccatgcgcgcgccggcgggcggtgccagtgccaccgcgctcgcggcggccatgaacattaagcagccgctgcacggcgcatcgacgctgttcgcgctgctctccctctcgctgctcctcctccgcctgctcctccggctccgcctggccgccttccgcgacgcggcgctgtcgctccacctgctggcgcgcctccgcctccgccccgtcctcctctgcctcccgtcagcctgccacgacggcggcgccggcgccggcgccaccacgctgcgcgtctggtgccccgccgccccatcctccaagccgccgctgctcctcctccacggcttcggcggggacgccaagtggacgtgggcgcgcaacctcccgcgcctgtcccgccacttccacgtgtacgtgccggacctcgtgttcttcggcgcgcagtcccggtccgcgtcgccgctgcgctccgtggcgttccaggcccgctgcgccgccgaggccatgcgcctcctcggcgtgccccgctacgacgtcgcggggatcagctacggcggcttcgtcgcctaccggatggccgccgccgaggccagggacgccgtgggcaggctcgtcatcatgaccaccggcgtcgcggccacgcccggggagatgcgggcgatggcggcgcgcgaggaccgcaccgtcgaggatgcgctgctgccggacaccgccgaggggctgcgcttcctcgtaagacgctccatgcatcgccccccgccttggatgccggacttcgtgcttgacgacttcatccagctcatgtacgtggaccagaaaagggaaagggcagagttgctgcacgaactgctcaagaccggagctggcttcgaccccctcccggttcttacccagaaactcttcacgcagaacagggagcggcttgtccatctgctgaaggggattacggtcgggacagagaagttccaagtgacgccaatatctcaggaagtgctgattgtatggggagaccacgaccagctgttcccggtggagaaggcgtttgcggttcagagggctctgaacgggaccgctaggctggaggtgataccgaagacaggccacgctcctcagctggaggatccggctcgcttcaacaaggtcatgctggacttcttgctggcttctcacaagcctgacccctcggttagtggtagcgcgcaataatttaccaaggtgcattggcgattggtcagtggtagccgactcgattgtttgtaataagatcgctggacaggttcagttcattccattaaatcaatggtaaatttcaaaaaggaaaaaaatatggtacaga

SEQ ID NO: 38176 - DNA, 2499 bp, Zea Mays
ggctcctcgcgactcaagaagccacgatatttttcgtcggggtcgtcgtcgtctgcaccgaagatggcgagcgcgacggcgccctccaagcgaaacgccgctttccactagttcggcattccaccgctatactgctccctctcctcttcccaggctatatcgagctcccttccatctcctcctccctcgccgccgatgggtgtggctatttagtagagcagtgcgcgccatgtgtccgccactggctcacggtcacggacctccctcctcttttcttctattgcctgttcatcccgcccatgcctcctcgttcttcctctccaccgccgctcgcactgatccctcttcttgctgccggtcgcgggcaggcgatggctctgggtgtgcatggctcggatgaagtacaccagcgctgccatcggcttacatgcgccagatttcgaggtctgtgtgtcattttggcaccgcacaaccctctcctccttcggccaagacggcacctggacgacgatgtcacgcgtacctctgcgtcgcgcgctatgcgctgctgctcctccggccagtgcagagactggaagacgatgccaccgtgattggccatgacttggtccacgcacataaactgtttgatggtacatcgcactggaatgtgttgttaataagaaagaacaagggtgatgcagtaccttctgttgctactcagttgtgcaggttaatttctgctggcaaggattggtatgggagtttcaaagggaggatgcagtaacttctattgctacttcgctgtaactcagaagacactgtttccagctagcgtgaaggataattctgctcacaaactgaatactctgtttacttactattatcaagtcatttttactgttcgttctccagcggttcacaactttattcttggcagacaacatccgataggttgttttcacctttcaactgagacaacatggtgggcaggcgatgttcttcaacatgcccacatgagcgctgcctccattttctgttggaagacatagagcatatgtcatcagcctccataaaataatgacttgaatccatggtagattcaccatgcaacaacaaatgaagatcatatataaagcatatggctctccaaactcccattcaaggttaggcaaacccaaatccagtagtaggtctccactcacatagtcaaggtacatttgttcatgatccaactacatatctgatatctaggctctgaccggtacgttcccgttccaaatttctccatactttacctacattatgtgaaaggttttttacttttgaatgatcacacatagtttccacttagcttcagatacagtgtaagggtgcataattgtcacgtttcaaggacatctacacaacctcgacaactctttgaagaagcgaaagggaaatgtgcccttgggccatttctagtcattttgacgattaaatgctcaacacattactatgaaataacaatctcggtatgagcatgagcataggctgtgatcgagacaaattgaagatgcaagtccaaaagaacacttgttgggtttgagttttttcatacattgcaaatcctattgaaacagaggaacaaatgtatgattctagcacttagtcaattgttttagtgtctaacaatgttcatctaagtactagagaattcttcaagtcgagacaaattgaaggaaatgagtttggctaagtctggccaaacatgggccagtctaggcctcatctgactgtccggcgtgcaccagacagtgttcggtgaccagcccgctctcgggaaatcgctgttgcgccctggctaaaaatcaccggactgtccggtatgcaccagacagtgtccggtgtgccaggccaccaacggctactcaccgtgcaacggttggccacgcgatcagcgccggccacatcagctcgacattggttgccaggctgcatcaggctgtccggcgtgccaagcaaccgttggtacgcaacagtcagcttggtcatggaaggaaacaaatagttgattgtttaatgtccggtgtgcactggacagtccggtgcacccatgaacagaagacaatccagagttgccaaatgaagaaccaacggctcctaagctccttggggctataaaggggacctctaggtgcatggagtaggcaccaagcatactttgagcacactacaactccgagactcagcgaccatgcctccgaagtgcgcctccgaagtgttctagagagatttcttgagtcgttactctattgttttgttgttgcgctctctttttcacatttgtgcatgttgttgttgtgttgtgctcttgtgtgcgtattatattccctcccttactcttgttttgattgtgatcaattgtgtaaggcgtgagagactccaatttgtgaagatttctcacaaccgggatattgatataaggaagaaaaccgtggcacccaagtttgatctttggatcacttgagaggggttgag

SEQ ID NO: 38177 - DNA, 2287 bp, Zea Mays
ggctccatgtttggtcgtctacaccaggcagcagagcagattcgcccctgctgaaaacgcactcgatggcgtccgcgacgggggtttcctcctcggagatggcggtggaccacgcgacggggccgggcgccgtggagaagccgcggttcgatgctctgacgccgaatgagatgagcggcgggaggccccaattccggaaagtgcccatgccgcagcaccggttcgcgccgctcaagcgatgctggatggaaatctacaaacccgtatacgagcacatgaagatcgatatacgcatgaacctcaaggtactggactggagtctacccatattgggctttcttgttttatgtgaatgagcttttcgtgctctattccttgcaagaaccatagattgtatacttcagatcgccgtcaagaagctcaacccggagagcgtccagggcctgcagagtggcaggataacatggagaacttcaaccctttcggtgagaatggagagtagggtacagggtcaccatagaatgttctgggctcttcagtactcctgtactaacaacgggtacatacctaacagctgccctgcccttagtgacgcaagagaaaatgattgcttgagggtccaactttagggagcttcaatgtgagttttgtggaatgttcgctagcacacagggttctgagatagtatgttatttgcttcaaagttttgctgctgattagacatatggagcttcttctttggacgggatagagtgtattttgtagtcaccctatgcttacaattgtcttcggtccatcacattgaattgtcgttcaagattctgccaggataaacagtggccctgcattttttaactataataataatgttggtagggataccaatggtgctcctctgttaatggtgcttattgccatattgtcatattggaggaagggcttattgtcatattgaaggaagggcttgaagctcaatggaagtgataatagattctgcaaatgctcctcaataggttccagttagtcatctggtattcatagttcatggcattagacagaggctggagaaagctaatcttgttgatgttgtcaattttccatcgtgtaaccgtgttcaagggcatattatcaggcggggtcgagatcggcattgtctccactgtcatatcgtcgagcaaagactggtccaggagcgcagaaacatgcttcaagaaaaaggtttatggctagcaacatcttgttcgattacttcctgtgatgttttaatccataaaatacagataggggttacactgttcagtttggttacttcgattttgggactgcttgcgatcttctgtagtgtttattcttgttcgattacttcgattctaggactgtgattttagttcgattacttcgattctgggattaccaaaatacagataggggttacactgtttacttcgattctaggactgccaaatgtctctactgtttgaaggcggtgtttattcttgtttattatttactagatgtctctgtatgcttgattatgcaagtagattattcaggtagtacatacatttttagttgtatttattcttgtttctattcggtgcttcattcaagtctgcaactttccaatgtctctgtgtgcttgatagcatattatcctatattcttgcgcaagaatctttttggacgcacaagtagttctatagagtttactacatcctttgatgttttaatccatgaaatacaaacttgtatctatctgttttggactgcgttccagagaaagaaatgtagtttagttatgtggttttacagacctatatctatttgtgtaatgcatttgcctgtatatgtgcagcttatgtccataattcttcaagtctgcatatgactgcatcattcttcagccttctagactccttccacttctgccccctcggatacaaggacttcccagacttaggtaacacaacctcttctcttctttcaacatgttgtcatgtggtgctcgagttatggtacaactggagttgggtgaaagcgacatggagccttgaagtggagagttgagctcatgaagcaggacaagagagccaaggtgttgtgccttcatggcttctgcacgagtgagagttttttgaagagtagatcaacaactggcactcttccactcgttatggatatgggtattgcgatgaggcctcatgagctatttgaaaacatttatgtatagttgtatactaatttatgttttatagttgaggctatctaatatattgaaatgtctgaa

SEQ ID NO: 38178 - DNA, 1920 bp, Zea Mays
cttcctccttcgtcttgccccttccccacgttcacgtcacacacaccgcacacccgtattaatagctgcagcgtggccgatgcaacgcgcaaccaccggatcatgcagagacagacggcacagacagcacgcagccggaccgatagtacgatccatcacgtcggtgcacgcgcaataagcgtagcgaactcgctcacacacaccggaccggaaggcgcgcgctataaaaaaaactcgtggtcgtcgtgggatgggggtgtgggtgtcgggcgggccagcagctggacaagcaagcaagcaagcaagccaataatggcgtctcactctcatcggtcccggtctcccacggcgccctgtcccagctgggggcacgcccacgcgccgcggtgccggcggcggctcgtccgggcactgctgctcgtagcggcgctggcgctggcggcggcaggtggtggtggtcgtggctccgcggccgccgccgccgccgccacccagcagaggatcccggccatcttcatgttcggcgactccatcgtggacccgggcaacaacaacaaccggctgacggaggccaaggccaacttcccgccgtacgggcaggacttccccggcggcgtcgccacggggaggttctccaacggcttggtccccggggacctcctagcttccaagctgggcatcaaggagctgctgccgccgttcatcggcaccgacctgcagctcgaggacctgctcaccggcgtggccttcgcctgcggcggcagtggctacgatccgctcacgtccaagctcgcgaataaaaccgttactactactacgtacgtaacaattgagaccgttggtgccgcggccggtgcagacgaccctgtcgagcgccgaccagctccagctgttccaggactacaaggataagctggcggccctggccggggaggaggagatggagcgggtcgtctcgcaggccgtctacttcacggtgatgggggcaaacgacatcgtaaacaactacttcatcctccccatcagacgccaccagtacgacctctcgtcctacgtcgacttcctcgtctcctcggcgatcaacttcacaaggactctgaacgacatgggagctcagaggatagcgttcctcggcgtgccgccactaggatgctgcccgtcacagatcacgctcgcggggagcccgtcgcgccagtgcgatcctgctaggaaccaggcgtcggagctgtacaactccagggtctccaaggagatagagcgcctcaacgcggagcgaagcggttcaggctccaagttcgtctacgtcgacatatactacaacttgctcgacctcatccagaatccagcttcgtacggtttcaaggacgtgagcgagggttgctgcggcagcacggtgctgaacgccgccatcttcatcgcgtaccacagcgcgtgccccaacgcgcccgactacatattctgggacggattccaccccacgcagaaggcatacgacatcgtggtggacaagctcatccagcagaactccaagtacctgatgatgtgaagacagacacttgctgctgcatggcacgagggctctacctttccccgtacaaacacacggcctgacgtcgaccattattcatggacgactccccacatggcagtggcatttgccaaatgtatgatacatattaacatataaatatactatacatgcctgtgcgccaatatcatacataatgattcattagttctagtttgtatgtttttagctccaagtccatcatccttacgacgattattatatgttgtacagaaccaccacagatatgtaactagttgtgacactgacagcaaccagccaaccagaacgcctttacatttgtagaaccgtgtcggtcgggaagtacctcacggtgtgtaaccatatatata

SEQ ID NO: 38179 - DNA, 1734 bp, Zea Mays
attctgatgctggtactaccaatgcatatgccttttatggcacttagatttattatttattcctgtaattacctgagtaccgcttttgtctgtgaaataatttccaaaatatataacaaaaaaagttttagccattctctgttacaagatttatagtaatatacactagtaacttgatttgatgtaagttttcagccacattaaattttgtaccatctgtcaaggttaacataacacatcaattgcttggagtattcatttttcttttagacaaaacttgtcaaggtgacagatatactttattttgtttaagtatctacgaaggatttcctggaaaggcctctagcaggttctcaagtacagttgtgcttgctggaaacaaatatgcccaacagttggactcatattgatcctggtacattccgagtccgtggagcaaactattttagggataagaaaaaagagcttgctccaaattatgctgcatattatccatttggagttgatgtgtacttatcgccacagaaactcaatcatatatctcgatttgttgaacttcctgatattcaactctccagcaagctcccacctcttttggtggtcaatgtacaggtgccattgtatccagcttcattatttcagaatgagactgatggggaagggatgagctttgttttgtactttaggctttctgatggttactcgaaagagcttccaccttcattcattgaaagtattagaaggttgattgacgaccatgtagagaagataaaagcatttccaatggaaacgactataccattccgagagcggctgaagatacttggcagggtggctaatctggaggatcttcctttgagtgcagcggagaggaagctaatgcatgcgtataacgagaagcctgtcctttctagaccacagcatgagttttacctgggtgataactacttcgagatcgacattgacatgcacagatttagctacatctcaaggaaaggttttgcaacatttttggacaggctaaaagcatgtgttctagatgttgggctaactattcagggaaataaagctgaagaactgccggaacaaatcttatgctgtgttaggttgaatgggatagattacaccaaataccagcctcttttgactcacgctgcctgaaataaacgcttacaagaaccagctaaccgtcatttggaattggatgctgagaggtaaccataccaggacccagactcctggagatttcagaccagagccgctgtcgattatcacagcttctgctgaaacgccatcatccgagcttaggtggggcaggtgactcattgacaactggctgctcccgttcgaatccgtggtgctaatgtagtcgtttctttctgaacacggggggaaaaggcggagactgcggtacatgtaaatctgtaaatcattgctggatagctccggttgcctcccttttactacccaacattctagatttagtaaatataactaattctgactatggtcgagtaggtttaggcgttaaagacctctacaacaatttcactatatccgtacaggaacaggatgtcgtcttggcccaaaatatcgtgtacaacttgcatgatgatgtgttgttaactttggaagctctatatggttcagggctatcgtcccaaattatcgtgtacaagtacaatttttatgatgttgagttcgtaacaatgcgaggttgtcggatggtaagag

SEQ ID NO: 38180 - DNA, 597 bp, Zea Mays
ttccatgatttccactgtcattgtgcattctatatttaaatgaaaaatgccaacattatgtacaatgaggattcaaaccatggttgttggttttaaaccaacatttacactcacttagccaatagaacacacatgtctttatgttttatattatatacttaatcataaatagaaaacgtagcaatgtacgaacactttactagtatacggtatacgtcattttctatttccaaagtgccctaattcttgccaagtaattacggttatatgagacaagctacgattacgtccacatatatggttatatcatatcatcaagattgaaatagtatttgtcgatattaataacatactcaatgtctctgtattaaagaatgttcgaagaaactttataagataatccaatgtgccaagtaagtttttattaatttagttaatataatatttgaacctttcaacatatatgtttataattatatatatgcatatgtagatattatatatatacatgggttaaaagggcctacttatgggttaaaagggcctacttataatttttcgcccagggcccctaaaatctcaggaacggccctgcac

SEQ ID NO: 38181 - DNA, 3448 bp, Zea Mays
gtttgctacctctacactcccgtctccacctcgtttcccccgcaggcccgcactcgcaaatctcctccccgcgcggcgcgcctgcacctcccggtccggcgagaggccaccgcccgcgcggccgcgctcctcacactaccacccgccccctctacgcaaggcctagaagcgccgcctccacggctgcacctccgccagttgcgctcctcgcctcgccgctgcctccgtagccgtcgcgggcgccaccatgccgctccggttggatatcaagaggaagctcgcgcagaggtcggagagggtgaagtccgtggatctgcatccgacagagccatggattttgtcgagtctttactcaggaagcgtttgtgtatggaactaccagactcagacaatggtgaaatcatttgaagtcacggatttaccagttcgttcggctaaatttattgcacgtaagcaatgggttgttgctggtgccgacgatatgttcatccgtgtgtacaactataacacaatggacaaggtcaaggtttttgaagctcacactgattacattagatgtgtggctgttcatccaacccagccctttgtgatatcatcatccgatgacatgctgattaagctgtgggattgggataaaggctgggtgtgtactcaaatattcgaagggcattctcactatgtgatgcaagttacatttaacccaaaagataccaacacctttgctagtgcttccctggatcgcacaataaagatatggagtcttggttcccctgatccaaatttcacactagatggccattcgaaaggtgtgaactgtgttgattacttcactggtggtgaccgaccatacttaattactggctctgatgatcagactgcaaaggtttgggactaccaaacaaagagctgcgttcaaacacttgaaggacatgcacataatgtttctgctgtatgtttccacccagagctacctataataattactggttcagaggatgggacagttcgaatgtggcattctactacctacaggctcgagaacactcttaactatggccttgagcgagtttgggctttagggtatatgaaagggtcaagaagggttgtgattggatacgatgaagggacaataatgataaaaattggtcgtgaagttcctgttgctagcatggatagcagtggaaaaattatatgggcaaagcataatgaaatccaaactgttaatatcaagagtgttggtgcagacaatgagatcgcagatggtgatcggttaccgttggccgtgaaggagttgggaagctgtgacctttatccacaaagtttaaggcacaatccgaatgggagatttgtagttgtatgtggagatggagaatacataatatacacagccttagcatggagaaacagatcatttgggtctgcacttgaatttgtttggtcaactgatggagaatatgccatcagagaaagcacctcgaggataaagatatacagtaaaaatttccaggagaagaaaagtataaggccatccttttccgctgaacggatatttggtggagtgttacttgctatgtgtacaaatgacttcatttgcttctatgattgggcagaatgcagattgatacgtcgaatcgatgtcaatgtgaagaatctttactgggctgacagtggtgatttagtaacaattgcaagtgatacgtcattctacattttgaaatataatagggatgtagtttcatctcatttggatagagggggttcagctggtgaggaaggtgtggaagatgcctttgaactgcttcatgagatcaacgaacgtgtccggactgggctatgggttggcgattgtttcatctacaataattcttcatggcgtcttaattactgtgtaggaggacaggtcacaactttgtttcacttggatcggccaatgtatttattaggatatcttgcaaaccaaagccgtgtctatcttattgataagcaatttaatgttgtggggtatactttactccttagtttgatcgaatataaaacacttgtaatgcgtggggatttcgatcgcgcgaatgatgttttatcatctataccaaaggaacaatatgacagtgtggcgcgtttcttggaatcacggggaatgttggaggaagccctcgagatagcaactgacactaattacagatttgacctggctgtgcaacttggtcgacttgaaattgcgaaggcgattgctaccgaggtgcaaagtgagtccaagtggaagatattaggggagttagctatgtcaagtggaaagcttgagatggcagaggagtgtcttctacatgctatggacctcagtggtttgttgcttttgtattcttcccttggggatgctgaaggcattaacaaattggcatctgtagccaaagaacaaggaaagaacaatgttgctttcctttgtttcttcatgctaggaaagctggaagagtgtcttcaattgctaatagaaagcaatcgtattccggaagcagcattgatggcaagatcttatcttcccagcaaagtccctgagattgtagcattgtggaaaaaggatctccagaaggtaaactcaaaagcagcagagtcgctggctgatcctaatgagtacccaaacttatttgaagactggcagattgctctcaacgtagaagctgctgttgcctctaaaaggagtatctatccatcggccgaggagtacatgattcatgctgaaaggtcaaatgagagtttagtggaagcttttaaaaatatgcatgtacatgaagagatggtaccagatgataatgaagatactgttcacgaggttattgaggatggtggagtagagagtcaagaagatgctgttgaggtcgatgcagaggatgacggagtagaagaaagtcaagatgaagctgttgaggttgaggctgagggttcaagtgatggtgctgtccttgtgaatggaaacagtagcgaggaacagtggggtacgaaaaatgaagaaccatcagcataaaagctgtagttgagcaagttgctgactgagcaatagtggattaacggatcagcaacttcgcttcagcggtgtagtttgtaaaggaaattttgtgcttccctttctacatgtagatcaggccttaggcgtcgaagacattttatagcctaccatgaggtactcgtttcacggagatggtatatgatataggtgatcggagtgatattttacatggtgcatatagtagcttgtcgaactgagaatgttttacctgtgatgtacatcggacttgggagctttgtatcattgtgttacaccttttcaatggtggcgaataaatttacagcagatgttttcaatagccttttagtaaatgtgtgaacgatttgcgttgtgctatgttttgttgctgacttgctgtgatggctagtctacttctatacttgactc

SEQ ID NO: 38182 - DNA, 284 bp, Zea Mays
cttggggctgaagtaacagtctcccatcatactccttttatcaagtttaggttatggccatgtcttgttcatttccttgggctataatctatttggctctctacttgtaaccattcttacaggtggagtatctctttgtatattatcacccttacccagtctaattgtgttgtgcgagatttcttattggttatgtctggtaatggtgctatgactaaaactgatggttccgtgacgaaaccgagggcctcctgtggatgcatacacatggttgcgctactcgg

SEQ ID NO: 38183 - DNA, 2452 bp, Zea Mays
gccgttcacattgtggggaaacgtacggccattcccgttccccgccgcccctcgcctccgctgcacgcgatcgacgatccacagccaccacctctgcgttccccaccggagcatcttcaccaatcaccactgggctggctcccgcgttccccactggatttctgcacccagcgcttcttctgaaatttagaaggcggtggaaccgtcaaatcaaatggagggatcctcttacgcgtcaaggagctacagcgaactagctgccgcagcttccggaggtggaaggacgctgagggtaataccgctgcggcatccgctgggttctctgtcgacgtcttccacgtcgccgtggtggcgggcggtggtgggaagggctcggggcatggggccgcttgattgggcggaggcggccttgccgtgtgtggcgtggacacggaactacagatggaagcaggacctccaggccgacctcgcctcgggcatcaccgttggagtcatgcttgtgccccaggcaatgtcatatgcaaagctggctgggctgcacccaatttatgggctctgcttggttggctcattcgtttcattagccattctgtaatatctgggttcactacagcttcagccattgttattggtttatcccagataaagtatttcttaggttacaacgtcacaagaagcagcaaaattataccactaattgagagcataattgcaggagctgatgagttctcctggcctccgtttgtgatgggatcaatttttcttgcgattcttctaattatgaaaaatacaggaaaatccaataaaagattgcattttctaagagtttctggtcctcttacggctgttgtgcttggaacaatttttgtgaaaatctttcatccaccagccatatcagtggttggtgaaataccacagggtcttcccaggttctccattcctcaaggatttgagcatctaatgtcacttgtgccaactgctgtactaatcactggtgttgctattttggaatctgttggtattgctaaagctttggcagcgaagaatgggtatgagttggactctaacaaagagttatttggtctgggaatagcaaatatctgtggttcattcttctctgcatatcctgccacaggctccttttctaggtcagcagtgaatcatgaaagtggggcaaaaactgggttatctggaatcataatgggcataatcattggtggtgctctcttatttatgaccccattatttactgatataccccagtgtgcattggctgcaattgtgatttctgctgttactggcctggtagattatgaagaggccatcttcttgtgggctattgataagaaagatttctttttatgggcaatcacatttatcacaacattagtttttggcattgagattggcgtccttgttggggttgcattctcattggcctttgtgattcatgagtcagcaaatccacatatagctgtcttgggccgtttacctggcactactgtgtacaggaatacattgcagtaccctgaggcttatacgtataatgggatagtagtggttcgaattgatgcaccgatctactttgccaacattagctacatcaaagacaggttgcgtgagtatgagctcaatcttccaagttcaaacaagggacttgatgttggaagggtgtattttgtgatcctcgagatgtcccctgttacatatattgattcgagtgctgttcaagctcttaaagacttgcaccaagaatacaaagcacgccatattcagattgccatagctaacccgaaccggcaagtgtaccttctgttgtcaagatcgggcatcattgacttggtaggagctgggtggtgctttgtgcgagtgcatgacgccgtgcaagtgtgcctacagcacgtgcagaattcatcttcaaatgcgttgaagctacccgtgcaggcatcaggcgtgttgaccgattctgtttcgactcctaaaccagagcagcagcatcaaaagcagcacggcctcttcaaggacctatggaaggcacaggacagtaacgcggatgctggtggtgaggtgcagccactgctccggcaaaaccttgtgtaatactcctacaaaatacggagtacttcctgggatggactcacgccctcgctggcctatacatatacgtgtttatttatttgtctatgttgttgttaacatggtatcgtggtgaacaaaagaaactgaacatgccattgttactgtggtgtggcgttttttgtacacttttgatacctaaatggaactcctatgatttgggtctggaaagggtgtgtgaagatgttttgttccaggttttggagttccgctcccagattggcttgacaagcatgttaattccatgaactctcttccacaaaaacagtacagctgattatcagttttatgtttagaatgagaaaatagccctggc

SEQ ID NO: 38184 - DNA, 2930 bp, Zea Mays
ttccgattccaccccgcggcaccggcaacggcctaccctacgctgcgtcgccgccacctgattttctcgtccggtcgtgctgcactgcatcacaccgattcccacgtgattgcggcgcggccgcgcgaggagtgctcgtagccctccccctcttaataggtaacttggacgaaaaggtatctgagagaatcttgtatgagattcttattcaggcaggccatgtagtagacctgcatgtacccagtgacaaggagagtaacagtctcaaaggttacgcttttgttgagtatgaaaccgaggaaatcgcacaatacgctgttaagcttttctcaggacttgttcggatcagtggtaaaacgcttaagttcatgattgctggttatgacaaaccgtcttcaaatgtcaatacctcagtaatgctcaatcctgtaccctcttcaaatggcaataatccacatatcaggtggtaaacgggaggattggaggttatgtcttttctctcactccttatccatatggttttcaagctttatcaggtggacaagtacacggccatggccaggtaagcaaccgtacctatgattacaataggcaggaatttggttctgttctgagcattgtccatggaggtcctgttatgaatttcctttgcccatggagttgcgaattgaaccagtcgatcatgtacccttcctaggtgcagaagaatgtagtatgtttacagtaggcaggttccagctccacataggttcttgacatggtcacgtctagattttggtaatagtcatgcccaaacatgtaaatatggttgtcatatcctctagatcttcagaagaacgctgcactatccttggaaggcaaaaatcctgtcctgttgtgttctccattgtcccaactctgaagccagcagatgttactaataaaaagagagtgaagaactctaccatgttcgtgccagccacactagtgaatctaactcgttcgggttggattgcagttgcaggaacaacagagagttcctgaatgtaggcaggcatggccaattagttttgatgttgacattgcagaccgaaagcctactagatgacaaggaaactcagttgcagtctggcacttaatatgttaattcgtacactagtgatgcaatggttctgtgtgtcatctttcactgctagcatgatcttggttgccatttggcctttatttttttagttaggtgagattgcccggtgcctgaatacatagcctgtttttatgtttgacgagtctgatggtttcttttagtagcgcagttccacctttcatcatatgcgtaacatttgtaagtcgtacgtacctttcatcttatgagtaagtgtcaaggtcattgtccgaactaccaccaattaagcttgtgctaagtgatgacaagcaacctgtcttctcgccctattgcttcactaacatagtattccaccagcatcctcgcaagaggggaaaaaacgagacggtttagaggacgtgtatcgcaccaaggaacttgctcgtaactcacgacccgaccaaaattgttttattctggaacgagaactgtctacagcagaactacactctatcattgtcgtgtgcaccttggaggcttctccaaggtcagaaccacacttgaagccatgaatcagaatggcattcctctcaactaagtttacttgtgatgcaccctagctcctctactgacccagcacctagggcttctttccttctctctttgtgtattctttggcaaacagagcacatatcatctatatcgttctgtcctgtacttccttccggtaggcttgaaatcatttctgcataagcacagcaactcccggttgcagcagttttccctcaaaactttttgcgtcgcagcagcctttgcacatcggacatacttgaaggcttgaagctgtcgtccttacagtctcatcgaccgatgccacagcgacacatgcacgaacaagagcacctgcccgactgagcgtgcacgacctcgcgccgatcagggccaagaactcacccccgtcgtgtgtgccgatggaggtggaggccgacgggatccaggaagccaccgcaggcgcaggagacggcggcggcgtggacgatgtcttcttctgcgtcgccgcgacgtccaggggcaacaagaacagcatctcctacttccacaccaacgcggtcggcgaggacgccgagtcggcgctcgcgctcgccgcgctctgcctcgaccacgcccccgaccaccaccggtggcaccaccacaccgtcgccggggcgaagacgttcgcgttcctctcggccgacgacggccgcacgtacttcgccgcggccgacccgagccccggcgccgccgaggtggtccggttcctggagcgcgtccgcgacgcgtgcgacgccgcgcccaggaagcgcctgcgcgacgaggcggtggcccccgtcgctcgccagttcgccaggacgctgcgggcggcggcggcgggcccgagctcaggcgcggagctaccggaggcctcgctgcaggcgaaggagccgtccacgccgctggcgccggtctgcgagaaagacgaggaggagcgccagagggccggagagcgacgtcgcgccttcttgcagccggaggaaagcgcaagcgcgcttccggggtggcgcccgtggtggcgccacgcgtcggtcgtgatcgtcgtggatgtggtgctgtgcctcgtgctgttcgccgtgtggatgggggtttgcaaaggcttcgggtgtctgacgcgatgaaaatcgcccgagagcatgcaattgtaaatttgtaatcacatccatgctgtgtgcatggttcgcgttctttatgttaatttgcttgtcagatatcacatctacaatttgaaggaaaaaaacggtttaagaaacgaagacgcatgccttcaatgcacaca

SEQ ID NO: 38185 - DNA, 2108 bp, Zea Mays
aatctctcctcgttgtcgccgcatcccagtatcccacggccggccggccacccacacccacctctcaactacgccaagccaagcttagcgaaactcaggcgatcggaccacgccccaccgaacaagtgcagcgcccgaccctccccacggaacgaagcttcggcgttctcgtcgccccgtcgcaagatcacaagtccataacaagaaagacaacaaaactatgctgaaagatgtgcttgcatagaagatacttctgctgcaacaccaccaagggcctagtggctcttgcgcaagatctgcaggcctgctcgtctcttgacttgagcggcggtcaccttgtccgcatctactccacgcccttcagactccgacgccagcaacctataaggcgcagtccacctgattgacaacagaaagctagccttgtgcgtgatcacacagttttcatggatataaaagatatgaagaccagagggaagactttgacggagcggtatgagctggggaagctgctggggaaaggcgcgttcgggaaggtacactatggaagggaccttgagtccaaccaggatgttgctatcaagatcatggataaggacagggtgctcaaggccgggctctcagagcaggtaaaatgtgagatcacgacgatgcggctggtgacacacaaaaacatcgttcgtctccatgaggtcatggcgacgcgaaataagatctacatcatcatggagtatgcgaaagggggtgagctctttgaaaagattaagaggagcgacaggctcacggaggctgacacacacaaatacttccaacagctcatcgatgcactagatcactgccatagccgaggcgtgtaccatcgggacttgaagcctgagaacctgctgctggatgagaatggggacctcaaggtgtctgactttggactgagcgcgttttcagagtcgaggaggacagatgggttgctccatactgtctgtgggaccccggtgtatatagctccagaggtgatcaagaagacaggctacgatggtgcaaaatcagacatctggtcttgtggtgttgtcctctttgttctcgctgctggctacctccctttccagggcccaaacttgatggagatttatcggaagatacatgatagagattttaggtgccccagttggttttcacacaaactcaagaggttgctatacaagatcctgaaccccaaccccagcatgagaccttcaattcaggagataaaagagtctacctggttccgaaaaggtcctagggagatcagtgcagtgaacgagaaagttcttagcgagaatgccaccaccacaaatgctgccccagtgcttccttctaggcgcaaggagattgctcacgaagatatgaagtccttggttgccacaaacctcaatgcctttgaaatcatcgcgttatcagcaggattggacctgtctggtctgtttatcaaggagtgcaggaaggagacaaggttcacttcagataagcctgcattgtccatcatcgcaaagcttgaagacgtcgcaaaagcactgaatctcaggataaggaagaaggacaacaacactatcagcattcaagggaggaaggaggggggcaatggtgtccttaagtttgacacgcagatctttgagatcacaccatcctgccatctcgttcagattaaacaaaccagtggcaatctacttgagtacgagaaactgttggaagagggcatccgaccagggttaaaggacgttgtctcggcatggcatggagatgatctgcaacagaagcagaagtagcttcggatgtctcctgtagattctattctagtacatttcattccttatttttttagcagctacattccttttttgtattggtggtgatatgaaccattaggttgtgttttgttcagcaataattgttaaggagctgagttattgtgttacaacctaatgattgttacaattttataatgaaaaaatgttgtcgatccttaaaaagggtcgagctttccaggagatccattagtagtttgatgtgtaccagatgcaaccacgttatcctcttgcaaacattatgcagccctgcgtgatgcatacaaatct

SEQ ID NO: 38186 - DNA, 2823 bp, Zea Mays
agctccggcgtgtctctctgaggagtgaggacgaagaggccccaccgtcacgtacgcctgcatgtgtccacgagtcaccgcaccggcacatagttgtcttgttgttgtacacgacgcacgcatccccgccccgccctcggccctggtgcatataaacaagtgttgcgtgatcggcggccaggccactgccccttccagtctcgccgtcgccggagataggccgccgccgccagccggaacgcaacaccgcagcggttacctgcagcggacggcaggaacctagtcctccactgctctgcctaccctacaatcgggatctcgcgggcttcattaggggggaaaatcgaccagcgagcgagtgcaagaagctcctgttcgatcgatctcgggagctccgatactgcgcgcaatcccaaatttgacacagagtcacagcaatgtcagtgagccatgccgacgagcacgagatatctctgtgcgaccccagctccgaggacgaccggcggcgccggaagatcgggtccctgccgctcaaggctatccacgcgctacggaagaagcgcgcccggcgtcgcgtcactgacttccggttccccgcggccatctccatcgaggacgtccgcgacgccgaagaggagcgcgccgtcgccgccttccgcgaccgtctcgccgcgcaccgcctcctccccgacaagcacgacgactaccacatgatgctgaggtttcttaaagcaaggaagttcgattccgacaaggcaatgcaaatgtggtcagagatgctgaggtggaggaaagagtttggtaccgacacaatcttggaggactttgagttcgacgagctcaacgatgtactccactactatcctcagggctaccatggcgtcgaccgtgaaggccggcccgtgtacattgagaggctcggcaaagttgatccgaacaagctcatgcagatcacctcggtggatcgctacatcaagtaccatgtgcaggagttcgagagggccttcagggagaggttccctgcctgcacactgtcagccaagaggcacattgactccactaccactatactggacgtccatggtgtggggttcaagaatttctcaaagaccgcaagggagcttgtccaacgtatgcagagaatagacagtgactactaccctgagacgctacatcagatgtatgttgtgaatgcaggcagtgggtttaagttgatctggaacagtgttaagggattcctagacccaaaaacttcttccaagatccatgttcttggttccaactaccagagcagacttatcgaagttattgactcaagtgaattgccaaaatttcttggcggatcatgcacatgcagtgagaagggtggttgcctcaggtctaacaggggtccatggaatgaccctgtcatcatgaagctaatacacagtatggaaggtggtagtactagagaaataaagcaagtttctgacggggacgaaagaagtggctcttccctaagggcagaaaacctgaaggcaagggcatgcttagtgacatatcaaatgctgaatctgagtcggatgttgatgacgttggtttaacagttgtccaaaagagtacggaccacagtttactaaccccagttcatgaagaagtcaaggggtcagatacttcgatattttgtagttctagcagtaagcatctcctagatacaactcctggagctcctcaggccacccctcaaatggagatgcccattcagttgacttgccgtaaatattttcctacctttgggtggctaaataatttagggaatgcttacattagtttgcatggtacatccgctggaaggactctggaaaaccttgctaccggactgatcacactcttgatcaggatatcatctttcttccacctttccgtctaccggcaagaaagatttatagaaaccgtccaaccctgtgccgcggcacaggaaccagaacctcaaagggaagaggacatgagtgcttgtttacgacgcctcaagaagctcgagtcactgtgtgatcacctcatgagcaaacctccggatatgccgaaggagaaagaacttgtattgatgcagtccttcgatcggataaaatccctcgaggctgaactggaggcgacgaaaaacgcgctgcaggctgcggtggaaaagcagatggaactggtggagacggtagaagctctgcagcaccaatcgaccagcgttaggaggagattttgctgttcataggagtagggttgtcgtcgtcgcgccgaagctgtctgggttagcaaataatgaacctgacgctgcccttggcatcttgtttttgctcgacttctgaagcgtcatgacgccaaacctgtcgctggctcggcacactgtatgcgcggatgcgtgtgaaatcgatcattttttttgtagctacactctggcttctgtgatctccagagcttgcaaaatgtcaaagctttcgctgccctactgctgcgtattgttgagccgtgtcatttgcccttggcatttcgaaccatccatagcgctagctatttttgaccgctcccctcccatttgagttcttgatcgactcccgcccgcgtgcaccggcgccaacctctgcccacgcggccgcgcccctccgcctccgcgtgtcactcccgcacgtttctgctcgcctggtagtaacccgaacgcgcattgccgcgccgtcaagggtcgatccgatcggggaggaggcgtgacaagagatgggtccccacggaggcattgcgctccgcgcagccgtactcgccgccgtccgcttcgccgccgccgggttcatctcaagtcag

SEQ ID NO: 38187 - DNA, 2246 bp, Zea Mays
ctagtctgtcatatgtggacgctatgatgcatggacagtgggcttcttagggcctttatgggccaggaattcgtcgaagcctgaaggaaggaaaaaaaaaacctaaagatggtcgctgccaccaggtagtttccaggcttccacgtttcactccaccgcttgtttccagttaccaccactccacttctaggttccagccgtgccggcgccgccgcttgcgctactctgcgcgccctcgccgctgcttgcttgctcgcaacttagaaggtgacgccgcctgcccagtgcgagcacgcctccacttgcactgcgggctgcggccctgccgaatctggaaggtgtcgagaagaaatagatccttgcactccatgccgctatgatcagcgctggccgcagcaggcggcgggggcgggcaccggcgtccctgcccacgaccacgaccgctgcttcccgccggaccgagcactccatctcctgctgttattgtgactgcaagatatattccttaaacgacgccctcttcaatttggggtggaagtatgctagatatatgagagcatggttttctgtaggtgtttatctatctctcattgctttagtcagtatatccttgatgctattgtgggagtcaattggtgtgttttattttaggagtggattccttagtgcctggttacagaacctactgacttcaggtctcaacatatctattgtagacaccacaatcattataatgtcaacaatcctgtctattgtttttcatgagtttggacatgccattgcagctgcaagtgagggactacagattgaatatgttgctatatttgtcgctgtactttttcctggggcatttgttgctctgaactatgacctactacaaaatatgcctctcttttccatgcttcggatttattgtgcagggatttggaataatgttatgctctgtacagcatgtgtgatgataacattgttacttcctgtgatgttatatcctctctatgtgagtggtgatggcctcatggtcatggaagtccctgaaatatctcctatgtcagaatacttgtccactcatgatgttattctttctgtggatggtctgaaaataaccagaactgatgattggatcaagattctgaaccaaggtactacagcgaaatctagggatcctgaattccttgaaggctctcatagatatgttgccactagttctaccaagggttattgcgtgcccgattcatggatagatgcaagcaaaaatctctggcagataagagacaagctgccttgcccagatgaactgatagccttcgaaaaagttatctgtaacgtctcaaccattttgacagagaagactagcataggtagtgaccagaaggaagttgagggaaaatattgtttgattgcgaaagatgtagtaaagcttagaagatgtggaaacggatggcacatgactgaagatgatgaaagtagctgtgcatgttttgaggatgagcactgtttggtacctgttctgaacccaggcttttcatggattgaggtctcctatgccaggccatactctttgagatgtttacaaaaaggaggaaatttgttatcatcacatactgcaaatagtaactttggacagagtccttgtgaaggatcttttgtttatgtgggtgatctgtcatcagcagcacgttcggttaggttatcccgctaccgacctcgatgggcacttctacttttcattgcagacatcccatatatcttggaaaatggtttaagtagcttgcttcatgcatctgcagcattggctgtaatcaattgcctaccggtgtattttctggatggtgaagcgattctggagactaccttaagctatgtagcttggtttaccccaagactgcaacgcagaattctaaaagtatgcagcgtggtgtggacgggtttattagtcattactttctcaagtatttgttattccacagtgctacattatggcgtatagcaaataacccatgtaattttgtcttgaacaaagagaagatcattttaatggaacatgccaactgtactctgtccattgtaaattataagttgttttgacttttatatatacataacttttgttaggctatcttcagtagactatccacgtactcatattcaagcttcactccttgaatagtgtagtctgtagtgtaaaatagtgttttaggtgactatatggataaactgttggatatgacgtatctacactaggt

SEQ ID NO: 38188 - DNA, 3482 bp, Zea Mays
caaaaatctcggttaaacctatcttcccattttgttcctcgtcgagctcctcgctccgcagccaatcatcctcagccaaaatttctagaacctcgcgcagtcgcccgcaccacgccaatctgctgctgctctcgatggtgcgcctccatcagctcctctctcgcacgcttgcatctcaccaaatcctcgcttctgccacctccagcgtccgctccaccccgcggctgcttctccctctccggttgccgccgcctgctcctcctccccatggccgtactctgcttcccatcatcgtagccgcgtcgcgtcaatacgcctcgtcgaccttcgggaggcgagggcgctcgacgcggccgccgatgttgctgaggcgcaagagagccaggagtccgacgcggaagggccctggcgagctccgcgtgcaaattggcatagaggaggcccttcccgacgaccctggaatcctgagcattgcagaaactcttcggacggatgttgggaaggcagtgaagctggccctcaacgaccttgaaggctcggattacatgaccagagatccttctatatgcaatgtggacaagtatgctagcattgaggtctctgtgttgctttgtgatgatgatttcatcaggaagctcaacaaagaatggagggatgaggatcatgctactgatgttctgtcaatgtctcagcatatcccagagcttgatattcccattctcgacggcaagcagaagaaaggggacacacacttgttgatgagataagaatcctcatggtgcatgggctattgcatttattgggctttgaccatgaagtcagcaaggtggctgaagaagagatggagaaggaagaagaacatattttaaatactcttgaatggagaggaaagggattaattaagagtgcttatgatattgctactgttatggaacatttacaaaattctgttgaggctgatagcaatatagagaaagtgatcctacaagagaaacatcaacccaaactaagccatatcatctgtgatatagatggtactatcatggattatgaaggtggtctgcatgaaaaatcaataggatctttgagagaggcaattgcaacaggagtaaatgttatcatggttactggaaagagtcgggcttccactattagaaccttcaagcttcttgatttccgcgaaaaaggtgattttatttcagagacttcacctggtgtatttttgcagggttcacttatctatggaagggatggcaaaaaagttcatagagcagaattggatttagatgtctgcaaggaggcattgctgtactccttgaagcatagaattcctcttgttgcgtactgtgaggaacaatgtctaacattgtttgaacacccatttgttgaattgttgcacactgtacataatgaaaacaaggtaaaagtgatgcattcaattgaggaccttttggaatattcatctattcagaaattacttctttttgatagtaccaaagaggattcatctgtcctaaggcagcatttttcagaactgagcagagggaaagcacatgttatcaaaatgcattcaaatacaattgatattgttcccctcaatacttcaaaaggtggtggtttaagaattctacttgatcatcttggaataacaaaagattgcgatcttgattctattggagactataccagatggctaagcaataaatgattcaactgacatgattactgggtcgttcttaagaaaaaaatgtggaatcgtaggcgcgccaaaggaacaaaactattgctctgaaggttgcaaaaattgtatgtttgtagcaccatctcttttagttggcaattcatgtgtttttatatttcgaaaaggattgggtggtgaatgtcagcttagatatttccttcagatcattttgttgagatacatgtgaagagaattgaatgggccacatccttgtgcaactggagcttaccatgtgacatttgcttttgtccaaagtcatctgcaacaccatttttaactctacatagatttttttgtagttttgttttgtgtagcatagcattgataaatgttgctaaataaacgagttaatggtttctccacgttgttgatatttgttcgaatgaaactaatgctgaagtataatttatggtcaggaattcaatggatgcattgtgatgacgataactgtattttctgccatgttgggctttgtttattatgactcaccgttactcattacatccatttgattgatcgatctttttatttatcatgaaatgaagcacataagaaatcaggttgattgtagaaacaaatattgttcagattttcatgcataaagcacacacgaagcacagctcgtcaatggaaagtggaggcttgtcaccctagttttccctttgttacagatcaatatgtgttgcaactctcttgttctggtgggcatatgatttagtgctgatgttcaaattgctggtgttgctagttcctggcattactctagcaaatgaaccatttgagggcctctttgctatcatcttgttgcacggccttgatacaatgattgtccgttggttcatgtctaatcctactgaatagcttttgcttgctctcatcctcttactgtatgaaactttctttgcaaggtcttgaacacttgtagcatcagatatagacgtgaatgattgggccttcccttggtagtaattggacagccctttcctgtggaaatcgtgttaattgaacatgagttggaatgctttgcatctgaagtgaaatttatagaacgaggataactcatacaggggaccctcggcgtccagatgcaacgtgctcgaagatgctgaggatggctcagagcgatggccaggtggggaagaagttgcatcatcagacacgttggaagctgatgagcacaaggacccactggacgcgcccgagaaggaattgtaagactcggagctttcgtcacctggtttattgcaaatctccttgtgacacgagggtactccatgaggtgctaagttgtaaggctctgccattcaatgttttgacatcaaagggacgcagcttatgtggatatatataggagaaaaagggagagctatccaagtggttggataagcgtcttgtttagtcggagaaattttgtgaactcacggccggagagcgagtgatagttgcccttactccatgtgatcttgatagattagtacattaatatttcttcatttcttgtgctattttattacttatgaactccgtctcttcgttgttgacatgaagcaagaaatggacatctgtcacttatttggataaatcaatgataacttagctgatggggagcatgcggaacaacgcccttcgggctgagacagacaagcatgttacctccggccaagaaaaagagagttatcccagcggattaggaaggataaggtagattatggcggcaagaaggtgctttctgttagcctgg

SEQ ID NO: 38189 - DNA, 1206 bp, Zea Mays
cggggtgaaaaaaatcttctcgccgccgagcgctcctatccttatccccgccaccgcccttggtctcctacaaacctccggccagcgctcctcttcctcccacttcccagcgcctcctctgctttttcctctgcgccgccgtcttcaagcttgaagctccagcgctttggccaagttcgccccatgcatggtgcccggatttctgctcgcgtccggcttcctctgctccttgcttcttccttctctctcgcacttgccgtggagcttcgttttccagcgcctgctccatccatggccggctgcagctcgctagactgtctctgctctctccatgtcgcgcttcttctcccagcccagccagccgcttctccctgagctcggctcctgccttccctgctgcgcgcgctcctctccctctaccctctcactgccgcgcgcgtcctcccatggccgcggcacccctgctcggggtttcctggtgccgtgcttctgcgcgcgctcgctccagctcgaatttcctctgcccagccggattcctctacgccgaggccctgctcgaccgcgcgtccttaggttccagctcgccgtcgaagctctcctgtcgcgcacggctcccatggcgcgcctttgccgaactcgtggtcgtggtctcgccttgctgccgcagccgcgcctactgccgcgcacggcctgctccctttgtgcgcgctctgcttcctcgccgagctcgtccctgcgcgccgaggtcgcgcgcagctctcccagcttgtcggtgttcccagctcgccctgtctgcgcgccgcgctcccttgtcgtggttttctgcttccttgtcgcgcgcgcaacatttcgttgtccctcgtcgtgccgagttctcctctgcacccagtcgcgtcctgtttcctgcttaccagtgcgtcctctcggctcgctcggttttaattcctaatcgcgtcgtcgaccttgttgttcgccgtcgttcgtcgtcctctagtcccagttcgatccacccgtgcgttcgctcctcatctatcgggcttcgcgtgtgcttgtcgtttgccgtcgagtcgtcgaacccgttatccgttgctcaacctccacctcgccagctcgctctaaacacgatctcgtcgtccgcaagtcaccaagaaaccctaagaatcgggtgaagacggagcaagcaacgtggtgttcaccaagtgcgcg

SEQ ID NO: 38190 - DNA, 3161 bp, Zea Mays
agctgcttgctccgccgccgccgccctcttcctcctctactggttgcagcctattccaccaccgacgctgaaggccatacgcccccaatcgaatcgatcacatctatgccgtcgatcaccagaggtgggcgtggggggctcttctccacgcaccggggcgcgctcttgtggctccgccgttgccaaagcccactcttgtcgacactagccggcggcggaggccggagcgacgcgccacatctgcccgtactcatcgtcggagctggccctgttgggctcgtcctctcattcctcctcaccaaattcgcactatagccctgatttgaacaaacagatctactcaatgttaccaatccatcaagagcactcgggtttgagtaacactttcaaacatcaaaacccatccggccaccatatgtaacccaaaagttccaagcttcatcggaactgctaaatgtcataccaatttgtggaattcaaaaaggaattgcagcaactatgcggttgtaaataatgcattcagaacacgaccaactggatgttctcatcatttaaagtagaacttcaaccatgcagaaacgaataactaagtaggagtagagcacaaaccttgcaggtgattcctcgagcagctgctgggtgttgtccatcgcaacatcaatagcttgttgggcacctgccggcgtgcttggtgctcttgtggagattgtacaggatctcgggtagactgcacagcgccaactttcttcaccacggacatttttttagtaccagcacagacaccttgctgcctccacaatcaacgaattgagagtgcaggaggacatcagctccagcacgtgcagggcagcacaggtgacggtgccttcatgcttcgtgggaagaggcattggggcaacgaatggaggagcaggcgaggaggtgcacacatggcagaggtggccccggaggttccaaggagcagagaaggtggcgggggcttgtaaaatgtggcacaatgagcatgaggtgctttgcccttcgatttgatatggacgaccaagattgtgagactgctacagttgcagtctctagctactgcaccagatccagggatcaaatgtgcggtgatagagaagaatgtggagttcactaggcacccacgagcgcacttcatcaacaaccgcacaatggagatcttccgcaagttggatggcttggccagggacattgagaggtcccagccaccagtagatttgtggaggaagttcgtatactgtacttcactctccggttctgtccttggatcggttgatcacatgaaacaggaagattttgacaaggtcattagtcctgtatccgttgcacatttctcacagtacaagttagttgatttgctactcaagaagcttgaaggtattggtttccagacatgctttcccagtgagattggtaactcaacacaagatttggtactggaaagcaagatattgatgggacacaagtgcacatcccttgatcagactgatgagggcattctggttggagcatcagttaacaatggagggatgataatagagagaaagctacactgtggtcttcttatagggacagatggcgcaagaagtacagtgcgtgaattggcaggtatatctatggaaggtgaaagggatttgcagaaactggtcagtgtgcattttcttagcagagatctaggcaggtatttgtccagtcagaggccagggatgctgttcttcatttttaatccaggtgcaattggtgtactagttgcacatgacctagagaatggggaatttgtattgcaggttccattttatcctcctcagcagatgtttgaagattttagtgctaaggtatgcgagcaaattattttcaaattagtcggatgggagccagcagatgttcatgttttagacataaaaccatgggcaatgcatgctgaagttgcagagaagtacatctgctgcaataatcgagtaatcctctctggtgatgccgcacaccggtttcctcctgctggtggttttggaatgaacaccggtgtccaggatgtacataatttggcttggaaattgggcttactgctgaatggtgtcgcctcaccatcaatattacaaacttatgagtcagagcgccggcctgttagaatcttctcacacgctttctgttcatccaatcgtggagaatttcaaggcagctatgtctattcctacaacccttggccttgatccaactgttgcaaactcagtgcatcaagttataaatagaagcctcggatcaatcattccaagaaatgtgcagaaggcagttctagaaggattgttttctcttggtagggcacaagtctcagactatatcctgaatgagaaaaatcccattgggtcgttgagactagcaagattgagaagtattctcgatgaaggcaaaagtcttcagctgcagttccctgcagaggatcttggcttccactatgcagaaggtgctctagttgttgaagctagttgtgagaagactcatgaaggagaaaaactacagcattctaagagggcatcaagagagtacatcccatctgctaaggttggttcgcggcttccccacatgctagtaagagaagtgcctgcttcgagtgagggcgcgttctcaacactggacctagtgagtggggataaactcgagtttgttctcatcattgcaccagtgaaagagtcatatgagattgcccgtgccaccctcaagatagcagatgagcttacgctatcagccagagtatgtgtaatgtggccacgaggttcgactgatgctgaagtggaagagagcagatccgagttgacaccctggacaaactacatcgatgtcgaggaagtgcctagggtgtcgggtggttcatggtgggagatgtgtcgtattagtaggaagagtgtccttttggttaggcctgatgagcacatagcatggctaacagaactggacagggtgagggatgctgagtcagaaattaggagggtcttctctcatgttctgtgcctaaatagccaccgggtgtaagaatttataaatttccttccatttaggctttgtttagatactttggtattcactttaatccacatgtatggaagcggattaggttataaattaaattaatttacatcctaatccac

SEQ ID NO: 38191 - DNA, 2270 bp, Zea Mays
cttgcatcctatactcttttattttttatttcttttctcccctttgtcggttcttccacttcccgaatcccgatccatccgcatagcactgagggcggcggccgcttcctctcctccgcggccgaggtcgctcccccgcccgccgcctcttgcccgcggccgatctcttccctccgctcgcagcgtcgcagcccgtaacgagaccgcgctcggttgagcaccacctggggcccagcgccccagcgtcctcgtgaccacctcggcgcggcatccgccctctgcagccccggtgtctccgcgaccggctccggagcatcattatttatagaatacgatctactttatagctgatgacaatgtctgcttctactgctgcaattcgtactgcgaatacaaatggaaaccatgcagtaagttcggattcacattctagccaagatgctaggcagcgaacagctggtattacaaaaagaaaagcattgccttcgattcttcaaaaaattcctagcaatgatctgagtcatactatccgaggagaatcagttcttcaaaagtcaaattattcttctgaaggaagaaaagatgtggttgcttcagcaactgctgaacgccaaaacaaaaacactacaaatgtggttgcttcagcagctgctgtacgccaaaagaaaagccctactaaacaagaaaacgccaactgggtaactgccttaagtgtgctggtgaagctgtgtcttcttatttcagctactgcttggatggggcaggtgttctggagatggcaaagtggtgaattatcatttacaacactggatatggagaacaggctatccagggtggaagggttcaagaagacagccaagatgcttcagctacagttggatgttttggataaaaagctagaaaatgagattgacaaagcaaaaggggtcattgctaagcaatttgaggataagggtaataagatagagaaaaagatgaagattttggaagacaaaactgacaagttggacaagtcactggctgagcttagtgacatgggatttctttctaaaaatgagtttgaggagattttgagccagttgaagaaaaagaagggattcggtggtacagatgatgaaataagcttggatgatataaggctatatgccaaagatgtggttgagatggagatagcaaggcattccgcagatggccttggtatggtggattatgcattgggatctggtggtgctaaagtggtaagtcactcagagcctttcatgaatggcaagaactatttacctggtcgcagcaatgtgcacacaacagcccaaaagatgctggagccaagttttgggcagccaggagagtgttttgcagtgaaaggaagtagtgggtttgtgaaggtgaagctaagaacagcaataattcctgaagccgtcactctagaacatgttgacaagagtgtggcctatgatagatcaagtgctccaaaggatttccaggtccgtggatggtaccaaggaccacatgatgattcagaaaaggattcaaatgtgatgtctactttaggagagttctcttatgaccttgacaagagcaatgctcagaccttccaactagagagaaccgctcaatcacgtgttgtcaacatggttcagcttgatatctcctcaaaccatgggaacttggaacttacatgcatctatcgcttcagggtgcatggcagaaagcccgtctcccccagcactggaggatgaagccctgagctgtgacatgcgtgccaaagcgcgacaacattcttgcagcatttctgcctataggagctttggttcagcggttagcggttagtcggagcatttcagccagcgccgctgcaccagtgttgataatgttgattctattctcgcacattgttgtgaacagctcggaaataccttgcgaggtttccttaagctgttcctagtttggcatcaagttcgcctgttttctctgctcctcctcccctcctgttaagactgcagcttagtattccgtttgaaattggtcgtctcatttcaccaggactcgctcttaaaaagaagactttgccattatatggcctactcagctagggaggaaaagaaggggaatgctggggccaactgccaagctagttatgcacttatatctaatctattgatttgaatatgagagcatgccaagctagttatgcacttatatctaatctattgatttgaatatgagagcacgcaagttcttcatctgttgtttgagccttttcagcttct

SEQ ID NO: 38192 - DNA, 1619 bp, Zea Mays
ctggtcctagacttcaaacctatcactcatgcacaacaggaaagcatacaaccgaaaaaccaatcacaaaagctgtttcatctaaccgtacaaaggcaacaccgatccagtcctctaagcagggtgtgggagttgatgtgtgtgcaaggtgtcgtcaaggtttcttttgctccgatcatggatcacagcccaagccacaaaagccagctgctaccgacgatacaaacaaggaacctgttgagaaatcagctgttccaccgcccaagaaaaggatcgatgtaaatgagctgaggacatgtaaaaataaaggatgtggtaaatcctacaaggagaaggataaccatgattctgcatgtgactaccatccaggtcctgccgttttccatgacaggatgagagggtggaaatgctgtgatgttcatgtcaaggagtttgacgagtttatggagatacctacatgcacaaagggttggcataatgctgatgcggtgtgaattcacgccatgcttaaggctgttttcatgttgtatcgtcacctgccatgtaaacaccatttctgcagtttattgaggatttcatttggaagtgtgacaagagctttgaggatgggctccgggctgcgggctgcctaagctttgcgcacggtagctgtctggaaatcttacgtgattctccttgtactctggaccacatttggtgtctggattcaaattggggttttgtctgtttgaagccgaaggatgccaatattttaaccatgtctaagccagagaagttagcgcatgctgtggagcggtagaggtgccgtgtttcttgtgtgtgttccatggctgctggagaagtcctgtccgtgtactggtttgctcggtttgagcaggcaaaagcctggaccatgcatcactagtttgttctaccgctcctcactccccagaccagaaagttgttgccaatctacaatataatgaaaacttagctgcactcttggaaagagaaaagcacaatctcttgatttattggatgctgttttggcgtgcatacactagcattatcattatgtcatggatacatggacatgggattcaaatgtaagtagtactggtagtgctttggacacggcagcgttcaggttcaagggatgccgatgatcgggatgaacgggaagaagaagaagaagggaggcagtcctccaaaactgaagggcggcctgttgcctccacgggacggtggagtccacgccggcgtccgtgccgccggtggcgtcggccttagcgctggctccatcggggcgttaccaccctggtgttcacggtcggccatggtcgcagcgacagcggagccgccgctagccgcagcgcacctcgtgaagaaggcgaggcgggagcccagaacataggaggcggggtaggaggcggagccaggcccccgggccgggacgacgcgcgcgaccgtgagtccccacggcgcgcagagctgctccgtggcgccgaggaccctggccgcgcacggcgcgcccgaggctgacgcttctgctggcacggccacgtcgaagttgccgcgcccgtcggtctgcgctgcgtggaggcccgcgctgccgtcgccgtcgccggcgcatttcaccg

SEQ ID NO: 38193 - DNA, 2270 bp, Zea Mays
cgctggtacagggagcccgccgcgtcgcgttctccagtttagcgcgcgcgcgcgccgccgccggctccgtctctccgccccgagctccgcgtgtaatctcagacccagcctaagcaaaccaccagagtcagtaccccgccagcacccgagcccctgttctggtgattggtgaagaccttgtcgcagaccgcaacgatgtcggccgcggcagggacgccaccggaagacggaggggatcggccgtggcagtcttaccataccgcatacaccaacgccaaagctggaatggagggtgttgacaaagagaaggtgcagaaggtaatctacgaaatgagcaagggctcaaaatatttcgaaaatgagcagaggaaggaggcagccaccaaacaaaagattgaacatctccgtgcacaatgtgcagtattgactgataatgacatatcacattttcagaaggttgcagataagaaaatgttagagttggaagcttcacgagatctttcaaagatatggcttcacactgacatggatgccttttatgctgctgttgagacattggagaacccatccttgaagggaaaacccttggcggttggtagcatgtctatgatagctactgccagttatgaggcacgcaagtttggagtgcgtgcagcgatgcctggttttattggatgcaaactatgtcctgacttggtttttgtcccaccaaactttgagagatatactcattatagcgagctgacaagaaaagttttccagaggtatgatcccaacttcattgcaacaagtctagatgaagcatacctcaacataaccaatgtttgcattgagagaggcattacaggcgaggaggttgctattgaacttaggtctgccattcaccaggaaactggtctaacatgtagtgctggggttgctccaaaccgtatgattgcgaaggtttgctctgatattaacaagcccaatgggcagtttattttgccaaatgactgggaagctgtattgacatttgtatctacattgcctataagaaagataggtggcataggtaaggtaacagaacagatgttacatcaggttcttggaatcagtacatgtcaggagatgctgcaaaaggctgcttttttatgtgctcttttttcggaaagctcagctgatttctttctgtcggttggtctcgggttaggaggtacagaaaccccagaacaaaggcaaaggaaaagtatcagttgcgagcgaactttcacagcaacaaatgattcttctttgcttttcaaaaaattagctagccttgcagaaaatttatctgatgatttgcaaaaggagggtttcaagggaaaaacactaacactcaaactgaagactgcagattttgaggttcggacaagggcagtaacaacacggaactacatcgactccaaggaagatattctggtctatgctacaaagttgattaaagctgaaatgcctatttctttgagattgatggggttgcggatgtctcagctacatgatgagaaggacgatccatctacttcaacacaaaagacactagatatattctttcgttcatcaaacagtaactcaaatggcaatggaaccactgttcagagaatcactaattccccagggcaggataatgattctattagtctcacaaccaaggaagagtacttggcacctgatgctggaacaagtgtttccacaggccaacaggatttcttcctacatgatgagatctgttttattcccgaacaacaacggagtttagacaacgatactaaagaggctgtcctaagcgacccgttaggtggaacaaagtcagatgatgtgtcttccagtgcaaaggttacgcccactaagaagttggatgaacctgatcccttgatcagcccgaaggctgtgtcttcatcaagtaaacctgaccagcagtcatggattgatggctacatttgttccatctgtggatttgaactgcctccgggcttcgaggaggagaggctggaacattcagattttcacctggctgaaacactccagcaggaagaagcagtggacggcacaagacacatctcaaacgagagctgggtggctgaaagaccacgctctactgcacccacgcccaagaagaaactcaagtcttctaaagaaggaaagcatattcctattgactctttcttcacaaagtgtaataagagcccgtaaccgtaaggaaggcagcagaaggctgctggagaccgtctacggatacagaagcagtagagtaa

SEQ ID NO: 38194 - DNA, 2530 bp, Zea Mays
gtgcgtcgcttgtttgtctaccgtacttgcgtgtgcgtctcttgtttgcctgcgattgaaagccttctctgacctgtctccaaattggcattcctgagcaaaaatcccctgcaacccgacccatggccatgggcaagctcgaggagaggacgcgtgcgttctggacgaaccgatggcttgtgttcgttggggccatgtggatgcagtccatggccggcaccacttacatcttcggcgccatctcgccggtggtcaaggccaggctgggctacgaccagccgcaggtggccgcgctgggtgtcgccaagaacgttggcggctgcctcggcctcctcgccggcgcgctctcggcgacgtggccgccgtgggcgctgctggccatcggcgccgcgcagaacttcctcggctacggctggctctggctcgtcgtctccgggaacgcgccggcgctgcccctctggctgatgtgtgttgttatctttattggaacaaatggccagacgtatttcatcacggcttcacttgttacaagcatccagaatttcccaaagagcaggggcccaacagtgggcatcctcaaaggatttatgggcctaactagcgccattctgacacaagtttatacagtgatgcacacaccagaccatgctgcgcttatcttcatggttgctgttggtccgtcgctggttgccattggcttgatgtttgttattaggcctgttggtggtcacaggcagatacggccatctgacaagaacagcttcatgttcatctacactgtatgcttgctcctcgcctcataccttgtcggtgctatgcttgtccaagatttcctgcaaccaagctatgatgtggttgtttttctgactgtgattctgttcgtcctccttatttcaccaatcgcaatccctgtgattgtgtcgttcatgccggaaaaagctcaacatctcatggaagatgctctcctatctgaaccattgacaggagaggcaagcagttcacgacaaaaggaggatcaaccagaggtcattttaagtgaggtagaagaggagaagtctaaggaaactgattcattgccgccatctgaaaggagaaagaggattgcggaattgcaggccaagctagtggaagcagcggcaagaggtggggttagaatcaaaagaaggccacaccgaggggataacttcaccctgatgcaggcattggtgaaggctgatttttggcttatttggctatcacttttgcttgggtcgggatcagggctgacagtgattgataacctgggtcagatgagccaggctattggttataaaaatgcacatatctttgtgtcactggtgagcatatggaactttcttggtcgtgttggaggtggctacttctctgagatcattgtcagggaacgtacatacccaaggcacatagcattggcagttgctcagatcgtgatggctgctgggcatttcctctttgctatggcttggcctggaactatgtacattgcgagcttgctggttggacttggatatggagctcactgggctattgtgccagctgctgtctccgagctttttggtgtaaaacactttggtgcgatgtacaattttctcatactagcgaaccccgcaggatccctcatcttctcagagctaattgtcagcaacctctatgaacatgaagctgagaaacaagctagccaacaccagatgtcagcattgctgtctccacgattgcttcgtgatactggctttcttgcagatgatgcactcaagtgtgaagggcctgcttgtttctttttcagctctctgattatgtcggtgttctgtgctgttgccgctgggttgagcctcctcgtcgttcaaaggaccagacaagtttatcctcgcctctacagttctgtccggacttgagattctccaattctgcatggatgggaagctcaaatcctcgtattctatgtccgtttattcttgcatacatatgcacaaagataagaaaagccagaagaataccttgtgtttcggttgacattttgttttctacaaccagacataggcggggtggactgcctcgttcccagtttataagctttcggcgctgagtattggactgtcccccaatgtatacccatttgtcatgatggtcagatagttgttgtctttataaggattcaaacaggatttagtattgctcataagctatttctgacattggggtgtgaaacaaattgtgagggtattccacatcttttgcatgtattattgtaatatccttattcctgacaaaagaaaaaagctcagggaaagcatattcaggcactcggttgtctcactagtccaaccatagttgtttagtcctgtcgtcctctatcatcaccctatagaaccccttgaaagtgttcattgtctttaatacatatttccaccagaaagatcacacctcccttgagaaaggtattgttccacccaagtaatgcttgcttgttccaaacgatgtttacccacggtatattgatctgttgaagaatttg

SEQ ID NO: 38195 - DNA, 1514 bp, Zea Mays
atgacggaggcggagaggagaacccatcgatttggtggtgtaagtgggagctcattgaggccggctcatattaaagagctcgaagaagtgaagctgctcaagaaactgtctcaccccaacattgttagatatcttgtgactgttcgtgaggaagacacactaaacattttgctagaatttgttcctggagggcctattaattcagtcacttttggggaagctcggttcattcccagagcatggcatgctcaaagtggcccaatatctcgcctacctcttgttacaatttcatattctagcaaccttttgcgagatgttcctgttcgtcagcctctttggcacaacccgccgccgccgcaggcgcaggcgcaggtggacatggatctaccaagcctcgccgtcgtgctgcgcgccgcgctcagccacgttcctgaggagcgcaaggcggcagaagagagcctcaaccagttccagtacacaccacagcatttggtgagattgttacagatcattgttgatggaagttgtgatatggctgtaagacaggttgcaagcattcatttcaagaattttattgcgaagaactggtcgcctaatgatccagatgagtccccgaaagttttagaaagcgacaaggccatggttcgtgaaaacatacttggttttattgttcaagtgccccctttgttaagcttggagaaagtatcaaaacaatagttcattctgattatcctgagcagtggccaagtctccttcattgggtttcacacaatttagacttgcagaaccaaatttttggtgctttatatgtcctgagggttcttgccagaaaatatgagttcaagtctgaggatgagaggataccattatttcacatcgtagaggagacatttcctcgtctactaagcatttttagcaaattggttcagattgtcaatccaccaattgaagttgctgatttaatcaagttgatatgtaaaatattttggtcttctatttatttggagattccgaagcagctatttgatccaaatgtcttcaatgcatggatggttctgtttataaacttgttggagagaccagttcccgtggaaggccaaccaatagatcctgagattaggaaatcttgggcctggtggaaagttaagaaatggactatccatatcctgaaccgtctctataccagatttggtgatctgaagcttcagaaaccagagagtaaagcttttgctcaaatgtttcagaagacttattcagggaaaatattggcatgtcacatgcagctgctgaatgcaattcgtggtggagactacttgccagatagggttatcaatcttgttctacagtatctgactaacagtgttacaaagaacaatattatcgaagatttgtacagtccccgaacagctgctatggacttcgtgagtgaattggttagaaagcgagggaaaaacaatctccaaaagttcatccatttcattgttgatatatttaggagcatcattgatttatag

SEQ ID NO: 38196 - DNA, 299 bp, Zea Mays
gcaatcatttcctttctgcgaaagcgtcttggatactcagctcataagctgctcagtgctgatttccctagcgaagatgttggaaaggatggcagagtaaaggtgattttatacagaagatattgcaaatatacctcaggaatagtgactctacttcatatctacttgctgagataggtcgtgaattgcctaaggtgggccatctcttcttctcgagtgatgctctcgagttatgcatatgccaccactctgccttaaaaagaacatctggcatcattctgaatccagccgaggagtga

SEQ ID NO: 38197 - DNA, 2501 bp, Zea Mays
tgacactcggctgttccattcgtgatcccatcacaccagccgccgtcttctccctcactccgccacgccactaaaaccctaatccctcgccgccatggctgcggcggcggccgccacctcgctcctcatacgccacaaccgcaacccccacctcctcctcctccgcgccgcgatctcctcctcccgcgcactgtcccagcagccggagctgtctcctgacccgaccaccggcgcccccgaccccgccggcgccgccccactccccccaaaccccagcacggggagccccttatacagccagaactggcgcaaccccgccgcagccaacccgccctcttcgcttctgcccaccgtcgccgccggcagctccttcggagcgcagcaccgcatggccgccttctacgataagcccgacgccgcggggctcaaggaaacgtttgccaagtatatggcggagcagcggtgggaggacatgaagcttctgttcgaccactgggtgcgctccctcgacgccgccacggggaagcccaaccaccccgacgtcgacctattcaatcactacctccgcgccaacctcatgacgggtgccgtaccgcacgagatgctcgatctcgccgatcacatgcgcgagttcgagctcgagcccaacagtgcatcgtacaacctcgtgctcaagagcatggtcgccgataaggagtcctacggcgccgagaagctcattgaacggatgctgcaaacaggaacagttccagatgaagaatcctacaatttggttgtaggcctgcttattagacagaaccttgttgactcatctctgaagtatttggatctgatgcttaaatcgggctacacgccatcactaactgttttcactgattatatccaagcatgtgtcagatctgggaggttggacacgttgacatcaattatacagaaatgcaagacagctgataagatcaaagttttgtgtccacaatgggcctggtgcattgacatatcagaagctgcatttgaagctaacaatagcaaattagctctttttgctctggaatttcttgcaagatggattgttcgtggtgagaatgttaaacctcctgttcagctgtcagttaatgaaggtcttgtaatatcagctctgagtgctgctggcagaacttttagtactgacctcttgaatgctgcttggtcgctactacggaagtccctgcgccagaaaagggcacccaccccagagacatatcttgccaagatctatgctcattcatcaattggccagcttcaaagggcttttggtacattgcatgaatttgaaaatgcctatgggaactccaaggacgttgatttagagctcttctcaccatttacgtccttgcatcctcttgttgttgcttgctgcaaagatggctttagcacattggatttggtacattcacatatcacatgttatacatgatccattaagttggtcatttgtacttttattttgcaaaagtactccctatgttccaaattgtgtatgttcagttggagaatctgagtcatgcagatccaccttacaaatctgttgcggctctcaactgtgttatattagggtgtgcaaacatttgggacattaatcgagcttatgaaacttttgtggctattaaggaaaaatttgaactcagtcctgacatccattcatacaatgcccttctgtgtgcatttgggaagttgaaacagacaggagaagcatgtaatgtgttccagcatgtattaactcttggtgttaagccaaatgcaacaacatactcccggcttgtcgatgcccatcttgcaaacaaagatccaaaagctgctcttgccataattgatgagatggttgatgctggcttcactccttccaaggataccctcaggaaggttcgaagacggtgctctcgtgagtcagactttgacagtgacgagaaagtccaatccctggctaagcagttcaactaccgaatgggtggtgagaatcgaagagagatgctttatagcatagaatacaatcctgtgtactgaagcggcagtttctactgagtttgctggtcgttgggagagcacggacattgtagcttgtaaattacttgaacgcaccaggattcttaagcaatattcagtttctcaatcattatttttgctcgcagggttgatgttaggacttgctaataagctgcatactatttgtttgcttgagaatccgaaaatgtcagttctttttcataaattgtagcatctgcgtggccccacttcttacgtgactcctaggtgttttcggctttgtttacacttgtaactaacgaagaagtcctgggatgactgggtcgcagcttcttcaaaagatgctattcttattatggaaatttaatggagactgacaatttaaagtcacctcagatccttttttttgctacttctgtttcatgtcataaatacacttattttagaacagggaaaaaaattcagatggctttagttttgtc

SEQ ID NO: 38198 - DNA, 1499 bp, Zea Mays
tgtcgtttaatcacgaaagcgacttcgtacctagagcatttcggtgggactctatatattccggattactaaaatatatgtcggcgcagcagaaattcgggatcaactacgggcagatcgcgaacaatctcccggacccgacgcaggtggcgaccctcctccggtcgatgaacgtgaacaaggtgaagctctacgacgcggacccccgggtgctgacggcgttcgccaacacgggcgtggagttcatcatcgccgtgggcaacgagaacctgcagaccatggccggcagccccgccgcggcgcggcagtgggtggcggcgaacgtgcggccctacatcccggccacgcgcatcacctgcgtcaccgtgggcaacgaggtcttctccggcaacgacacggccacgatggccagcctcctccccgccatgaaggccgtccacgcggcgctcgcggacctgggcctcggcggccaggccaccgtctcgtcggcgcactccgtgaacgtgctcgccgccagcttcccgccgtcgtcgggcgcgttccgggaggacctggcggagtacatgaagcccatcctggacttccacgcccagacggggtcgccgttcctcatcaacgcctaccccttcttcgcgtacaaggcgagcccgggcagcgtgtcgctgccgtacgtgctgttcgagcccaacccgggggtgcgcgaccccagcaccggcctcagctacgacaacatgctgtacgcccagatcgacgccgtgtacgccgccatgaaggccatggggcacacggacgtgggcgtccggatctcggagaccgggtggccgtccaggggcgacgaggacgagaccggggccacggtgcagaacgccgccgcgtacaacggcaacctcatgcagagggtcgccatgagccaggggacgccgctcaagcccaacgtgcccgtcgacgtctacgtgttcgcgctcttcaacgagaacatgaagccagggcccacgtcggagcgcaactacgggctgttctaccccaacggctcgccggtgtacgcgctcagcgccggctccggcggcggttcaggtccgggcgggtcgctcaacccgtactacacatccatgttctcctcgtcgtccagatccgcggtgagcgcgaccttcttgacagagagagtgatgctgttactgctgctgcaagcaactgtaatactccgacactactgctagtcagtgaataccttgtaatcttgtatacgaaaaaaaaaatgcatctcaattcaacccatagggtaggccttagattcggaaatttggcacgacagtgtggctgctcgaaaaggtctcatctttttttttttctcttttattcccccgcagcaatgaccttgaaagttcttgaaaaggtgaccttttttcttctctgtgcacaaacctatcgagatgtggaaacacctaaagctgaggtttgaggttgattgatgtccgggcatcgtcgaaagcgcggtcatt

SEQ ID NO: 38199 - DNA, 2541 bp, Zea Mays
agaaaggaccgaggacgcaccctgcctgttttgctctgctctcgacgcttcactctgcccctccctcctcccttcgtcttccaccattcactatagcggagcgcaggctggtggacgccgaaggtgaattcggtggcgccggtgccgaacccgatattcatggacgcctctcccctgaacccgccgccgctggtggaggaggagcttgtgctgcgccgcagtgctcgttgcctcaataggccaacccggcccagctacgcggaacaggagcctcctaaaaaacccggcggccggggccggagcaagcggaagagggacgaggagaaaccggagctggcaccggcgcagcagggtgccaagagtccggacaggaaggactccaaggatgaggcgggtgagaagaagccgacgcccatgattgcggcgctgccggtctcttgcgctggcgttgctgctgaagacgatgcgacggggaccgggaagagcgccaagctgagggtgaaggagacactgagggcgttcaatagccactacctccactttgtgcaggaggagcagaagagagctcaggctgcgctacaggagattaacgctaagagtggcctcaaacgtcagaccaaggggggtgaaaagaaacgcccatcaaagcggcctgacctgaaagcaatcaccaagatgcaagaaatgaatgccgtgctttatccagagaaaacgattggacatctaccagggatcgatgttggagatcatttctattctcgcgctgaaatggtagtgttgggcatacacagccattggctcaatggcattgacttcatggggctgaaataccaaggaaaggagtattcaaacttaactttcccactggccacctgtatcgtaatgtcgggggtatatgaagatgatctagacaaagctgatgaaattatttatactggtcaaggaggaaatgatttgcttggtaaccatcgccaaattggctctcaacagttgaaacgtgggaatttagcgttgaagaatagcagggagaatggtaatcctgtccgagttgttcgaggacatttgtcaaagaatagctacactggaaagatctacacctatgatgggctttacaaggttgtagatgactgggtgcagaagggagtgcaaggccatgttgttttcaaatttaagttgaagcggcttgagggtcagccatcattgacaacctctgaggtgcgatttactcgtgcagaagctccgacaactatttccgaattacccgggctggtttgtgatgacatctctggagggcaagaaaatattcctattcctgctactaacttggttgatgatccacctgttcctccatctggtttcaagtacttgaaatctctacaaattccaaaggacatcaagattccgtctagtattattggctgtgattgtgaaggaggttgtgctagcaacaaaaaatgtttgtgtgctcagcgcaatggttctgatctgccttatgtatcatataagaacattggcaggttggtggagccgaaagcagttgtatttgaatgtggggctaactgcagctgcaaccatgattgtgtaaacagaacatctcaacaaggtttgcagtaccgcttagaggtatttaagacagcttcaaaaggatggggagtcaggacttgggacactatcctccctggggctcccatctgtgagtacacaggggtgttgaggaggaccgaagatttggatggttcacagaacaactattgttttgacattgactgtcttcaaaccatgaagggtttggatggaagggagaaaagggctggatccgaaatgcacctgcctaatcttcatcctgagaatgattcagatgcacaacctgcacctgagtactgcatagacgctcactctattggcaactttgcaagatttataaatcacagctgccaacctaaccttttcgtccagtgcgtcttgagctcacacaatgatgttaaactggcgaaagtgatgcttttcgctgctgacaccatacttcctcttcaggagctatcctatgactacggttatcgattggacagtgttgttgggcctgatggaaaaattgtgaagctggcctgccactgtggtgctcctgattgccggaagcgcctctactaacctgcagtgtgtttatttctatttggatttttgaggaaacagcttatattgtaggaaaaacagtcatggtacctatgtagttgacatgctcttgatcatatatagcaaaagaggagcaatttatggggtgttcggtttaagaatgaaattagagatttagaggacatggtggtcatggtagcatattttgccgacaatcttcgattaactgatatatctggacatctggtcctgcaacacttatcctctggataaatatatatacgttacatgtttcctcaatgagtcaatggcttggatctgtgttttttctatcatttgccgtctcgcgcgtgcgtgtctgtgcttaatcgataaatacacggactactcaggtacctttttcaaattgtg

SEQ ID NO: 38200 - DNA, 2427 bp, Zea Mays
taatggttctcatttgacttctctgaatacaaatactggggagacagaggttttaggatctgcttatgaattgcaagaatctctttatttcaggtgtcctggacagagaaaactaaagcgatcaagactgtaaaacccaggcatgaagtagttgctgtaaatgaacgaaacaacacaggaaatattaaaggatcattgtcctccaatggagaaaacaaatcccttcctcttatcacggcaaaacagtatgcttgtcgtgctgcacatttgtcttcccttgtagtttcatggtctccagttgtgtcatcaagtgataaaacatcttgtttattgaggcattggtgcattattgctgttggctctaaatccggaaatctttctttttggaaactacctaagccagaatattacacaatagatgctggcgtggttaccagtgatccaatgctcatcggggttttgcaagctcacaaatcatgtgtcagtgtcatagcttggcaagttctttctgcgggctcttcaaaatcctcgttgcttttagctactggatgctcagatggaagtgttaagatatggttagggaatattgaagggttaaatcaatgtgcaagtggagaagtgccatttgcgttagttgctgtggtcgccactgatttatcatctccagtgtcatcaatctcattagccatacctgcccagtctcaacacgaggtcagtttggcaattggaagagtatctgggtcactagaaatatggatatggaatgcatctagcaacaaaattgagattttcagtgcatggcatgcacatgatcaagtggtttacaatgggctatggatggctattgtttattcagctgcagtcaggacaattctgcacgttgttggatctctcacgaaaaccaccttgaagaaatttttatgcattcaaattttccagagctaagggagtcagcagacctatcagaactctctgatcgatgctatggtcttacactagcacctggagaacagatgattgctgtggtccgcagtttggatctgaaccttctgaaccagatgtatcaagtcaggacacaaaaggcggtggttgagttcatttggattggtggccaatttgttggtattccactagacaggagcattgatatttgcagttcacagtccacagacttatcctcaagtaatctcatgtggtggggatccaacattttgtggtcgctgaagaaatacgaaaatgtagaaaagaggcttgtgatatgggatgttgtagctgtgctgcaggagttgaagaaatccgcacctgcctttctggagactctagtgcatagttgggtctcagtgttactttcgggcgacccccagtgtgtttctatcgatgctccatcacgttcaatgcatgacatgatgccctatgtcagcacgcggaagctacacttactgaacataatgtgcagaaaagtaatggtcagcattcacacacatcatggtcctggtgctgaaaacggcaatgaggaaacaactgatttctggagcactcttttggtgaggagcgaaacagagctgcgagagaggctggttggcttcacctttgctgcagtcctgaaacggacagcgtatttgttcaatggtacctctactgaaaattgctggtttcctgttggggttgcccagatggattcttgggtaaccatgaattacgacggacaagtgcatgaccagctgcagtctatcagatcaaagatcaaagatttaggaagcaggatcgacggatactctgacgtagaaagctgcccctactgctcttcgccggtccatttcgagtcgcctgacgtagccatctgtggggaaaggcacacactgccgcggtgcagggcgtccatgatcctgtgctccgttgtgcagcctttgtggcactgcgtgtgctgcggaggcacggtcaacaagctgttgccggagtcgttcttcaccatgcaggcgtccaccatgcatgatgaaggatcgctcgatctgtcagcagcctccgtcccactttgccccttctgtggcatcctcctgcagaggtcgatgccggcgttcctgctctccacctcgccggcatagaggctctctgtggatgctagtaggcatccaccaggtgtagcatgcagtagcaatgtagtactagtaaagtttgttctagtcgatgctgcttacactcagttactcttaccaagtatggctggcagagtgtcggttactggtcattttttaggtcccttttgaatgaatacgatgagttcttttgtttggtttcttttggaccctgacggtggcagattaccaggccaagttcagctatctcgaattgtctcattcgattgttgcggacatgcagttctggcagttccaattggttgttgcggacatgcagtcctgtcagttgact

SEQ ID NO: 38201 - DNA, 1728 bp, Zea Mays
tcgtcggctgctcctgcccgcctccgtctcccacagcccacagtcccacacagccacggccacgccgccgtcctcgagccgcctgatgagctgcctccgccgcgcttcccgcctcacccggggtctctcttcctcctcggcggcggaggcggagacgctcccgccgccgcgcccctctgcgggtcgccgcgtggtcgtgacggggctgggcgccgtcacgccgctggcgcgcggcgtgggcgccacctgggatcgcctcgtcgcggggagatgcgccgtgcgctctctcgccgcagaggacctccgctttccggaggaagcagcggggaggacgctcgagcagctcccgtccagggtggtcgccgccgtgccgcgcgggaagggcgaggacgagttcgccgaggacacgtggaccaagctgatgaggctttaagagatgcaaattggttgccttccgaagatgataagaaggaaagaacgggagtctctattggtggagggattggaagcatctccgatatcttagatgcatcacaaatgatcatcgaaaatcgtctacgtcgtctcagcccatacttcatccccaagattttgatcaacatggcatcaggtcatgtcagcatgagatatggtttccagggtccaaaccatgctgctgtgacagcttgcgccactggtgctcactctattggcgatgctactaggatgatccaatttggtgatgccgatgtgatggtggctggtggaactgagtccaatattgatgctttgtctatagcgggattttctaggttaagagcattgtctacaaaatataattcctctccacttttagcttcaagaccttttgattgcggtagagatggatttgtgattggtgagggctgtggggtcatggttttggaggcacttgatcatgcaaaggaacgcggtgcaaaaatatatgctgaagttcgaggctacggaatgtctggtgatgcacaccacataactcagccacaaagtggtggtagaggtgctattttagccatgaagcgtgctttggaccagtcaggtcttcatgtaaatgaaattggttatgtgaatgcgcatgccacgtcgactcctcttggtgatgctgtggaggcgaacgcgatcaaatctgtatttggcgaccacgcagcatccggtgatcttgcaatatcctcaacaaagggagcaattggtcatctgctaggggcagctggatcagtggaagcaatcttcactgtgctagcaattcaccacggactcgctccgcctactcttaacctggagcggccggacccgctgttcgaaggggcattcacgccactagctgcgcccaagaagatgtcgatacgagcagccatctccaactctttcgggtttggtggaactaacacgtcgctgctgttctcgtgcccgccctagtcctagtgtaacggcgctctgttttctggtcctcgctggaagtgaagaggcttcctgtaatattcagatatgttccgcaaggcaccacccgcctttagctgaagtttcttcaagttgttttttttcaagtcttagttaaactctgtttcgttattttttttaaaaaaaggaaaaagatggaaatttgataggtgagtgagacgttccctttggacatcattagcgtaaaatctgtactactgctatgatataacgtgtccaacatagacatcacttgctcttcatcggagaaagcag

SEQ ID NO: 38202 - DNA, 379 bp, Zea Mays
ttccaagttccaaacccgaaacggatataggataaacgattagtagaacccattgaatcctgcgtgggaggactcaccggtgattatgcatcaagggtcacgaccacaatgtgatgtggtgccacggcggtcgccattgccccggtgagaaattgagcggctcacggtccaattcccggggtgggaagaccacgggcatcatcagggcgctactgtgattccccaggccaaccgccaaggttggagctccacccaattcatgagtcaaccatggcggacccaatcaccctccccccgctcgtcgagcatggcggtgcgaatagcgcccatgcccccatggctcgcatcatcgaagctagccagttgtggatgagaggtg

SEQ ID NO: 38203 - DNA, 2101 bp, Zea Mays
gtggttttggtgtttgggcagtttggcagagggtagggttcatttcactcatcacggaccgaccggcgaccgcacccaatgcaagcaatttttgcggacagggggaccttcctcttcttcttcctcgtccccggcccctgcccctctcccctgcggagacggagcgccaccttcctcaccttctagaaagaactagaaccctccctccagaaccttgaagaccagcccagaccagaccagccccgaagctctccgccggccccgcccttgacgacatgaagcaccagccgccgcgccgctggggcgtcgtggcggcggtcgtcgcactcgtcctcctcgcctgcctccagatccagtaccaccacctcaaggtggatctcggcaaggccggctttgcctctgccacgcaagagaataacgcgatccgcagccgcaatcgcattcgctggggccccgacaggaacggcgcccactccttgccgcgcgggattgtccaccgccactccgacatgtccctccgcccgctctgggaggacgacactgcttccacccacaagatggatggcgtcatcttgagtggagtgataaggccatacacatccttgctcacaaccaaacaaaatggtggtttgctaagcgttttctgcatcctgatgtcatggctatctatgatttcatttttctatgggatgaagaccttggagtggagaacttcaaccctagaagatatcttgatataatggtgtccgaaggcttggaaataacacaacctgctctggaccctgatctatcaactgatatccaccatcgaatcacaatccgtaataagatggcaaaagttcacaggagaatatacgacaatcggcctagtatgaattgttctgacgagagcaaaggacctccatgtacagggtgggtagagggcatggcaccagttttttctcgcactgcttggaaatgtgtatggcatctaattcagaatgatcttattcatggatggggtcttgacatgaagcttggatattgcgctcagggtgatcgaacagagaaagttggtgttattgacagtgagtatgtagttcatcaagggataccatcattaggagggccatcacttagcagcaaggtgcttgacatctcagcaacaaactatttttttagaaacttggagtccggtaggaccaaggatgaagtgtactgattcatccaaactttgtttgaaaaaaaaactaccagagcatcgattttccttgtgtgcttttcttttaccctagttggcatatacctgcatgatagtaatgttaggtgtcatgaattcatgatcgttcaataaaatttgcatgtgccgctactgacatcttgttgacgcagacacctcgaagatcattggatttgaggacccacatacgaagacaatcatcggctgagctggagaagttcaaggagaggtggaacagggctgtaagggaagatgaaggatggagggatccttttgattcttgattacttggaaagcagagtgtgacacttctgataacaaaactggccagtggccacagtcacagcagtagagtttggaagcggagagcatcttctgcttcatgtcaaaaacacttgtttggttataggatgacgagacggttggttggttataggatgatgacttacatacacacacacacatcataactttatccacatgagttaaaagcgggaacattatcgtcaatacaaggagctgatggagaagttgaaactaacaaagtaacagggggtttccgaaagtgctgtaattttccgttggaaatatctgttcgggagagttgtatagtgtcatgatatacacacttgtgcagttatttgatgaggaaacttacatagcctagagcagatgtgtttcctatattattattgccttgtacaatgtaagatgaattccatgagtcagaaatagcatcaggtctctatgcttatacttggacaagttaagaggatggcacggcatattttttgtgtcaccgcaccgaggttgtcgctctctttatgtgtatcaaaaatataaaagctcttgtttatgtacatgaacgatgttttgggtgtc

SEQ ID NO: 38204 - DNA, 1469 bp, Zea Mays
gaagaatgcaatatcaagggatggaacgtcgatatgttgggccactcatccaagttgagttcgactactacatccatggataaatctgccttgtcaaccagtcaagctgatagtagctctggagttccaggaattactgttgataaatcagtagagttctcgtatgaagaactttttaatgccacagagggatttagcatgagtaacaaaatcgggcaaggtggttttggtgctgtctattatgctgagctcaggggcgagaaagctgccataaagaaaatggatatgcaggcttctcacgagttccttgctgagttaaaagttttgacacatgttcatcatttgaatctggtgcgcttgattggtttttgcaccgaaagttccttgtttcttgtctatgagttcatcgagaatgggaacttaagccagcatttgcgtggaactggttatgagcctctgtcttgggctgccagggttcagattgcactagattcagcaagaggtcttgagtacattcatgaacatactgtcccagtgtacatacatcgggacatcaaatcagcaaatatcttgatagacaagaactaccgtgcaaaggtcgcagattttggtttaacaaaacttacagaagttggtaatacatcactacccacacgtggaatcgtgggcacatttggttacatgcctcctgaatatgctcggtacggtgatgtttctccaaaggtcgatgtttatgcctttggcgttgtcctctacgaacttatttcggccaaagacgccattgtcagatcaaccgagtcttccagtgattcaaagggattggtttatctgtttgaggaggctctcaacacaccggatcccaaggaaggccttcaaagactgattgatccggcgctcggcgaggattaccccatcgactcgatcctcaagatgacggtcctggcaagggcgtgcacgcaggaagaccccaaggcaaggcccacgatgagatccatagtggtggcgctgatgacgctgtcgtcaaccagcgagttctgggacatgaacgcgatccaggagaaccaaggtgtcgtgaacctcatgtccgggagatgactcctgtccctgtgggctgtggtatatattattgtacgtcctacctgccttcccctgggcaattgtacattagggctcatttgtacggcccgttgacggccagagaggagggccactgtaggtatttacaatgtaatatcttgtcactcaagggttttctcccgtgtttaggctccctttggaacaaaaaggaaatttcctgaacctgtgttttttgctgtattttttaactaatttctatgaaattcttatagcattcatgtgaaattcctgcattctaaaggatcggaaggtcgttgagagccgcgtgtgagttactggggttatgtacaactctgaagatacttataaaagttattaatatttacttattt

SEQ ID NO: 38205 - DNA, 1461 bp, Zea Mays
agatacggaggggcaaggtacgtggtgccttaccttggctaaggcactgaatctggatccctcctccacctccacgcgagcggacgacacgaagcggccatagccgcacgttgggatcccctccgctacgcctctcgatggtctccgccagcgcgccgccgccgcaggcccagtccgacgcggccgggtcgggggaggaagtgagcaagaaggtgcggaagccgtacacaatcaccaagtcccgggagagctggacggagcaggagcacgacaagttcctcgaggccctgcagctctttgatcgtgactggaagaagatagaggcttttgttggctccaagactgtcatccagattaggagccatgcacagaagtaccttttgaaggttcagaaaaatggaaccagcgaacatgtcccacctccacgaccaaagcgaaaagctgcccatccatatcctcagaaggcttccaagaatggaactctggcatgaacgtgcctgtttcttcatgggctcatagttccatcccacaagctgttgcttcatcaatggtgaaagatttaggtgctggaacaccaggttcaaacaatttttgctcaagtagtactgaaggccttccaagaacttggcaacctggtgaaacaaatgatccaataaatcaaattccgtcactccgccttatgccagattttgcgggagtgtacagcttcttaggtagtgttttcgatccaagtacaagtggtcatctgcagaaacttaaggagatgaatccaattgacgttgagacggcactgttgttgatgaggaatctctccatcaatttaaccagtcctgattttgaagatcaaaggaagttgttgtccttatacagcgcttctgatggacctgggctagggagctcaagaagttcagctctagcgacgagcgcgcctttcatgtaaggaagcgtgcacccttcctggcctttcctatccccaaaagctcggccatctaggctcgtgaaatgctgcttcagatcaaggctgtccttggaaatgggaagatgaaaggagaatctgggtaatgccggttgctccctttcccattctttgttgagttcagctttctgattggtttctggtggccctcttgatacggaacttgtgcgctccgtctgagaaagcatgtgtgcaaagtttcatttgaggagttgaggcgatcatggcgctgtaaaatgcggcttatcttcccccttcagggctggtttggtggaccaaccctcaaacatttgcaattcctatgtacgtctgtagtgcatcaggtgttgttgcccacgtgtaaaaggaaaataaattcacaatgtaaaggagacttgtgcgttagcactaccatttgaatttatgaaatgtcaaagcagcccagcgagtttgtacttgccacatttttttgtcgctgtatcagcagtctggctactctggcatcg

SEQ ID NO: 38206 - DNA, 656 bp, Zea Mays
agcaaattaaagtagattgcccattctatcaagaggcgtcgtctctgccttcgattattattacgtgtttgcgctgtgtatacgcatgcatgcacctcaaccgtccggaattctggatgatcggacaagacgatgagatggttatctgacgacgtcggaatcatctccttcgcggagacggtcgatagatgtcctgatcgagcatttctcggtccaagagaccgacgtatttgattgagctcgaccgatcgatcacgcgccggctgttccattccaaagccccatcatttcggatccagatcacggccggataggtgtgcagtccgtccttggtgcaggtcaggtcaggtcatgactcatgagccttcattcgttccttgcagcaagcaattcatgtccctgttgcttcgaaggatacgcaaggagatataatttgcagcttgacgataacccagaaaggagagagagagtcggtcagaaatataatatatattgctgtggctgacagcaacaaacaagattggcagcaaccttagaccattgcatctccagatgcagtctaaatgaaatgtacactatcggtctgatttgttgtctatatctacaaggcatttgattcattgacgatgtgttcttttttagaatgtctttttttt

SEQ ID NO: 38207 - DNA, 728 bp, Zea Mays
aagcacattaatgcagatgcttatgatgacatgttagagttttagtttacgtaacaccaggggtgttacagccttcccccctaaaagaaatctcatcctgagatttaaaagtctaggctcagtaacggaaaaggaaatgtgtcacaaacttatttcccaatttctcctaccaaacaggggtgtgccactattggtttaaaattcacaaaccctaaggttttccaaaaactcaaaacttagggcaaggactttgtcttctaaatatccctctgaccatctacatggtttcatcttctgtggggtagttccactgtactccataaaacttgatatctttctgtgttttatccaagatgttgcatctaatttggataaagtctatccatttgtccaaaatcacatgggaaatcaggtgataccatttcatcacgaaacataattaaaaattatggtctcagcgtgtgctaagtcatttatccgcacacgcgcattcgcatggaatatccaaaggaatagccatcataactcttgaagtttgacaaactactatagatattaaaagttgcctctaaaacaggcagtcgtttcttacaccatagtcatagaaaagctcacatgttacatgatccaggtgaaacaggaaaactctttccaacaaagtctaacctgtttttatttccaagctggtctatcttacacctacctttcttacattgatctatttcgga

SEQ ID NO: 38208 - DNA, 3761 bp, Zea Mays
gtcagaatcatcttttcccactcctgccgtctattttcccgactactctacgtgcgctttctctctctgcgcaactaggtgaccgcgaccgcggccaccgccctacgtcacgtacgtgcttgctagagtctagcctcgtcggttccttcgcatggtctcgttcaggcggacccttcgccggcgaccaacacccaccagcaatttactggaagtgtggaaccacttctgatgctgtctttgtaaatattgatggagctagctgagtagaaatggactgcagtcaagatccccaagaagaaagccatcaaagaagggagaatggtgaagaagcagaaaagacggctgactatggaaatgctttgagtcgtaaggaggtaacagaagagcttcttggttgtgtggttcatagtgaggaagaggcgtacaggttgtactgtgattatgggcatcgaatcggttttagcgtgcggaagggcaaacagtcttactttattggtaccaagaatattcgaacaaaggattactactgctcaaaggaagggcttaaatacgatgagcctgttacagaagcaaattttaatcgaccagacacaagaactaattgcaaagcaatgatccgctttagagttgacgagaaggggcggtggacagttatacgctttgttcctgtacataatcaccagttggcaaaacctggagaaagacacatgctgagatcagccaaatcgcttgctgttggcaaatcaggtgttatagatccattagcatctacagaggcacatccaattaatggtttctctgatatgacaggtgatatagttgagaattcagggtatactataagggaatgttacaatcaagtgggcatgcagagtataacagtaattgaggcaggggatagccaaagtcttgtcagctatttcaagcataaaactaatgaggaaggcatgttctattgggacgtccaagttgatcaagaagggcgcatgacgaacttcttctacagggatggtaaaagtagaaatgattatggctgctttggagatgccattatatttgatacaacctaccgcacaaacaaatataacttgatatgcgccccatttgttggtgttgaccaccattggcaaaatgttgtttttggctgcgcgttcttgttagacgagtctgtaacttcctatgcctgggtatttaaatcattcttggagtcaatgggagggcgatcaccaaaatcaatattcactgatcaggatgaagctattatgcaggcagtcaaacaggttttccctaatacgcaacattgtttttcctactggcatattctgaagaatgctcaatctcatttaggctcactaaatacgtctcaagcatttcaaagtatgtttaccaagtgtatgcaaggatctgactcagaagaggattttaaggaatcatggactgcaatgatccaggaatacaagctacaggataataattggttgattgacctttatacattccatcataaatggtgctcggcgtttaacaaagatacatttgatggtggaattaattcttctcagtggggggaggtttcaagtaatattctcaatggaatttctgatgaaaatacctctcttacacgttttgcccttttgctagaaaaggttgtcaaggatctacgtagaaatgaatctgaagaggattttcgatgtagccaaactgctccagtccgtgcaattaagcatagtaccgttttgaagcaagctgcagaatcatatacacataggatctataaattatttgaagcagaatttctggatgggtgtggagcaacttcatgccatgaaacttcgagtggtggaaatttattgaggtttggaattacaatgcaggggaggggttcaaaagtatgggatgttgttcttgacacttccaccatggagatcagttgtggttgtagaaagtttgaaaggatgggtcttctttgttcgcatgccctcaaagtcttcaccctgcagaatgttgacacaattccagaaaagtatgttttgaaacgctggacaaaagatgccaggagaagcatgtatacacttgctcaggatgattcaacccaacaggaatgcacagaggctgaacttgcatatcgcaatcgggcaatgcagtatgcatataacctaattataaagagccaggaactggaagaatcacgaaaaatattctgggactcccttgaaactggagagaaggcactggaagtgttctttgaaatgagaaacatgcgcactcaagcagccaaggatgctgataagaatgtaaagaagaagaaaaaaacatcaaaaggaacaaacccaaaaaaagctaaacaagccccaggagtttcctcaactggtccagagctgatagtccatactaatgagcatcaatttcaatcttcacaagatgctcagggtaatgcaaccattggaagaccatattactatcaggcttttccaaatgcccctatacaaccaaaccagatgtacatgcatacaaatatgcacacaatgcccctttgcacaccgcaggagctgtctgcatatgctgcaatacgccccaattcaatgtttggtggtgccaagaacatctgaaggatattaaggtccagattcatgtggatgtcattggaaaaccttattgagactttcgctatcaactccgctttgatctctgtggacccatttatggaggcctggtggcacttcatgtttggttggttcaggggctcttcgttctgatctttagggaagcggttattctggctgttgcagtgcaggctgtgcagccccttatccatatagcagtggccagtggcttgctattaatatcactcacaggcaattttagggttgtaaactgtaagggattgatttgcttgtgctaaaggcctcaatccgctgtgggcgtgagtttctccccttccaaggcagtttcctgcatgggttcagcttgagttgagctgctgagttgtgaacgaggaagcaaccaaagcaactgggagcctgggagagtgggagtggaggagctggctgccggcactggccgaggaactactcagtccaagacgtgtgtcgatctgaagtgacgctgacggctgacctatcacctatgttttgggaggggctcagggccggcaacagccatggccgggcaggtctccacacagtggccactggagctagaactggacctggaacggcgccccacctgccaaacggcaatgctgatgaccgcttgacagctgcttccgatgggctggccacctcccactgcccacatatgaaagggaacctggaactgtgtttgctcggcaaccagcactggtttggggaaacagaaagggtacataattgtagattgagagaaaaattagaggatgcagctgttgcttgggttcagtggtgaaggaagcagctagcagcttcttgggttcattcaagagagattggagaagggggaaggattggaaatgttgcttctgattcgcttgaactctgaatttctgattgtttccttgttcacagaatgtagtgtcatgcataacctgggttgccacgccttgtttctgaggcgtgacatgtgactgtcgtgatggtgtttttgaaatttcggttggtaagaaatgctgaaagaagaaatggcgtcattacgttcgttgcattgctttgcctattttgcgtgtttaatggaatatgattgttgtatggcacttcactctgaatgtgagttgttttatgctgagg

SEQ ID NO: 38209 - DNA, 3453 bp, Zea Mays
cgtcacgccaaaactcccaaaaatgttacaaatcctgcaattgatccccttagagaaggtttagttatgtctcttgaggttaatattgggaaaagaggcaacatcttggaggttggccctgaaaatgctgatcaggttgcactatcaagccctgtgctgaatgaaggtgaactggaaactctattgaatgactcaaaacttaagcccaaagtactgtcaacatacttcgatattcgtaaaggtctagatggttcacttgataagacaattcaggctctttgtgaagaagctgatgctgctgtgcggagcggctctcaacttcttgttctttctgatcgttctgaagcacctgaacctactcgtcctgccataccaatacttctagctgttggcgccatccaccagcatttgattcagaatggtctccgtatgtctgcttctattgttgctgatactgctcagtgttttagcacacatcattttgcctgtctgatcggatatggtgccagtgctgtgtgtccttatctggcactagaaacatgccggcaatggaggctgagcaacaaaactcttaatttgatgcggaatgggaagatgcccacagtgaccatcgagcaggcacaaaggaactttatcaaagcagtaaaatcaggtctgctcaaaattctttcaaaaatgggtatctcactgctctcaagctattgtggagctcagatctttgaaatttatggtcttggtcaagaagttgttgatcttgccttctgtggaagtgtatcgaaaattggaggtctcacacttgatgagggagaccttatcattctgggtgaaggcgttctctgaagatactgcaaagaggctagaaaactttggatttatccaatccagacctggaggtgaataccatgcaaataatcctgagatgtccaagctgttgcacaaagcaattcgtgagaaacgtgataatgcgtacactgtctaccaacaacatcttgcaagccgtcctgtcaatgttcttcgagatcttcttgaattgaaaagtgatcgtgcacctattcctattggcaaagtggagtctgcaacctccattgttgaacgtttttgtactggtggaatgtccctaggagccatttcaagggaaacgcatgaagctattgcaattgcaatgaatagaataggtgggaaatctaattcaggagaaggtggtgaggatccaatccgttggaatcccctcactgatgttgtagatggttattctccaacacttcctcatctcaagggtcttcagaatggtgacacagccacaagtgccattaagcaggttgcatctggacgttttggagttacaccaacattcttagtaaatgctgaccaaattgagataaagattgcgcaaggtgcaaagcctggtgaaggaggtcaacttcctgggaaaaaagtcagtgcatacattgctcgtctgaggaactccaaacctggagttcctctaatctccccgcctccacaccatgacatttattctatcgaggatcttgcacagttgatttatgacctccatcagataaatcctaaagctaaagtatctgtaaagcttgtgtctgaagctggaattggaactgtagcttctggagtttcaaaggcgaatgcagacataattcagatatcaggtcatgatggtggtactggagctagcccaatcagctccatcaaacatgctgggggtccgtgggaacttggtcttacagaaacaaatcagacacttatacaaaatggattgagagagagggtagtacttagggtggacggtggattcaggagtggtcaagatgttcttattgctgctgctatgggagctgatgaatatggctttggttctgtagccatgatagctactggatgtgtcatggcacggatttgtcacacgaataattgtccagttggagtggctagtcagagagaagagcttcgtgcaaggtttcctggtgttcctggtgatcttgttaactacttcctctttgttgccgaggaggttcgagctgcattagcccagttgggttatgagaagttggatgacatcattgggcgaacagatttgcttaaaccaaagcacatctcattggtgaaaacgcagcacattgatcttggatacctcctatcaaatgctggattgcctgaatggagcagctcccaaattaggagccaggacgtccacactaatggccctgttcttgatgagacaatccttgcagatcctgagatagctgatgctattgagaatgagaaggaagtttccaaggcatttcaaatctataatgttgacagagctgtctgtggtcgggtagcaggtgtgattgccaagaagtatggagacacaggttttgctggccagctcaacatcacgttcaatggaagtgcagggcagtcctttggttgtttcctgactcctggaatgaacattcggctagttggggaggccaatgattatgttggaaagggtatggctggtggagaactggtggtagttcctgtagacaaaacaggatttgttcctgaggatgctactatagttggaaacacttgtctgtatggagctacaggtggtcaggtatttgtgagaggcaaggcaggagaaagatttgctgttagaaactctctatgtcaggcagtggttgagggcaccggagatcattgctgtgagtacatgactggtggctgcgtagtcgtacttggcaaagctgggaggaatgttgcagctggaatgactggtggtcttgcctacattctagatgaggatgatacacttgtcccaaaggtcaacaaggaaatcgtcaaaatgcagagagtgaatgctccagctgggcagatgcagctaaagggcttgattgaggcctatgttgataaaacgggcagcgagaaaggtattgcgattttgagggaatgggaggcctatttgccgctcttctggcaactggtaccgcccagtgaagaagactcgcctgaggcttgtgcagagtttgagagagtacttgccaagcaagcaaccacccaattgtctgcgaagtgatcgaatcagactacaggaaggtggtaggtgttttctatttgacacaaagtgatctcatcttatcacttcaagaaaatcgaagaccataaccggcgctctgaggcaccgaagtgcccgtctgaagactgcaactttgtggaggctctgcccaggccatctttttgagttgagctaacagaaccgagggttcttctcgacgctcgtgcacctaggtaacccctgtaaattggtttgctgacgctaggctgcaaggggcctgccctgtttgaactgctgtactgtacatgattcttggccgttgccctgtgtaattatgttttggttagctcgtaaatttatacgcatccaatggaggcatacaatgcaaaaaaataattaagatacaacaataa

SEQ ID NO: 38210 - DNA, 3716 bp, Zea Mays
tgcctaccaagtcacctctttgcccggttggccgccgcgcccagtggccccctcctagcctaccgctccccgatccaatctgtgccgtccgttctcccgccgcaaccttcgtcttgtcctcaaggccggcggcggccactgcccgccttacaccatgaaaccaccacggctctttcccctcctccgccgccacctctcatccgccgccgacgccaccgccgacgccgcggagctttccagcgcgctatccgtggcgccctcctcagatgcgaaacgcgatcttgccatcctgctccgccgccttggcggccgcggtctcgcctccgccctctcgtcccttccggctccgcttcccgcctcctccgccctgcgcctccttcagcatattctctccgacacccacgcgtccgcctcccgccacgccgaggacctcctgtctcctcgcgtctctacgctcctcctaccatcgctcgtcgccgatggcgcctcgctaccgtccgcgcgccgcctcatctcacgcctcctcttcttcaaccctctttctgtcgccgcagcggctatcgcggactccgactgcactgccacagcggaccttctcgtccgcgcctgcctcaactcgcctgcccccggatctctgtcctgtgccgccgatgcctttctcgagctttccacacgtggtgcatcaccgtccatcaagacatgcaatatccttgtcgaagccctaggttgtggtggccaactggacctggcccgcaaggtgttcggagaaatgcgggatggcaacgctgttgctcctgatgtgtacacatacacggtgatgattaaggcactctgcagggctggagagattgatgctgcttttgtgatgcttgcggagttggaacggtctggtatccagccgacggttgtcacttacaacgtgctaatggatgcattgtgcaggagtgggagggtggaagaggcctttcagttgaaggggagaatggttgaaggcaggctgagaccaagcattgtcacatttggcatcctgatcaatggtcttgcaaggggccaacggtttggtgaggttgatgcagtgctgcaggagatggagggttttgggatcacccccaatgaggttatttacaatcagctgatcggttggcattgtagggaaggacattgctcagaggcgcttaggctgtttgatgaaatggtctcaaaggggataaagcagacagtggtgacttacaacttgattgcgaaggctctgtgcaaggaaggagaaatggaacatgctgagcagatattggatgagatgttgttggctggaatgacggttcattgcagcttgtttaatagtgtggttgcatggcatcttcgcggaactggaagactggatgtggtgctaaggcttataagagaaatggttgcgagatttctgaaaccaaatgatgctgtgatgacagcttgtatccaggagctttgcaaaagagggaaacacgaagaagcagctgaaatttggttcctagtattgggtaaaggtttgggtgtcaatattgcaacatccaatgcgttgattcatgggctttgccaaggtaacaacatgaaagaagctactaaggttctaaaggctatggtggatagcggggttgaattcgatagaatcacatataatataatgattcaattctgctgcaaagccagtaaaatggaggaagcaatacaacttcgtgatgacatgatcaaaagagggtttaagccagacctcttcacgtttaatactttcctacgcgcttactgtaatttgggtaaggtggaagacatccttcacttgctggatcagatgaaaagtgagggtcttaagccagatattgtgacatatggtaccataatagatggttactgcaaagcgaaggatgtgcataaggcgaataaatatttgattgaattgattaaaaatgggttaagaccgaatgcagtcatctataatgctcttattggtggttatggtaggaatggtagcatttctgatgcaattggtgttcttgacactatgaagcataatggcatacaaccaacaccaataacttacaacagccttatgtattggatgtgtcatgctggtcttgttgaagaggccaaagaaattttcgcgcaatgtatactaaagaacattgagcttggtgtaattggctacacaattataatacaaggtttttgcaaaataggaaaaattgatgaagctgtgatgtactttaaggaaatgcattacagggatatacgtccaaataagatgacctacaccactttgatgtatgcctattgcaaatgtggcaacaaagaagaagctttcaagctttttgacgagatggtgagctcaggcattgttcctgatactgtttcttacaatacactaatttcagggtgttgtgaggtggattcattggataagattgtagaaagtcccgctgaaatgtcctcatgagttttggaacaaggtggttgtttgtcaacgtttttgataatggataactacaccctggagccagagaagctgtgtctagtgttgaattatgtgtaaccaaggaagatgtaagaaaggagactcaaactttgagcttgatatatcaccctaatgtcatcaggtcttagcgctcatttgttgtgggtcaaaacctttgggtagtagtgctgttcatgctagaaggttcatgtttgcaccaaatgaaggttggatatctgatggttttgaggagccagttattgcctctattctaaaggaaacactcaaagctctagactacctccataggcaaggacatattttcaccatgatgtgaaggcaggatatctttattgccatcccggtgtagtcaagcttggggactttggtgtctctgcttgcatgtttgataggaggcaaggggctatgaatacatttgttggaacactgtgctggaattaggatggctccagaagttctccagcttcaaactggatataatttcaagtatatggtgattctacacgcacatgcttagttctgcttgacaatttgcatttctcgataaacctgagatcgagcaaacactatgttggaatttagttttacttttttgtgcttaaatatgagtgcagcatatcatcaacatcaagttggaacttttactctgcccagagattaggtgatcaccagattctgagctgatatggtctttggaataactgcactggaggtggcacatggacatgctccctttttgaagtaccctcctatgaagctaaaggattcagctagctttgaagagaatgccttcttcagaaatcagaacaagaaacacttttcatgggtgagtgttaataaggggtcagtgcatgaaactttgatattgaggatctaaaaagccagccatcactgatttgcaatgatgatgcacctgaaatagaagaacatgatgacactgctagaataactgacttcgataaagtttgtttgagtcctttgtctttattttaaaaatgccttcgagtcctttgtctttattttaagaaatgcattagtcatgtgtactaggaataatgacataaatatgatgtaagcttcacagagtgatagaagaaatcatatataagatcatcatctgtcactaggtgagtacccgtgcgttgcaacggggacatataataacataataacttatatataaaatgtgtcttatattgttataagaaaa

SEQ ID NO: 38211 - DNA, 1773 bp, Zea Mays
cccaccgtcaccgaccgccgcgccacgattttatccattcctcactcgtctctcaaactcaagcgaaagccatcaccccgaccccaatcccacgttcgccacgtgcgcgccacctcccccaccgcgtccgcgtcgccggccatactccatcgcgaacgagatcacgggctggtttcgcgggccgaccatggggacgctcatccggccggggcccgccgcgtcgcctctccccatcgcttccccctcctcctcatccgcccacgtggctgtcgttggcggtggcgcgaggagcttgcggcatcgggtgtcggtgtcggtggcggtgttccggtccccgagtacgcaggttctggcgacgagatggcgccgccggagaggtatggttgtgcggtcggatgtcgtcgccggtggcgcagccgccgcggcagctggggattcgacgcgggcgctcccaggtcagcaattggcttcaagagtcagaggggtttgcttctatttggtgactgcagttgcagcaatctttttgtttgtagctatggttgtggttcatccacttgtgttgctatttgaccggtaccgtaggagagcacagcactacatcgcaaagatttgggctacggtgacaatctccatgttctacaatcttgaggtcgaaggaatggagaatctgcctccaaatagctgtcctggtgtctatgttgctaaccatcagagcttcttggatatttatacccttctaactctagggaggtgcttcaaatttataagcaagaccagcatctttatgttccctattatagggtgggcaatgtatctcttgggtgtgattcctctgcggcgtatggacagcaggagccagttggtatgaataaatggatccctatttagattatagttcagataaatttgtgatgaaactatatttttttggattgtttatattatttagaggcacatataaggcagttttgctttgtaactgaaaactaaataaccaaatgtatgtaattctattgtccaaatagacactatatttcaatttgcattccatgttctgcataacattggttttggaaatgcaggattgtctcaaacggtgtgtggacttggtaggaaaaggagcttctgtatttttctttccggagggtactcgaagtagagatggcaagttaggtgtatttaagcgtggcgcattcagtgtcgccgcaaagacaggagctcctgtgatagctattactcttatcggaactgggaaattgatgccttctggaatggaaggaattctcaattcaggttcggtaaaggtgattattcaccgacctattcaaggcaatgatgcagaaacattatgttccgaagcaaggaatgtgatagcagacactcttcttctgcatggttatggagcccattaaagcaagtggggtgctttggtctgttttttcttctgaacgagtgctttggtctattctttagtggacttttcagagcacaagacttgagagttgagacaaagctcgttgcagatgtaatcctgtaaaggcaagagggaggaaaatggcgtgaattggcggttgtaacatgtggtcttcaatttgttgtaaaccctacttatttttgttggtttgatagtacaaagaaatgtaaaaggcagaggccatcttcattggatggaaaatgaagctcacgtgatattttgccattttggcctagtttgtgaaccctattttctcaggaaaaaaaactaaattttcatagaaaaatggaaatcgtgta

SEQ ID NO: 38212 - DNA, 3021 bp, Zea Mays
tggggtcagcccaagcctcccgatgacggccattcactctgctcaccaacacggcctccatatacagaatttagatcacaaacttaacattgataaccaatttgaggcattgaagtgctatgagatgatagatagggattgccggtggattaatgcaactttccaatcagttccaacttccatgggaacaaatatgaaagtggacgaccttgttcagatcgaaagcaaaagagcctctggtctagtggttaaggggttccaagtagcacctccaaattgggttcgatcttcctcggggttatgtcctgtgcgccatccttcggctgggcgttgcagagtggacggtgacgaccccgctactgatgggagcgaccagctgacacaagctaacccactctcgcccggcgacgtgctcatctccaaggacggagcctttgctctcggcttcttctccgcaggtaactataacaagagtttatacgtcggcatatggtacaacaaggtgccagagcacaccgtggtgtgggtcgccaaccgtgacagcccagtcatcgccccttccagagcgaagctcgccatcaccggaaaaccagagctggtgctgtctgactcccaaggacgcatccgttggacgacgacgaacagcgccgcagctgggggcgctgacgcttttgccgtgctactcaactcgggtaactttgtccttcaaacgccaaccggcgagaccatatggcaaagctttgattacccaactgataccttactcctaaccatgaggttattgctcaatcacaagggtcaagtgccaactcgcatcatttcttggaagagccctgatgacccatccactgggaatttctcctatggaattggtcccaactggaaccttcagttcttcacttggtacgggaccttgccgtacagccgctcaaatgcgcttaacgatgcatctatgtccagtggcatgtacctcagcagtggtgcctccattgtataccaagccattgtcgacacagggaacaggctctactatatatacacagtctctgaaggatcaccctacacacgtatctggcttgactacaccggtaagatgaggactcagagttggaacagcaacacatcatcttggatgctcgtttttgaacgcccccattctagctgcgatctctatgcccagtgtggtccattcggtttctgcgatagcacaggcgatgtcccaacgtgccggtgtcctgaagggttcgagcccatcgatggtgtcaactattcgagaggatgccggagaaaggaggcactgagatgcgggaaagaagacagcttcgtcaccttgccagcgatgaaggttcctgataagttcttgtacttgcgcaacagaagcttcgaccagtgcgcagccgagtgcagcagaaactgctcatgtgtagcttacgcttatgacaccttgagcctaggtgacagtaatggcgacacgtcgaggtgtttagtttggactggggacctcattgacatggagaaggccagcttccatggtaacttgtacctccggattgctggatctcctgtaaagaagaagaagaagagccatttgacaaagattttactcccgattatagcctttgtgctgccactcacattcacagccctagtctggacatgtaaaagaagaggtcgacgacaaaagaagaaggttcagaagagagtgatgctagaatacttgaggtctccggatgaaatgggggataagaatatagagttcccatttattagctttgaagacattgctgcagcaacagatcatttctctgactccaatatgcttgggaagggaggttttggcaaagtttacaagggagtgttaggaggtaccaaggaagtagcagtgaagagacttagtaagggttctgttcaaggaatggaggagttcaaaaatgaagcggtcctgattgcaaaactgcagcacaagaacctagttaagcttattggttgctgtatttatgaagatgagaggttgttggtttacgagtacttacccaacaaaagcttggattacttcctattcgactcatcaaaaaaatcagtgcttcagtggacgacaaggttcaagataatccagggggttgctagaggaatcatgtatctccatcaggactcaagactgactataatccatagagatctgaaaacaagcaatatcttgttagataaggagatgagccctaagatatcagattttggcatggcgaggatattctttggcaagcagctccaagcaaatacaaaccgagttgtagggacatacggttacatggctcctgaatatgccatggaaggatccttttcggtcaaatctgacacctacagctttggtgtaatactgctggagattgtaagtggattaaagatcagctcaccgcaccttctcatggatttccctaaccttatagcatatgcatggaacttgtggaaagatgggaaatcagaacaaatggtggactcatttgttgtggagagtaattgccctcttgatgaagtttcgcgatgcgtccaaataggtctcttgtgcgtacaagatgatccaggctccagacctgtcatggcagtggttgtgttcatgctggaaaacagaactacgccactgccaacaccgaagcaaccttcatattttgcacaaaggggttacaagccccggaaggctggagaccacagggaggtctccactgacatgagcttgacagcacttgaggctcgttagatgtttaaccatatcatattgtactctgaattttcagggttttgcaacagtgcaccaacttttttgataactgactgtacatgagacctgtgaatctgtgctatgtgatttttatatctgtgagcttgtttctgtatggacgtatggtgtttgttgaatccgtggataatatagattgtagaataatttggtgaagttagcatttgtgttttttgctacagaaaaggctgacaaacttttacaattttggggtatttcctaaggat

SEQ ID NO: 38213 - DNA, 2384 bp, Zea Mays
gccacacgctcgctgcgcctgcgtgcgtgtgctcgcctcccaccctccccgcactagctctgcactttccctggcagtcgtcccttgttcctgacttcctgcctgagcgcatccggccaccttctatccgcccgccagtccccgccggcctccgcggatcatctgcctgggatcaagatccgtcgaggccgaggcacccgcgcgccaaagatcgtttcttgatctaaatttgggtggtcgtagggatcaaagctcggttctctgcggtgcagttgagaggggtaaaagttgactctgatttgttgaggtgtctgggtgtgagagtcggatgggttctgtgtgaaagctggtgtctctatagtagttcgaaaggttgagcaatttggtttagatactgtggcgagggagaaggaagatggtttcttggtcagggggggctttagcctgtagggttagggagtagtgctgttcatcttatctatgctctgtgtgctgttaaatatctgaattggattctttgtgtattttccaatgagaatagttagttgcattatttgctctcaatataagaaggacgataagcctttgatctaaaatataataattacttggatcaaattggctttagtttcttgatgggttgtatgacagcatgtgcagtttaagatttttgctgttgttgtgaggtaaagagaaagaatagctagcttgatatgacttcttggactgttcatagtgttcttgtgttgttggatttgaaaggctggctaatttggtaggttaatatagcaaccagtagttataacataatttttatttgcaagattagaaaattgtattgagttcttgatgcagattcaaatagactttttattgctggtttgatccttgtccatagtccacacataaagttgattttttatctaattatctgcacttcatgatctcaatcaaacatatggtgcttcttgttcatatttctttttccagcgaggttaaaagtttagctcgttgtggtattgtgatttgtgagcaattgatgcttccatggtacagcatcctaaggaactccatatttttatgtggactgtatttgtgttctaaattgtgataccttgcggctcagattagttgccctttgttgctacacatgtttttaactcttttgattcttaaatattcaattttgtgatgcagcaccaatattcttggcatggtggctgacacggaaagctcagattcactgcctggcagttcaaatgctgcttctgagatgcctgctaatgggtctattcaccgaaagtctcaggaaaagccccccaaaaaaacacataaagctgaacgagagaagcttaaacgtgatcagttgaatgacctttttgttgagctcggcagtatgctagatcttgatcgacaaaacactggaaaggctacagtgctaggtgatgctgcgcgagtactgcgagatctaatcactcaagtggaatctctcaggcaggaacaatctgctcttgtatcggagcgccaatatttccgagaagaatgagctgcaagaggagaacagttcgctcaagtcccaaatatcggaactacaaaccgagctctgcgcaaggatgaggagcagcagcctgagccaaaccagcatcgggatgtcggatccggcaactcaccagcagatgcagatgtggagcagcattccccacttaagctccgtggccatggcggcgcgcccagcaagtgcagcgtccccgttgcacggccaggagggctactctgctgacgccggtcaagcgggctacgcgccgcagccgcaacctcgggagctgcagctctttccggggtcatcggcatcgtcttcaccggagcgtgaacgttcttcccggctcggaagcggccaggccacgccgccgagcctgacagattccttgccgggtcagctctgcctgagcctcctacagccatctcaggaagcaagcggcggcggcggcggcggcgtcatgtcgcgcagcagagaggaacggcgggacgggtagccaactgacagacaacgcacttgaatcggggtgtgtggcggcggcgattgtcctgtaaataccaagaattccgtccctttactggctcgttcatccagaactaatgctggtagctgccctgtgttgagcggcagctctgcttgttctagaagcttctgagaacatgtgtgggctatgttttccatgagattgtaagatgtgaggtggagccgctagaacacttagcgtgcgttttactgacagtgtggagtgctgctccttagttggaatagaaaaatgcaatttgatggctgtgctgctgtcttgatctgttatcttcctgctcctggtgaaagttacccagcacatgta

SEQ ID NO: 38214 - DNA, 2553 bp, Zea Mays
tagctcttccctggatggtgtatgttcgagattctttccatatttttttctttttcgctgttggcagaacatctatacgcatgattggttgtaggggcgtctcgcgccactatcgtgccagtctgggccgctggaaacaagagaaagttacgtttccacacatgcaagctacccataaaaaaacaccaacgctctatgcgtgggagcagacgatagagatgctatgcaactatcaaaacacacgccaaatatggtcagcggaacgccacggctatgagcgtagccaaccaatcaacaaatcatccagtatatgaaaaaaatgagaaacgttatccctaataacagtatccttttatgtcctgcttccgttggcgtatatcttctgcttcactctgtacggtaaacctgtccggctgtcccacctgccagacaccctggaccgtgcgaaaacatgagcgccacgtgaaaaccacctgctagtacaggacgacagccgcgattcgcgaacgtggttccgtatccagctaccgacgctgccatcgaaccacctgtctcagtgaaggaactgtctggaagctgcgtcgcgaaatccactagtactacgggcgaagcagcggatcgccttcagtggccccagcgtgacgggacaaactcaccaagggagcggcgagtcggtgacccggccgaccaccggccaactccagccgctcaaggatacggaaccagacaaccccaaaccgtcagccgccctaccccgcgtggcgtcgttgacgaacgagaggcaggaaaagaaatgcaagggccggcaccgcacggcagcagggccccgcgtgcgcgggagtgcgggcggcatcggggtatcggcatcggcacaccccggaggaccgaaccgaaccaaagcggataacaacggcgtcgcggtcgctcccgccttgtcgggctgtggtggcgggccccgcgctacgcgacacggacacacgggacgccccgcccgtccggcacggcttctctttctcccactccgctcgaggtcataggctcgcagcgctcgcttcccgtatctagccggggggagggggagtctgtccgcgtcgccacgtggccgccgctctcccacgcatgtcggcgtgtgctagctgtcccgtcctcgtcggtcgccgcgcaccgtctcggctcgcggccggcccatcccggtgcccgtccgtccgttcgctgccctccttgcagcgcgacacgcggcgctgctgacattggcgagggtgggctgttcggccaccgtccggcgtcgcacacggctctcgcgttcgtagacggtcgcgtgtcgcgccgcagctgacacgggcgaggtgctggctagtagctagctgctcggcccccgtcggcagcgcacgcctctcggctcggtcgcgtctcttgcgtggtggacggtcgcatcggctggccaccccggggttacatgatcccgttgcgtaactgcgacggctctcttgattagccaagcacagcactcgttaccgccgccgccgccgcggcggggccagccagatgcggtgcaccgtgcacgtaacgtaaagctggcatcgacgcctacttgcgttgccatcgtttgtcgctgtacctgtacatgtccacccctcgtagcttttgcggcgttcagacagaactgagcgtgccatatcaagattccatgttgcatcacggcgttcccagtgcgcaccgaccatcaattatatcgagcgcactaatgaccgcacctgtcacaccaaaacctaacgagcgactagtttactctgctaaaaactccctggcgataagctcatagtcaccgtcacacactcacagcgcgcaagcgccggccgtccctgtcgccacacaccaggcagcccacagccgtgcgcaccgactcgcgcccgcgaaaaatcccgccacgcacacgccctaatcgccatcccacccacccagtcacgcccccacgcctaatccccacctggccgttcgcctaatcccaactatttatatacccccaccgctcataggcgcaagagaaagagggaaagagaagagatacacgcagaccagtagcaagccaagcagcgcccacgaggtagggatggcaatttcacccgcgggttcgggccccgtcgggttttgcacccgtcaggttcgggttcgggtgtaaaaatccacccacgggttagacccaaacccgacccgaagcattacgggtgcgggtgcgggttttgattttcgcccgcgggtcacccggaacccggagctacgcccgaagcgcagagttgcagccggccacccgcccaagtcccgtgcgcatccagtttgtattccagtgggccctgagaaaaacccaaatccctcaaccccaagtccccaaccggccgccatagcagattagcaggctagcaccactgcaccaggcgtccagggctccaggcggccgcggccacgatagatccgcccgccgctgcccgccccaccccggccaccccctccgccgtcaccaccaccggaggacgcatccccagggccgccgcatcc

SEQ ID NO: 38215 - DNA, 1224 bp, Zea Mays
gcgtgacatggcatgccatggtggggctcctgtttatccgtgtaagagtcattagcgtggtcgaatatgttaattttaaaaattaaaatgttataaactagttttaaattttatttgtaaacagtttaaaaaaattaaaaatatcctgtgcaggtggaggcgtggagccaccgagccacgttgtatacgcggatcacggatcaccgtcctcctcgcccgctcattgcttgcctccagtctccagagaacgcgatttgttctgttgttcggtccccaatcttcgcctccgctccgcccgccccgacccagatcaggtaaccccgtgccgagattcctgcgtctcttctctcctcttcgtcgcggatcactcgccgcggagctgggacactttccgtccacgcggatcgctggtcctgcgccgtgcggtcggttcgctgacatgatccctggatcccaaatctttctcgccgagctactgtgatgcgtgttattgaaatacgtcgcggcggatttgttggtgcctctgccgcgtgccggaatatctggataacggcatggaagtacacagctggcattgagctgagagatggacgccaacaggcgccaaggtgggattcagcagttgctggctgcggagcaggaggctcagcaaattgtgaatgcggctagagctgctaagtcagcaaggcttaggcaagcgaaagaggaggcagagagggaaatagccgaataccgtgcccagatggaggctgagttccagaggaaggtcgcagagagcagtggtgactctggtgcgaacgtcaagcgtctcgaggaagagacaacggcgaaaatcgaacagctcaaccagcaggctgcaagcatctccccagatgtcattcagatgcttctgaggcatgtcaccaccgtgaagaactgagaagtgctgctcccaaactatgctcatcggtctatttatttttgtcagagcagatctgcaaattcatcatggagtgaaagccgctcgacatggaaattcatggtgttgctttttttttatgtgcaaactgtgagttgttttggaaaagagaacaagaaaaatggttatgttcttggtgaactagaaactccgaagaaaaatggttatgttcttggtcaacgagttagagcttcgctagatataatccagatggacttggatgtcagtatgctacgatctacgaccacgccagtttggcacgctac

SEQ ID NO: 38216 - DNA, 1675 bp, Zea Mays
atcggtaagctcgccaccaccgcgcccgggtcctccctcttcttccccgccgccgcgacctctgtgggaggaggcgacgacagggaggtgcagctgcaggcgccgcggccggagcacatcgcggcggtgaagaaggatgcgtccgggtggccgctctggctctccgaggccgccggcgacgcgctccgcggctgggcgccccgcggtgccgacgccttccagaagctcgagaagatcggttcgggcacgtacagcaacgtgtacaaggcgatcgaggtggcgagcggccgcgtggtggcgctgaagaaggtgcgggtggacggcgtcggcgaggccgagagcgcgcggttcatggcgcgggagatcgcgctgctccgccgcctcggcgaccaccccaacgtcgtccgcctcgacggcctcgtcacctcccgcctcaacacggcgccgtccctctacctcgtcttcgagtacatggagcacgacctgactggcctcaccgcctgcgcagctgcctccgcccgccgcttgtccttgcctcaggtgaagtgctacatgaaacagctactctccgggatcgaacactgtcacaacaacggcgttctgcaccgggacatcaagacgtcgaacttgcttgtcagcagcgacggaatcctcaagatagccgacttcgggctcgccacctcttacgaccctgaggacgcgcggcccatgacgagccaagtgatcacgctctggtaccgtccgcctgagctcttgctagggtccactcactacggcgtcggtgtggatctctggagcgtgggctgcgtactggcagagctgctcctcggcgagccagtgttccccggaagaacagaggtggaacagctgcacaaggttttcaagctgtgtgggactccgtcggaggattactgggagaagatgaagctcgctcatcctacgttcgggccgtacgaacggtgcctggctgagaaattcaaagatgtggcaccatctaccctgtcacttctcgagactctcctgtcgattgacccggacatgagaggcactgcgactgatgctctaaacagcgagttcttcaggacagaaccatatgcctgcgagccatctagccttccgcgctatccaccgtgcaaagaaagagacgtgaagctcaagtacgagaagcacaagaggaaatccagggttaatgggtcagtagaacgtcacagaaaccgacagcacgcatcacagaatcctgggcgcagggttttcactccggatgccaataacaagccgcaagcaaatccaaaggtaccaaggctggtgacaagcacgagcacgaccaagctcgagaggtttcctccgcctcacctggacgcgtcgatcggctacagtctagacgcatcggttgacgacggggccacggaagagttcttctcgtcgtcggccgctgagctgaagaaaatgccgagcctaatcttcggccacgtgaaatcttacctggcgagtagcccgaggaagggcgtgcacaaggcaaagccaagcctcaacatggcgatggcgcctcccacccttctcatcggtgcgttccggccttactcctttgggcggtcaatggaggtgaggaggaagaacagggagcagttcagaagcaaagggagaaacgcagtaggattagcttatcggatgcggg

SEQ ID NO: 38217 - DNA, 1536 bp, Zea Mays
tcccagccgccgccgactctatctctcccttccctctcaccacctcctcgtcatcctcagcgtgcacgctgcgcgtggccgtagtgggggtggccccgcggcacgtcggctgccgaggcgctggtctcgccgagggcccagatgcaggtgctctcctctaccaacctcgccgctgacttctcccgcgcgctgccgcccggggcacccatccccatgctccgccgtgaggtgctccactccttcctccgccgtcgaggccgagctcgtccagggcctcatcacctccgccgtgaggtgctccactccttcgtcttcaagctctcgccccaggggtgcgctagtgccaggtgcggcgagccagcagatcaaggaaaccgcccgtggccgccccaagcgttacatctgcactggctgctgctggtgacaagcaagaacaaccaaagtttttttgcgcgcagtaaagaagtctacataattgccaagaatcatcttcatccatggggatccggtaaagcagcagcccctcggctgggtaacctactgtgaagcatcaggtcagcagtgaaggagatctgagttcgaagcaaatttgccgcgaattctctccggaaatcattcgagtggctggattttgaagcgcagccatgggatcggaggattttgtctgtaaaatgatgtgattcggcgggtgagagactggttcttccgggtccattgtagcagcagtcctttttttatctccttagttttgttggagttcttccgggtgagagactggttcttctgggcccagcggcgggtgagagactggttcttccgggtccattgaagcgcagccatgggatcggaggattatgtagacttctttaggccttgttcgtttgtatcggattgtatccgtaatcattccagctaatcaaaatttatataaattagagaagcaatccggttaggaatcgttccgacccaccaatccgtaacgaccgaacaggctcttactgtgcgaaaaaaactgcctcggaatcattacaggtgctctagcctccgcatggaattcgcggaatctgcagctgtgactgactctgctatggcagaagctgctcttcaaatgtctgtccaggatgcaaacatgtccagtgacactgatatgagtaaggtgtttgaagacagaacgtttgtgtcatctatccttaattcgtttcctggtgttgatcccaatgatccatctgttaaagatttgctggcatcattgcacagccagaaagaggaagagaagaaggaagacaagtcagacaaaacagaagacgagaagaactgcttcaagctggagtgatgtcgctgtggtgcttttgtgactgatcatctctggagcttttgtgaatgatgtagctagctatctgtaattgatctagttgtgaatgatattataattgtgatacttttgtgaatatataattgtggtgcttttgtgtttatgtgatggatctatgactgtggtatactgattaattgtgtatgtctttatgattcgtgtat

SEQ ID NO: 38218 - DNA, 6091 bp, Zea Mays
ggttctttctccaccccgatgcccctccccctcccccgtgtgatcccctctccagatcgatgtctgccccggccgtaacccccgcggctcaccgcacgaaaccgccgcgagatcttggagctcagcctctgacgatggctacgactacctcgccaacctccgcgagctctgtccccctccctctcctccaccggcggcgggggatccttggccatgttcctcccgaggcgccggtccacgcgcttcggcctccgcgtggtcatcaagcctttctgatggctcggaacagaggtcagctatgcgatgtggcgtggcgaggttaccgcgggcgccgcggaggtggagggggaaggggaggacgagggcacgggcaagagagcgcatcgctgtggacggtctcgtgagtgagtgctgctgcctgcccctctctctctgcctgcgttctcctggtgctgctctccctctcctcccctgcttcgacctcccgcctttccccaccgtttcttggatttctaggatccagacaaccgcccttgtgagcctgccttcctgcctactacctgcgtacgtacaggagggaccttgggtgatccgggtgcttggtttcttggttctacggctttcgctgctgttggatttgccgagccggagccgacggagatgaccgtcgacgagctgaagctgcaggcaagggccagcggcggccacgacctaaggaccagttccccgtcggcatgcgcgtgctcgccgtcgacgacgacccgacctgcctcaaggtcctcgagaacctcttgttccgctgccagtaccatgtgacaacaatgggccaggcagccactgccctgagctgctgagggagaagaaggaccagtttgaccctgtgatcagcaacgtccacatgccggacatggacggcttcaagctcctcgagcttgtgggcctcgagatggaccttccggggattagtgaagcggcagaagaagagcttttacatacccttacaatgctgattttgatggagatgaaatgaatttgcatgtccctcggacggaggaagctcgcactgaagcgcttaattctcataggggttcaaaataatttatgtactcctaagaatgtgatgggggatacttcaatgcaataatgagcttcccacaaaattacccaaacagcccaccatcagtcagatttacctctgaaatgtggcatccaaatgtctaacctgatgggcgggtttgtatctctattcttcatccacccagtgaagatccaaacggttatgagctcgcaagtgagcgatggacacctgtgcacacagtatggcttcgtatactttgtttacatatcttttccccattgtaatgttactcatctcccttttatgtgtatactttttagagagaaaattaccttgtagtctcattgtttcagtttatggtccaatttacaatggcttcactgtaaatgggaaaacaactcggtaggaatgcttttttgaattataaattatttctatttcatacgatgcttataggtatgtgatgagtcctccaatctgagaagtagagcatggtaaagcactccaagctgctctttcatcgggaaatttataggtgacacttgtgtcatacattgaactatggagtcaaacaaattacatattatccttcaacatttttcaccagtgggaactgtagttattgcgtagaatagatggtatattaatcgttgagagccaatgtttacattaactgttatgcagaagacaatttatgttttattttatatctaactgtactttgttgcagcttgtaggtactgatcacagcacattcaactccacacagattgtccatgtttctttcagtcaccatgatttatcactaggtcattgtgtttgtggccaacgagtattgttctaacagttatgttcccatagctagctagattcattgttgtgttttgttcagggtactttcaccacttctggtatggttctgtctgtaatgtgccagggattattatattgtttttggtttggatttggaatggtttggggtccacaacgatgatgcgtcagagctgttccaaggattggatgatttccattcccctgctgccaattcgactaggctcgccgtctccgctctgcccaactggcaccaagcagccaatggaacttgagcagccaatggatgatttccattcccctgctgccaattctccgaactgctttgacccttcaactcaatccgcatgtacccagcctattgtggcagcaaacagcgactgggtgcggaagccggaagggagaggcgcttggttgacccagaacggacgacaagacaccgccgggggttcgctgcaaccgcacgcgtggtggccggtgtgggaaggagcccactgctcaagcagcgacgacttccgtaacttctcaggccaagggcatgatgaaatcagtgtttgctatttagcctccttcacaactaagatcatcctacataatagatttagacaacaaaaacttatggagtttgctgaaatgccctttcaggcatgctccatctgtgctacaaggttatgggcttcctgcttgctgccagcagtcttttggtgcttttatattgctattaatttgtttgaaatttattatggtgatgactgggaaggtctttttgaggctattactggttatggccttggtggctctttggccgtgttggtggtggtatttataccaaggctgctgatgttggtgccgaccttgtggggaaggtagaaagaaacattcctgaggacgatccaagaaacccagctgtcattgctgacaatgttggtgataatgttggagatattgttggaatgggatcatatctctttggctcatatgctgaatcgtcatgtgctgctcttgttgtggcctcgatctcgtcttttggaatcaaccatcaatttactccaatggtgtatccccttcttgtcagctctgttggtattatagcatgtctcataacaacgctgtttgcaactgatttcttcgagataaaggctgtgagtgaaatagagcctgctctcaagaaacaacttataatatccactgttgtgatgaccattggcattgcgctcatgttggcttggtcttccatacaccttcaccatttataactttggagcccagaagacagtgcaaagctggcaattgttcttgtgtgtggcggttggtctctgggctggcttagtcattggttttattactgagtactacacaagcaatgcctacagccctgtataagatgttgctgattcctgcagaactggagctgccactaatgtcatttttgggcttgctctgggttacaaatcagtcattatcccaatttttgctattgcgtttagtatcttccttagcttcagccttgctgccatgtatggtgttgttgtggctgctcttggaatgctgagtaccattgccacagaccttgctattgatgcctatggccctatcagtgataatgctggaagcttaagtctctccaccgccaccaccataggcggcgctccaaacacggtggcgccatgcgcgccggcgtggtgcggggacttggccatctcctacccgttctggctcgcaggcacgcatctgcccaagtgtggctacgaccaagggttcaaggttacctgtgacaaagccaaggacgatggcacttgcaacatcgacaagttcgtcaatgcctccttcgtccccagcccgccgttcgaaatcgagccccaacaaaaccaggagctgttcttcgtctacgactgcaacctgcgagcgccgcagctgcctcggtcttggacacccttgcgctgtggcaataatggctcgttcacctggctttctggggagtacaggcccgaagacagctccatggcgatgccggggaactgcaacgttgcgatgataccggtggtggcgtacgagggggcgaccgcggcagattatcagtggttcgtggagggaggtttttttcttagttactacctcacggacactgaggacgacgactactacgaccagtgccaagcttgctcgtaccgcgctggccacggccaatgccggacaattgtcagtgacaatgggttccagtgctactgctctgacggcgtctactcgacgacggcctgcggaaccaagagggctaactggaagacaacaattgtagaaagatatggcaacaaatgtggcaaacacgatctatctaattctaagaccatttttgtagttgaatcgaagcgggaactgaatcaagaatgttctatttatatcggtctcagttgcatggaagcgataactgaatcaagaattctctatttatatcgatctcagccattttgaaggatgaacgagcaccaggagagagtccgggaggaggcatatactgttgggacgtgtccaagccagtggagatgcagtggagatggaggagatcgacattggcatggagaagctgcgaaacccaccgcagcagaaccccacctagaggaagaagtagaaaacttgtgccggtatgagcttcctaatgagagctgggaagtaaatttgcctcctgaaaaggtgtctcctgagctcccagtaccaacattaggcataaactttgcaagagatggaatccagaaaaaagagtggttgtccatggttgctgcacacagtgatgcatggttactttctgttgcattttatcttggtgctcaatttggtttcaataaaaattacaggttaattttcattccatctttatggaatatgtactacagtctctatcttttactgcctgccttttttgtttatccatgaagttttcctactttatgcaaagctttcctacatgcttgctttgtcctaaaaaatattagacctattttgataggcaacaggtacaagtaatatagtataaattataagtactgcttaagaactgtgaataaaaatgaacctgcacaatatctccacatggaattatttgtcttagtgaaggaataacatagtcaaatcacatagagtttgcactgctcatactactcaccacatctaatgtgctaattacttttcagtaatgatgttgccaatctcaacaagacgctatgagcaatttcctttagcacgaaacaatgttgagcaattgtagccattttctggattagccttgattattttattatgtttagctttatcatttgcttttctaaaaactacatattttggtgactaacacgacaattaaatcgaggatgataaatggtgagcatgcgacacttcgtcgacactgccgagctacacccagtttccctctcggcttctctgattatcgaattttgtctgagtgcgtgcggacgcaggagccggaagagttctcgttgaggagaagcttgttgcgacccaaagagagaggacacatacatgtggacgcgagacgactagagccagaggaggactgggcacgcagaagagcgaggaggacaacgagtcctcacacctcaccgccaggacgtcgtagataattttggttttcttgtgattctctttatgaagtgggtggtacctcaaaagacatagatgatctgttgacttatggcagtcgggcattacatttttttgcatgaaatcgacatctgaggagtgataattttgttttgatcgcttctctattgcaagatttagatggctactatcctttgcgattgatcaagaatggtgagctattctaaggaagcttctgaacaatatacccgctgtcctagagtgtcatagatcagggttgagatgattccatcatacttatacgaagattttcctagcaaggaatggtttgaacaatgttgtgattaggcaagggataatgggtacttgctctgtgatgactcaaaaagaatgagattgatcgattgtgtagctgttgtagctccaattgagaaatattatcagtattaagctgctttgatggttgcccggtctattgcttgcatgtagcatgcatctccgcggagatccaagttgttatgctttgagctattgcatcaagagtttaagatagtctttatatattttact

SEQ ID NO: 38219 - DNA, 677 bp, Zea Mays
taattattcttaggtatgtgactttggcctttcaagactgaaagctaacactttcctgtcttccaagtctttggctggaactcctgaatggatggcacctgaagtgcttcgagatgaaccatccaatgagaaatctgatgtctatagcttcggtgttatcctatgggaactaatgacactgcaacaaccatggtgtaacctgaatcctgcccaggtggttgctgctgtaggtttcaaaggaagaaggcttgaaatcccaaaagatctgaatcctctagtagccgtattaattgaatcttgctgggccaatgaaccatggcgaagaccctcgtttgcaaatattatggacactttgaaaccattaataaataaggttccggcacagttgatccgttcagattcgtagcctgttctatacgggtacgggaagatgtattttactgagtggtcctgataacatcaacatgagtgtcctaatactgatctgctataattgaataatccttggatggtattactcattatgataatacaattctcataatctttcaaatgaagtgtgcctggcaatttctttccatggcttaaggtgctgtttgagtttttgttggtctgggatttactccaagaggtgcagctgtatcctaatgttgaggatcagcatcggtggttgccat

SEQ ID NO: 38220 - DNA, 3761 bp, Zea Mays
ccaccctcgtcgtccgcctccagagaagcagaaaatcgtgtcccgagtccgccgccctacgcctactgctcctcccaccaccaccaaacaaacaccacaccgcgcgccacgcctccgtctgccggcggtgaccgagccagctcatcagcggccaaggagcgggatgccggggccaggagcgcacctgctgtacgctctgtcgggcggtgcggcgctgtctcggctcgccggcccggaccgccgcttcgggccgcaccactgcgccgtctacgcagcgaacgcgttcctcggcccggacctcggctccttcgccgagtggctctgctccttcctcccctcggcctccgccgcgggggacctcgccatggccgccgtgcaccaccccttctactacccgctcctcctcggcctcccgctcgcctgggcctacgcctggctctcccgccgtctgcttcgcgccggcgtcctcgactctccctccggggtaccattaagaaagaggcagtgtttcttgctgatctctgccggctcgctctcccactttttcttggatcacttgtttgaggagaatgggcattctacaatgtacacttggatactgagcactggttggtggaaaggtcgtgctcctatcaatccagatgcagtgctcgtcgtaggacttctttgcacttgcctcatggggggatatgtgtacatcaacagagtgaatcatggaaggtctgcagcagaaaaatcaaaaccaatctttctttctcattctgatgatagccaccctgtactgtatgtggtgtgccagtcagatatacctgcggcaaccccctcaacctgccataggtgaagaagctgatctcggagtgataatatttcttgcgatttatctttttctcccacatggcctgtgcgccctttcgatgaatcaaaaggattatacagatgcactgaatgaattgccacttcaataatgcgtgtcgttattattcatttttcttccagtctgtgcagaatatcagtttggtaacagtctggtttctgcattatgttgtaattagatttagttactacctgaatgattactagtgcacttatgtatagccctgtaattctggaagcatatattattgtggaacaaagctgtatggatggtgctgacttctggtgaaaaagaatttcatctttttcattggtcgcagaggtggatcatatggatttgtattcaaggcacacatgactatatttttcatttggcactagttggtatatgctataaagtgatgatgtctgtcaagctagttatcgtgccttgtacacttaccagcgtttcctttttatagtaagttgaaagatagcatattcacttggaccatcacagtgaattcaagtgctgcattaaactcattatactaagaggtatcatgcttgacacctttagggctagtttggtgacaaagcaattgaggaggattgggcgggattgaggaggaaatggactaatttcctcctcaatcccccacaattcccttgtcaccaaactagcccttataggtttttctctactgtagctatacttctctgtatagtgtgacagaaaaggtgctgaaatattcaagcctgtgctctaatagaagtctagatcgtagtactgtccctagatttggtctttcagtatctctggttataggtgtgaactaattctattggtttgtcttaacttttctgatgtaaatttctcatcactcgaatggtttttcgttcacttagcgcacaaaaatgcttaagcatggtcatgtaaacatcaagggtcttaaggattacacataatagctatgcaagggattcgacaatgctaatgttgttgtgttttgcatcatctctcatggatatctcaagagccttctcaagtcttgacacaacttgctccatggatggccgttgcttcttgtggccagtgcataacagagcaagcttcaaactgaggtcaaatgcctccgttgaatactctccattcaacctaggatcagcaaactctgatacattgccatcttggataagtgtagaagcctgggaacaaaagtgacattggcatagcagtattcatgatgttgattgctcgtcttcctgagaggagttggaggagcaccatgccgaagctgtacacatcccctgcagcattcaccctgtggttgtggcggtattctggatcaacatagccaaatgttcctctgacttcagagcttacgtgcgacacacctaagtcgatgactctagagagtccaaaatctgacagcttgggttccatatcaaccccaagaagtatattggttggctgtcatagaaagtccttcagggtatatgtgcaggaaccaaaggccacaagcacttccaagtgctatctgaagcctctgaatccatggaaggttaccgttgatgcacagctcatacacaagaaaacactcctcctgcccgtcacagtaacctcttaatgacacaaggccagccatttgtcagcactcctctgtataccttgcctggaaccacaagatgaaccagttgcacaccataaaggacaacatatacttgaacagttaggtttctaagtctcgtgttcttggatgaaaaatatactttctcttgatttatggtatagataccataactgtgaatcaggtagtctcctcatactcaagggatgccaacgcgacctctgcaagaaaaaaaaacatgtgcaacttcgtattgctattagtggaaaacagctatggccccaattatcaccccagcacagaggcatcctagcaacgcttcgtatcctgttgataaattttgaggagctcaaagcttgaaagatcaagtagaaaggtatgtgcaagagaagtaaaataaaccaacctctctgcatcccctttagcttatggcacttaccggaagaacacaagaatgcttctcgctcaccttgttgttgttctaataatgaagacaagtatgtctccatggacaatctataaccagtcgatgttaccaatgaagcgtgtagtgactgaccattgccgtccaatgcataggcatggaagaagccaaaaacacaaaaataaatcatatcccgtaattaaagtgttaatgactaaccattgccggtcaaggcatagccgcatagaagaagccaaaagcactaaaaaaatattatatcccataatttgtttgggggtattgatcagaaattctgaatccaacgtcagcagtgtcaagtatgattgtacatgtacagatggacttggattggtgtgttgttgggttagtggagatccattagttttcaccctttctatttagtaatcaatacatttgcaacaaagcagaggagagatagacaaatgtcaaacgtggcaactctatacgcatggtttaataatgtacaatgggcccgtgtaaaatatgaagtagattactggagcactcctctacttggacggcttcaaatgagccaaactaggagttagaaacaacatgttctttgttctttaaacattaactactggagcagatcatctaaccatccacacgtattttgtactcaagtgtaacctccctgctcttttcaggcacactttgtcttcaactgtctgttggtttttactgctgttcagcctgtccttatgttgattgttttgttggatatgtggatgttaagttgttataatcgacttgaactcgccagatgtactacttcgcaaatctcttgtttggatctgtgaacacacagg

SEQ ID NO: 38221 - DNA, 2366 bp, Zea Mays
tcgtgaattacttaattctgaaatagaaaagctgacgtgactataacatgaggttgtagcctgctgcagcctgtgcactggagcagcaggggcgagagtggaggcgagagctgacgtggcaggggcgaaagggaggctgtgcactggactcagccttacaagtttgagttaagattatgagattctaatgcaaaatttagaagttgcgtggctaataataagattcttaaaacgagatatgaaccaaccatgcccatgccatagatcacaggaggaaacctgggaggggggcaaacatttggtccttgtagctacatctaatttttgatctcatatctatttttggaatacgtaatacatctatttttttggaatacataaaatctcatatatatttgttcgtcgctagttatttacatagtgcgcgccatcgagaaaaggtatgtttcattcataacaggtctattttggtttgtttggatgaaactgagacccaaacatcgattgattctgtaagagatacttcctttgtcctacaatacaattcgttttagcacttaggttttatgtctatattcaaatagatgacgataaatttaaacacatatataaaacaaatatattaattattgtataaatataataaaatattaaatcgaattttaaattggaatgagagtatactttaaaagtttatagattgattgacatatttaaacaagtttaactatcgaaaatacactttactaaaaaatactacgcttccaaatgagactctgtcttcacaaccgatgcagcagctgctgctgaaggaacagcaagcggccgaacggtgcgtcacctcgctgctgcagacgcagcgaaaatcgaagtcgtccggggtaacggagaccggaccagacccagcgcggcggcggcggcggacggaggtgtggcgtggcggtcgagcacggcgcaaggatggggagaggcgccgtccaaagtccaggcgagatggaagcggaagggccgaaggggtggggactggggactactctctgcatcgagttggacggcgtggatcaagccactctagaatcgaacgcctccggcgaacagccgtagcggaaacgccgcccgagatgtctgctccctccgccccaccccgcacggtgatctgtgtgggcgacgtccacggctacatcacgaagctggagagcctctggtccaacctccaggccgcactccccgccgacgccttcgccaccgcgctggtcatcttcctcggcgactacaacgaccgcggcccgcacacccgcagggtcctcgacttcctcctcgcgctcccgacgcgctaccccgcgcagcgccacgtcttcctctgcggcaaccacgacctcgccttcgcggcgttcgtcggggcgctgccgccgccgcccgacggctccccgttctcggccacctgggacgagtacatccacaacgaggagcacgaggggtggttccgcgggccgggattcgagggcatgcacgtgcaggggaggcggtggggcggggtcatcaaggagaggtggaaccccaagaagggcctcccgtacaagggctccatctacgacgcgcagcccaccttcgaatcctatggcgtcgcccatggttcctctgatcttgcaaaggctgtgccagaggagcacaagaggtttctgcatgatttggtttggatacatgaagaggaaaatgtgccagttgatatggatggaggacaaatcatctgcaatctgattgctgtccatgctggcctagagaggaccatagatttgaatgagcaacttagagttttaagaactagagacacaagggtgccaaaggttcaaatgcttagtgggaggcaagatgtttgggacacacccaagggtctggccggcaagcagactattattgtaagtggccaccacgggaagctccacatcgacggcctccgatttataatcgacgaaggtggtggttatgaagacaaacctattgctgcgatagtttttccttcaaagacattgatcagaagtaccgaggaagcgggaaccacatcagagaggtgatctagagttctagacatcgtcaggagcagtgaacacggaggcacagttttttctctcttgaagttactgcttgtagtcatgtactcatgtcaaacgacaataggaataacgtccaaaggcaataagttggtgaaccggacctgcgttttctcaatttagtcactgatgactatatgtctatatatattgtaccttgatgctgtcaatttagacgagaccgtacatcctctttttttagggcaataaactttactccctgtcctcaaatatttgtacacaaagagtggtggtgag

SEQ ID NO: 38222 - DNA, 3841 bp, Zea Mays
aagaaacgggaaagggcccggcccaccgtctacctacggccgccctcgagtatttggagccgctccgcttccgccagcgcccagcagagcagcctgagccagcagcccgagttcgattacctcttcaagctgctgcttatcggcgactccggcgtcggcaagagcagcctcctcctccgtttcaccgccgactcctttgaggacctttcccccaccataggtgttgacttcaaggtgaagatggttaccattggtggcaaaaaactcaagcttgccatctgggacacaggtaccaaaccattgcccccccttacattttttagattaaggaacacaatgtttccggcctacccattcgcaaacgaatgagtacagccacacagcaggactcgaaggatgcttagatctaaatccattaaatgacactcaaaagaacaccagaacttagttctcaattcttctcctatgtctcaactgaaacccaacgactcagcacgtttcaagcagcatatacaggatgaggacttaggattttcagcaaacaaagcacgacaccggttgcacatgtaggaggagagcacagcggcgcgtaggaggagagcaccacaagtgaaccgaaacatcatgagcatgaaactatggcgccagcaccacggcgacctccttggtgaacttggtgccgaggcattagatagcaacctgagacctcatgaagtccaggggtttcaccgtcatctctcaagtcatcatcctatataatgaatagaagtgttgtagtgcagcagcgagagtccttaaacttagcagctcatgcagtgtgaagtcattggagatgtcgaaggcaccattgttgtagaagaacagtcgccgcaccgcggcaagtcgatgtcgaatttaagaatgtgaatggcatgccgttagtgctcatggttgcctgccaacgacgccgagacgtcccacattggcgctggatgtgatggcatcccccaaatgcctatgacagcgcgaaagtgaactaacaccggcgacgatatttcttcctccattgcagcatgactccttttcctcttgggtggctgtgtgtgacacacaggcgagatggctggtggtacgagcagcatggcaacgtggcggccggcatggcttgtgcgcggggcgataacgcgggagaccagtgtgggctccatcctctcctggctggctcaacttccaggcatctggggaggagcattagggctgcagtggcgcgtggtgagggctgtggcggtgcggtgcgggacagcaagaagcctcgttgtgcagcatgaatggatgttgcactttcttttctaagcaataggatggtgttggatggtgcatagaggcacgaaagttacatggggacttaccagagggcagaggcaggttaccgaatccgagatcaataataccataaaagaatcgttttggtctgtccttttcccccacaattatttcgaagagctaaccattccactggacagtgtcattctcgttctgattttgcccagctttatcctatctatttatacatcttccattctttgagtatgatcgtgtatttgttatcgctgatgattacctgttatgcagccggacaagagagatttaggaccttgaccagctcttactacagaggggcacagggggttattatggtgtatgatgtcactcggcgggaaacgtttactaatctttctgatatatgggcgaaggaaattgacctgtattcaaccaaccaggactgtataaagatgcttgttggaaataaagtagataaggaaagtgagagagctgtgacaaaaaaggaggggattgaatttgctagggaatacggttgtttgtttctagaatgcagtgcgaaaacaaaagtaaatgtagaacagtgctttgaggaacttgtgctaaaggtatgtactgggctatagcatttagatttataataataatattttaattttcacaatatcatgcatgccttgttgttcacaatattccaagcggcacatatgttggactcaagtattgcttgtttagccatggattggctttgactgaaatgaggaagggggcttttatgcatgtgtgagtgtcctcgaagaaattagattgctttatgcatgcttgttgttgcagatattagacacgccaagcctcctcgctgatgcttcgtctggggccaagaagaacatcttcaagcagaagcctccggaagccgatgccgctgcaagcagctgctgttaacatgcttttgccatgctaattccgcgtcctcccgtggatgatgacgatgatatctttgtttggtgtgtcggtttattgtttcttcttcttttggtcctgtatatgctgaatttattacacccacacataactgtacgttggcagcagctatataatatatcgttttttgttgtttctttttgttttgtttaaaagagagagagagagaatagtatatgttttgttttgtttccgtgctccagttgagagagagagagagagagaaatgaagatatttgagaggagtatggatggattcacgggtgggcaagggcaagggaagaggccaggccatcgcaggcaacacccgtgccgtgtgtcgtgtcgtgcgaggtcacgggtcactccagccaaaaaacagatgatgatgatgatgatgtgccatgctgcggggcaacaagaaactgaacaccacggaaatccaaggaccagccagcgcccgccctcgtcccttttgtatgtatgtgctccctctctccctccctccctttgccatttgccgatttgggcagcagcaatgacacttccctgcgccggcggctgcgagatccaagccagcggcattaactaccgcatcgccgtctccacccgacctctcaaggtctggagcagatcagacgacgacgtccattcccaagaccaccacagcgtcgtccgccaggtgctccgggacgtctcctgccgcgcgcgccccggcgagctgctcgccatcgtcggccccagcggcgccggcaagtccaccctgctcgagatcctcgcggggcgcctctccccgtccccgccgccccacctgctacgcatcgacggcgccgccgcccacagcgccgacctccgccgcgtctccgcctacgtcacccagcaggacgtcctcttcccgctgctcaccgtgcgcgagacgctgctcttcagcgcgcgcctccgcctaggcgcgcgcctgccctccaaggacatgcacgcccgcgtcgaggcgctcctcgacgacctcaccctgcgccgcgtcgccgccaccaggatcaaggacctctccggcggagagcgcaggcgcgtctccatcggcgtcgaggccgtgcgtgacccgcccgtgctcatcctcgacgagcccacctccggcctcgacagcgcctccgcgctccacatcgtcggcgcgctccgcgccatggccgaggcgcgtggacgcaccgtgctgctcagcatccaccagccgggagcgcgcatcgtcaagatgttcgactccgtcctcctgctagccgccggctccgtcctccaccatggcaccgtcgaccagctccgcgccctgctcggggacgcgggccttcacctgcccccgcacgtcgatgacgtcgagttcgccatcgactccgtggacgcgcttcgccgccacgccagcagcagcctgcaggcgccgtcctccggagaccgagagggccggtgcacgctgcagcgtctgttccagctgcacggcaagcaggtggcggacgcccccgtggccgtgaccatgatggctagccgctacgccaactcgcgggcgcgggaggtggcg

SEQ ID NO: 38223 - DNA, 574 bp, Zea Mays
cgtaataattcacagatcagatacgaatcatgatttttgatctaaaatccgactcaacccaaaaaaacttgctcaacctaaaaactctcgatccgacacgtaaaaaaggaagcacctgacccgactctgcactagacacgggttagataaacgggccgtgattaatggcccatgatccgatctgaacctgacccgacgtttgaacgagatgcatagtatcgaacggcggaacgagtatcatgcattatgcaagcatgtgcccatacacgccatgcatcgaccggccaccgtcgctttggccgtggcgtcatctggcgtgcgatggagagcggccgccgtgtggcggggagcagccgggcaggcgcgcacgcactaggcgcatccgcatcgcatcgatgttgctgcactgcacccctgcatgcatgcccggctggcgcctagtcgtcgtcctcggctctggggccgacggtccccgtcgccggccggcggccgtggcgtcagcaggtaggtaggtaggtagccagagcgcgcgcgcgccaaaagcagtcggcctgccctgcggcccctgcccctg

SEQ ID NO: 38224 - DNA, 1609 bp, Zea Mays
acggaacagcctcggcctcaggacgcagaaattcgtgtgcggtgccgctttgcctcttatccctcccaactccagcgccgctaggggtcaaatcgaaaaatggcgttgctgagcccgcgcgtgccgcggctgccgccctccaccttcacctccgctgccggtgcccggtgctttggccccgccgcgaggtgccaggcgacggcggcgggcggcgtggcggccgcggggcccccgtcgtcggagctggaggccatccggtggggcagcgccaagctgcagggcgctcgcgacgagatggaggatgaggtcttgctccgcccgggctccctcctcgatggcttctccttcgccgccgtcttggatggacacgccggcttctccgccgtccagttcctcagggatgagctgtacaaggagtgcgcagctgcgttggacggcggcgcggtgctcagcactaagaatctcgacgctatcacggcctccatccagcgtgccttcgccgctgtcgacgccaagctctccacctggctcgagcaaacggacaaggacgactctggtgctacggccactgtcatgtttctcaggagcgatgtgcttgttgtctcgcacattggggactcttgcttggtgatatcacgtggtggaagatctgaagctttgactggctctcatcgaccatatgggaacaacaaaacgtcccttgaagaggtcaagaggatcagagcagcaggtggatggattgttgatgggcgcatatgtggagacatatctgtatctcgtgcttttggggacataagatttaagacacaaaagaatgaaatgctggtgaaaggagttaaacaaggaaggtggactgataagttcatctcacgctctttctgtgcagaatacaatttaaagatgatatagtaatctcgtcacctgatgtatctctggtagagcttggaccagacgtggaatttgttctgttggcaactgatggtctttgggactacataaaaagctctgaagctgtagcttttgtcagagatcaactccgtcagcatggtgatgtccagttggcctgcgaggcacttggtcagaaagctctggatcaacggtcccaagacaatattagcatagtcatagctgacttggggaggacaaactggaaggcgttgcccgatgaaaggccgaacttgttcttggaactaagtcaagcagtcgcgactgtaggggttgtctcaataggaatttgggtctcgtcgttccttgggttacagtagaactagctactccgtccggatgtgtatattacctactgagtttacatctttctgctagcagtagcagctgcaaaatatatgtatattcgtatatagtgtgtgaattgatagggtaatctgtttgggtaatactgagtgaacgtgtgaagtactgatgaagatcgtgtagttgagctcctggtgagtcatgagtcatgacagctgagtggcttttgagtaatcctcatgtcaaaaaaaaccaagcaaaagaagaagaagaaaaagatcttctcatcagttgctaattgctacaaagccataaacaaatgaaggagtattgaataatggaatcgaataagtgcatg

SEQ ID NO: 38225 - DNA, 3150 bp, Zea Mays
ctcggcccctcatctcttcctctcccataaaccctaaaccgccctattccccactcgatttcgccatggaagccgacgaggcctcggcgccgcctcccccgccgtggatgcagaacaagtcggccgcggccatcgaggcctcgtcgggcccgctttccgccgcggcctcccgcctctccgcccgctcccgtgcgctcccctcgtcccgcgacttccacttctacaacaacttcccggcattcaaatccccagtcggcgctgcggccgcgaaggccgacgcgtccctcggcgtgctcggcggggcttcgattctcccgacgcggcagcagccgttccccgtgggcggcgacctcgacgacgcgcacgactggctcgtcgccctcaacgacgacttgctcgagcggttcggcgcctccaccgacgagttcaagaccctgcggcggaaggaggagacttccgggcggagggcggcgccgcaggctggggacgggttccaagtggtgtgcgggaagaagaaaaagaaggtgggcgatggtggcgaggaacgcgtcggcagagttgaggctttcggaggttttggctctgtgaggatggtcaccaaggacaaggcggccgcgccgggggtgaaggcgaaggtgcccttccacatccgcaccatcccaaggccccaggatgtgtattgtattgtggtggacaactccagcaagccgttcgagcatatcttgcttgatcgcagcgaggatggcactcgggtcgtgcacccattggaaaaactccctgttgaacaaataatcagcagaaatgttcctgataatgagccagttaagccaccggctttagacaacactccttttacatttgttgaagacctgaaaaccttggaggtgctagccacaaagctgaaggatgcaactgagtttgctgtcgatttggaacacaaccattataggtcgtttcagggtttgacatgcttgatgcagatttcaacaagaacagaggactttattgttgacactcttaagcttcgtaaatatcttggtgattatctaagagagtttttcagagatccaaccaagaaaaaggtaatgcatggtgcaggtcgtgatataatatggcttcaacgagacttcagcatatatgtgtgcaacctttttgacacaggccaggcttcaaaggtcttacagatggaccgcaacagcttggaacatcttttgcaccatttctgtggagtagctgcaaataaagaataccaagctgcagattggagattgaggccccttcctgatgaaatgatcaaatatgctagagaggatacacactatctgctatatatatatgacctgatgagattgagactagtgaatgggtcatcatgtgaaaatgatcttcttttagaggtttgcaagcgcagcaacgaaatttgcttgcaactgtatgagaaggagcagctgactgatacatcatatctacatatacatgggttgaaagaaaacgagctgaatgcaacgcagctgtcagttctttccagtctatatcgatggagagatggcattgcccgtgctgaggatgagagcactggctatatattacccaataagactctacttgagatagcaaaggagatgcctgtgacaagtgggaagttgaaaagaatgattaaatcaagaaattcgattttggaacgaaatctcaaccatgttattaacaatataagggatgccatagcagcttctggtgcttttgaaagtatagtggagcagctgaagaagggaaaactggaagagttaacattggcagatgtgaagaacagcagtgaggacactgaaatgattcctgctgttgatgttgataacattgaagatccgagtgatgaatctgctgtagttcctgcagtgattacaaatgtcggtgctgctccctgtattacaagcgaagcttccttgggtaatatgcatttagaggaccctgtgcctaaaacaaaggactcgggtgcttcatcagggtttactggactgacagacaacaaaaagctgagcaatgaccagcagcaagctactgttcaagtatcaaagaggcctacagcttttggagctctgtttggaaaggcagctgctggaagaaggccagatcttttcctaggattttcaaatgttcagggtaagactaaggtggacaagataacgtcttccgtggtacttccttttcatcatttctcaggtggtgcaaaactttcatcagccgcccttccagcgaaagaatcgttgcattctgaaccagacagcatccaacacagtgatccagcttgtcagttggaagaagtgatacagttggacatgggaacagacgagcaacaaccaccagaaaatggcaacgaggatgatggacactgtgagactgaagacacggagatgtcaaagtccccttcaggtgacccgtctgttaccgagcaacgattccgatcactcaacgaagaaagaaacgttaagcagaaccagaagacacctcgagaattcgaatttagtgttccggtggtgccttttgattatgccgaagccagaaagaatctcgtgtctagtttgcctaaagctgagaggagaaaggacgatgccgttgccagggctataaatacagacgctggagataagcagaggggttcaaaaaagccaccaggtgggggagagaacgagggaaatttccagcatccacgaagacggcaggctttcccgccttcaggcaatagaaatgctacgtatcaccagtagcaagttgagatgtataactggcgaattggattattccaaaattgtgataaaagagtaccctacgtgttgtatatttggactggggatatctcggactcatgagaaaccaccgagactgctactgcaccgcggtgccctgacgtgttgctaacacgtgctaggtgactgagaatagttgggtattgcgttattttttttaatatgttctgaacatgagaatgccctagtatttcattaggatgtgtacattttacaatgttttatggacaattactgttgtatttttacttttgaactccagagccctgttttggtcacgcactacaattttcacctaaactcttttccgaacgtttactatattgggctgtttggatccctttattta

SEQ ID NO: 38226 - DNA, 1781 bp, Zea Mays
ccatctgcagcggcactccagttcttcttcgattcattgctctgctcctgctcctacctacagaatcgcaggcgcagcatgaggcgcgtcgtgaggtggctcaggcagctactggctggcaggaaggacgagcgcggaggaggactcgaggtgagccatgtcggtagcggctggagcgacgggccggagaaggagaagaggaggtggagcttcgcgaagcagaggaagagcggaggcggaggcgcgcggtcgtcgggtccggacgccgtcgctcctgctgccgcggtggaacggtcgcagctggtggggaggccaggggaggacgcgagggctcgagaacaccgtgccgcgatcgccatccagaaaaccttcagaggctacctggctaggagagcgctccgagctctccggtcgctcgtcaagatccaggcgctggtacggggctacctggtgaggaagcaggcgaccatgacgctgcacagactgcagacgctcatgcggctgcaagccgactccatcgccgtcaagaatgcatcgtaccggagatccatggaacaagaagtaacccacatggttttttttctctctctctctcgaacttttgctgcatgtgattcacgacgttcgtgttgatgaagttgcacctcggggctgggcgccggcctgggttctgttgatcttatatatgtcgtgcttcgtgcaggagagggtctatgctcgggacgtccaggtgaagccgctcgcgacggcgccggtgcaccgccggatgctgtctgacagctcggactccatctacgagcgcagcccgcggatcgtggagatggacacttgccacctccgctcccggtcctcacggatcaccagcaggtacaacaagtacaagtacaacccggatggcttaccagagtaccaccaccgccacgcggcgccgacgccgtcgtgctcgccccttcccggcggcaacggcaagcatcagcccgcgcgggtctcgttccggcagagcgcccgcgaccgcgagcgcgacccccggggctccaagactgcgcagagcacgccccggctcgcctccccccacgactcctcctcgcccgccaagagcgtcgagcacagccagctggccagcacgccgcggcggcgccccgcgacgcagcgggaccgggaccgggacgcgctcgtcagcccgcggcacatggccggcaccgcgtcctccgcggccaggacgcggtgccacagcgcgccgaggcagcggaaggcgacggactccgagcaggcgccgtcgccgaggacgggcgcctgctgccaagaaggggcgtcgaggaggtcgtgctcgcacgcgcacgcccgcgggttctgcttccagtgctcggaatcgacccggacggacggattgtccgggatcagcgtcagcgacgaggtgggtgccagagactactacctggacagcttttggtgatcaggcacggatttgtacatactcgtagtcagtcatagacgctaaaacacctagcaaatcacggaacgagtggaagataacacgggatagccagacagtctcacagaagagtgtagatgctgaaacatacttgtacacacttgttgcttgggtgttggatggaagtgttcttatgtgaaggatgaagctaacagcattgtcagacagtggtactggctatgtagttatgctgttatggtcgtcagagcgcagttctttgtttggacccagttgttctataagctacctaagtgggccgggccatactagttgggcttgatttcacgtc

SEQ ID NO: 38227 - DNA, 2019 bp, Zea Mays
aattttcacttggcctcctcatcttttcctccttttcggccggcgtcatcgccgaacgcggatacaccgatacacataccccggctagctgtctggactctggagtgtcctccgggctaagcaaacccatagcccgatcagatcgatggcaccggcgccccgcgcttccagcttcttctcggtgctcctcgtcctcctctttgcgctgtcggtggggtgcgcgtccgccaccggcgtcttccaggtgcgccgcaagttcccgcgccacggaggacggggtgtggcggagcacctcgcggcgctgcggaggcatgacgccaaccgccacggccggctccttggcgccgtcgacttggccctcggcggcgtcgggctccccacagataccggcctgtactacacccggatcgagatcggctcgccgcccaagggctactacgtgcagatagagctgacgcagtacgatccggctgggagcgggaccacggtggggtgcgagcaggagttctgcgttgccaacagcgcgggcggcgtgccccccacgtgcccctcgacgtcgtcgccgtgccagttcaggatcacctacggagatgggagcacaaccaccggcttctacgtcacagacttcgtgcagtacaaccaggtgtccggcaacggccagaccaccacgtccaatgccagcatcacctttgggtgtggtgctcagcttggtggggatttgggatcctcgaaccaggcccttgatgggattcttgggttcggccagtcggattcgtcgatgctatcgcagttggctgctgctcgtagagtgaggaagatttttgctcactgcttggacactgtgcgtggtggtggcatcttcgctatcgggaatgtggtacagcccaaagtaaagacgacgccgttggtgcccaacgtgacacactacaatgtcaatctgcaaggaatttctgttggtggtgctacacttcagcttccaacaagtacttttgattctggtgacagtaaaggcactatcattgacagtgggacaacactggcatatcttccgagggaagtttataggactttgttggctgcggtctttgataagtaccaagatttgcccttacataattatcaagacttcgtgtgttttcaattttctggaagtatagatgatggatttcccgtaatcacctttagttttgagggagaccttacactgaatgtttacccagatgattaccttttccagaacaggaatgatttatactgtatgggattcctggatggtggtgtacagactaaagatgggaaagatatgctcctcttaggagacctggtcctctcaaacaaactagtagtttatgacttggaaaaagaagttattggatggacagactacaactgctcctcgagcattaaaattgaggatgacaagactggctcagtgtacactgtcgacgcacaaaacatctccgctgggtggagatttcaatggcacaactccttaattctgttgatattaataaggacaatctggagctgtttggttatagcctaacgctggatctaggactaaagccccgtttgtttccttccaagattatataatccagctcgtggattatataagcacctattgacctgcttatagattatcataatctagatatccggattatataattcacctaataatctatattgtttgtttaactctcaatttatttaagctagattatataatatagatggtaaacaaacaaggcctaaaacatattttctgtaacaaaaaatagttgagttcagaagttcaacaaagagtacagaatattatatagattgtcccttgtgttttagacgtaaactgtagcaacatatcaagctactaaaatgactttagttgatgtcaggctgttttgcaccttctgcgtttctatcagatatatcatcaggtgtacgtgttactgtgcaatgtaccgtctgttcaggaaggatttgtgtaaatgtagtaattcaatcgtagaaactcag

SEQ ID NO: 38228 - DNA, 1282 bp, Zea Mays
ggcacctcccgtttcctgccctcttcttgttcttcttcttttttccctaccctccgccgttgctctgcaaggcacgtcctgcacgcgccagagctaggcgataaactggaaaggagcgcgcagcgcaggcttcgggctcctgtctccgccgcggcgtcctctcgctttttttttttttgcttcttgggaagcacaaaggctcaggtctttcaggacttgcaggctctgcgcagcgcgatctgattgtgaatgaaacctgcaaaggaatagtccatcacaatgctaaggttgcttcccgactgaccacattgcgcttgttttagcctctggttatctcgtctggaaaaaaaaacccagacatctgaccgggtcagacgatacaacccatatacgtacgtcgagtcctcagagttcaattctacctggaccatcgcacccatcttggcccagagtacttccgcgccgcgctacgaacgaggccatccgccgccacacgccgtcggccatgccgcagaggtcggaggcgggcactgctggggagggcgacgaggagcagcggctgcgggctgctctgcgtcacctgcaggcggaggcgggggtgctggagcgcctggtatacaagcaccggaaccagcaccgcggcgccgcctatttccaatacctcctcaaggtgaggagggacctgaagcttctgctcggcgccggcctcgctgaggttctcaacgccgtgttcccagttctcgcatgccgcaagccggccaacacgatcctcgtccccaacaagcagtctaagaagaaacctgttgcaaaccacagccatcaccagaggcttttgggtgtagcccgcttgttatcccagatgtctgaacctgttatgaaggcagcaattcagataacatttttacttgctagatcattcttcgttgatctttgcacggctgtgctttctttgcttgcacgagtaagggtcctgatccaacagatgttacttgatgttgtgtctatatacaataaggtcactgatcttactgaaaggaagcaggctgttaagattagcatcagtggagtgcaggctttcagagagtactacccctctatgaatgatgcatgtacagttctggagtgtgtatggataaaagataaattcgttttgcatgaaaaggttaaagatatctctcaggaaacccaagttgagaatcagaagtgctgcggtcctgaatctacagtccagtatgaaacaattgcactgattagtgaagatatagcaacaaccaatgccgat

SEQ ID NO: 38229 - DNA, 2911 bp, Zea Mays
cgcgaactccaaatcgaaagcccgagcccacctgcagcctcagggtcaggggctcagggcaccagttcccatttcctcggcctccgcgccggccatggacgtcgatgacccctcaccgcgcgccggcggaggcagcggcgtggacccgccccgcatccggcggctggaggaatcggtggtgaaccgcatcgcggcgggggaggtgatccagcgcccgtcgtcggcggtcaaggagctcgtcgagaacagcctcgacgccggcgcgtccacagtctccgtcaccgtcaaggatggaggactcaagctcatacaggtttccgacgacggctacggcattcggtttgaggatttgccaatactgtgtgaaaggcatactacctcaaagttatctgcatatgaggatttacagaccataaaatctatgggctttagaggggaggccctggccagtatgacttatgttggccatgttactgtgacaacaataacagagggccaacttcatggctaccgtgtttgttataaagatggagtaatggagaacgagccaaaaccctgtgctgcagttaaaggaactcaaatcatggttgaaaatttattttacaatatggtagctcgtagaaaaacattgcagaactccaatgatgactacccaaagattgtagatttcattagtcgttttgcagtccatcacatcaatgtgaacttctcctgcagaaaggtaaatctccctgccttttttcaccgtcatattatcgccagatttaacaaggcaccctttatatcatcactcatcagatttaatagggtaccatttgcttcttatgtcacagcatggagccaatagagcagatgttcatagttcgagcacatcttctagactagatactattaggaatgtctatggggcttctgttgttcgtgatctgattgaaatagaagtttcagatgaggatgctggagatgcagtcttcaagatggatggttatatatcaaatgcaaattatgtggcaaagaaaatcatgatgatccttttcataaatggtagaaacatacaagagcagtgctagtgatttttttaggcaacgaatatttctccattcctctgtaaataacatctgctagtttattcatgtagataatccacctttgcagttttgatcagaattagtcaagttagccgctcctttttgttttctactatatgcattatttctttgctttattatttatgtaacttcatatttactcttcagataggcttgtagagtgtactgctttaaaaagggcaattgaatttgtgtactctgcaacgttgccacaagcatccaaacccttcatatacatgtccatcaatcttccatcagaacatgtggatgtcaatatacacccaaccaaaaaagaggttagcctcttgaatcaagagcgtgttattgaaactataaaaaataccattgaggaaaaactgaggaattgtaataccacaaggatattccaaactcaggcagtaaactcagcacttactcaagtttacacgcagaaggacaagggtactgaggtcaaaatggcccctggagtgaaatctcaaaaggctcctgtgagccaaatggtcagaactgatccacgcaatccatctggaagcttgcacgcttactggcatgggcaatcttcaaaacttgaaaataaatatgaccttgtttctgtaagaaatgttgtaagatcaaggaggaatccaaaggatgctggtgatttatctagccgtcatgagcttcttatggaaatagattctcactgccatcctggtcttttagaggttattaagaattgcacatatgttggcctggctgatgaagtttccgctttgatacaatacaatactcacttataccttgtcaatgttgtaaatgttagtaaagaactcatgtaccagcaagctctgtgccgttttggaaacttcaatgcgatccagcttagtgaaccagctcctcttcaggagctgctgctgatggcactgaaagatgatgaatcaatcggtgatgaaaatgacgaggagaaactggagattgcagaggcaaactcgaaaatactgaaagaaaacgctgagatgattaatgagtacttctctattcatgttgatcacgatgggaacttgaccaggcttccagttgtacttgatcagtacacccctgatatggaccgtctcccagaatttgttttgactatggggaatgatgttacctgggatgatgagaaagagtgcttcagaacggcagcagctgctattgggaacttctacgcactccatcctcccatccttccaaatccatcggggagtggtgttcaggtgtacaagaaaaataaagcttgcatggcgagtggtgaacatgttgatagtacagatgaagatgacattgatcacgaactacttgcggaagcagaaacagcatggtcccaacgtgagtggaccattcaacatgtcttgtttccatccatgcgacttttcctcaagcccccaaagtcaatggcaacagatggaacctttgttcagattgcctctctggagaaactttacaggatttttgagagatgttagcccacacttctaactacttacaagaagccaagaaagacaccctataacatgttttgcactgtacatattcgtgtagtgtcgcaaatgttttttttaatagttcattgacttatgagatggaagtataccatgagcatgctattgttttctccctctaagggcttgttcggttacaccaatccagagggagattgaaggggtttaaatccccgtctagtcatttttgactaagaggggatttaatcccctccaatccccatctggattggtgtaaccgaacatgccctaattgagttgtctaatgatatctaaaggaaa

SEQ ID NO: 38230 - DNA, 1851 bp, Zea Mays
gcacatcctactgacaaaccggtcccactagctgctgatgcgcatccatccggcaactactcacgctcaggtcgccgtcgcgactcgcgccgcctctcggctcgctagccgctacgctatctacgccgccccggcacctcccatgagatgagagccgcagccgcagccacatccacagccgccgcgctcctcgcccccggtctaaagctctgcgcgggcggcgcccgcgcgcgcgtctcctgtccctcccgctcccgcctcccactccaccgcatcgccgccatggcctccgcccccaacccctccttccgcccggaggaggcacgctcccctcccgccctcgagctcccgaccccgccgctctccaagttcaaggtggcgctgtgccagctctcggtgacggcggacaagaatcgcaacatcgcgcacgcgcgcgcggccatcgagaaggcggcctccgagggcgctaagctcgtccttctcccagagatatggaatggtccgtattcaaatgacagctttccagagtacgcggaggacattgaagctggcggagatgcggccccttcattttcaatgatgtcggaggttgctcgcatcttacaagtcactcttgttggtgggtccatagctgaacgttcgggaaacaacttatacaatacatgctgcatctttggttcagatggcaaacttaagggtaaacatagaaaggaaagatcactttcaaggaatcgaagactcttactgctgggcagaatcctactgttgtagacacagatgttgggcgaattggtattggtatatgttatgacatccgtttccaggaattagcaatgttgtatgctgcaagaggtgctcatttgttatgctatcctggtgcattcaatatgactactggaccactgcattgggagttgctgcaaagggcaagacaaccagctgtttgttgcaacatgcggcccagctcgagataccagtgcaggatatgttgcttggggacactccactcttgttggaccttttggagaggtgattgcaacaactgagcatgaggaggcaactataatagcagaaattgactactcactgattgagcagaggaggtatgaagagtgaaattctatgatttccagtagtcttatatgtcttcacctttggtttaatggggtcgcacatatcctcgctaggcaatttcttcctctgcaacaccaacgccgtggcgatctctatcagctggttgatgtccagaggctgggttctcattagcacagggacgaagcaggagagcagttgactctgcaggcttgctcgtactacttcgttcatgagatgcatgcccatgcccatcgagagatcgatcaacttgatgtgtgaaggtggagaggacggaataaagcgactatagtttgtaccttcagcgctagtttggcaactctattttacaagagattcttatttttctaaggaaaaattgattaatttttcttaggaaaatagaaatcacttgggaaaatatgattgccagactagccctcagtgtaaatgtctccatgtcaagggcggtattgcccaaggtaggaggacctcggctacgtagatcgtagccttgacccgtggttgccggcagggttatgcccccacgccgagctacccgtcgacaggagaagttctcctggtcgccggtttagagaagagaggaagagacttgataggtaattcttgattgatttccaagtgccaccctacatggctatatatagccggcagcttacacaaatggagaaggttctccttgattgaagatctaatcaaaataggaaggatactaatcagctagctactttctctcct

SEQ ID NO: 38231 - DNA, 2947 bp, Zea Mays
gaggaaaagcaaagccaaaggcactccactccactccaccctatgcactgccgcccctgcccgtcccagctctcgctcgtctttctcctcctcctctcgctcgcacccatcatttcggcactccccttcccggagccagctcttccgatggcgtgcagcggcctccgcctctcgctccccgccgccgtcctcgccctcctcctcctcccctccgcgctcgcttccgagcccctcaaccccgaagtgcaggcgttgatcgccatcaggcaggggctggtcgacccgcacggcgtgctcaggagctgggaccaggactcggtcgacccctgcagctgggccatgatcacctgctccccgcagaacctcgtcatcggcctgggagtgccgagccagggcttgtcggggactctgtccgggaggatcgccaacctcacccacctcgagcaagtgctgctgcagaacaacaacatcacggggcggctgccgccggagctgggcgcgctgccgaggctgcagacgctggacctctccaacaaccgcttctccggccgcgtgcccaacacgctgggccgcatcaccaccctccgatacctgaggctgaacaacaacagcttgtccgggccgttccccgcgtcgctggccaagatcccgcagctctccttcctggacctgtccttcaacaacctcactggccccgtcccgctcttcccgacacggaccttcaacgtcgtgggcaacccgatgatatgtgggagcaacgccggcgcaggggagtgcgccgccgcgctgccgccggtcaccgtacccttcccgctggaatccactccgggcggcagcagtgagcactcttccttcctgcctctatgtctatcattcatatctacggccagtcaggcaggccagctcgcgcgcctagcagctagtcgcgctcaatgcttttcggccctttctcggagtgcgtggcgtggcgtgcatgcatgcgtcgctgctgccgctgcttttgtgcccttgcctcgccggggtagcggtcgaggggacacggtgctgtcggcatgggggcgccgtcgctctcgcttgcggccgggaatacctgtagtaggctgtatgcctgtatgtagcgctggtggcgcggtctggcctgaaccgtgcatctgctgctgctcgcgcctggggatcagcgtttggcttttgtgtgtgtgtgcgcgcgcagggacagggacaggggcggcggcagcgggcaggtcaaaggctgctggcgcgcggctgccgatcggcgtagggacaagcctgggcgcctcctcccttgtgctcttcgccgtgtcctgcttcctctggcggcgaaagcgccggcacacgggggggcggccctcctccgttctcggcatcatccacgagcggggcggctgcgacctggaggacggcggcggcggtggcgtggtggcggcggcggcgcggctggggaacgtgcgccagttcgggctgcgggagctgcaggcggccacggacgggttcagcgccaagaacatcctgggcaagggcgggttcgggaacgtgtaccgcggccgcctcgccgacggcaccacggtggccgtgaagcggctcaaggaccccagcgcgtcgggcgaggcccagttccgcacggaggtggagatgatcagcctcgccgtgcaccgccacctgctgcgcctgggaagccggcgctggactgggcgacgcggaagcggatcgcggtgggcgccgcgcgcgggctgctgtacctgcacgagcagtgcgaccccaagatcatccaccgcgacgtcaaggccgccaacgtgctgctggacgagcaccacgaggccgtcgtgggcgacctgggcctggccaagctgctggaccacggcgactcgcacgtcaccacggcggtgcgcggcaccgtgggccacatcgcgcccgagtacctctccacggggcagtcgtcggagaagacggacgtcttcggcttcgggatcctgctgctggagctcgtcacgggccagcgcgcgctccagctcggcaaggcctccggcgccctgcacagccagaagggcgtcatgctggactgggtgaggaaggtgcatcaagagaagatgcttgacctgctggtggaccaggacctgggcccacactacgacaggatcgaggtggccgagatggtgcaggtggcgctcctctgcacgcagttccagccgtcgcaccggcccaagatgtccgaggtggtccggatgctggagggagacggcctggccgagaaatgggaggccacgaaccggccgggcgtggccgcgggggcgccgtgccacgacgcgctcggctacgaccaccgcaacgactccaacggctccgtcttcttcaacgacttccacgacaacgacagcagcctcagcagcgacgaagcgcggtcgatcgacatggtggaggagatggagctgtccggaccaaggtagcaagcaagcagcccttgccgctgggcgggaagagccactcccttgatatgatagcatcaaattcaaaattcagatgttccgagagcttcaaaaaaaattacaggtagagagagagaggtgtcgagttaagagttgttgcgagtcagtttggaattaaaggtattcctaggtgctttagggtctagagttcagaccacagttgtgtagtttctggtggagccgtccttttccctttgaaaaaaagatgtaaagaaaaaggatggcttctcttttgcttcttttcacaggtttctttttcttttgctgctgctgctgctctccctgctgatccagtgacacaagcacatgcagcactgcagtcctttggtattccggtccactgatctagggtaaccttttgcagcgcaaggatgtatgtagggaatgtgttgcaagtagcgaggcatgcagtcattttgactgcttttgtgacctgtaaaggtcac

SEQ ID NO: 38232 - DNA, 3363 bp, Zea Mays
tgtgctctgggagtgctgcatctgccttgcgtagtacggggagaaggaggaggttcggcagctgccgtgcacacacgtgtttcatctcaagtgcatatacaggtggctcaggatcatctcctcttgccctctctgcaagcaagagctcaagtgaactttatattcattacacacatgacattctcgcttattctttggatcaaggtgttagtatcctagacacaacagatattttccagctaacaagggaaatcaaggaagaattgatctttatattagcaggcggatgcaatcactaatcaaaaccacgatgcaaggtaacctaaatggattttaaattttattttggattgttaaatctttatttctgactactattgttttatgtcgtggatgccctcgtgaggttctacgccgacgccttcaggagggattcacagaggccatggtgaggatggccagcttgagtcggctcaccgggagcagcgcgagatccgctacaactaaatgataggaggtttcgctgccatttgcagcgactgtgttccagttcgaccgtttggggaaaaggtgagtcctcccatttcatgtagatgcatgggttgataaacatttgggagaaatgtcccctctttaattcgaaaaatagttgtgtatttgttcgacttatctgcggcgatgtacctttgtacgcgtacaaacatctatagacaaaaacaaaatgacacttcatggatgtagcaagagcgggctacgagaaactagcagatcatgcctaaaattcaattagcattagggtcagacaaaatactacattttctggattacaataatgtataggtgcatgaaaaaaacttgattccaatgtgtgacaaagtgtgaagatgaaagtgcactttcacgctgtcataacgcggatttgttttccttgctcatggaatgtgcatttgtgtgtttgcgtctactgtgcggctacaggcaaggaaacaggatctgtcacggaaggtatgtacacattacagtaaacgttgttcgtagaacatgcactttgtggagtggtctttgaatgagatgcgtttagaattaccttttcatgcagatctcttgttcagaacctggttgcttagtccattcttgttttgggttgctactacaaaaaagcggcaatgctttatatgaatcgcctcttactaatatccagggtcaaatggtggtccttcagtgaccagactaatatttgagcattaatcttatttgtttcacagtcatttcttgtttatcaatatgaatgctatttttttgcgagtggacttgttaactaataagctcatagatatttgaacaaaaaatagtgttttgttctaaaactgtcataaagagtgcatacatcatagctatggtttcaactgtgatttgatgtcctataatattgagtgtcctatagtgtgttgttctgaaacagtcacaaagagggcctaagaagctgatggaatcctcattcaccgccgctaaggagtttgagcgggatcggagaggagacgtcagttcttcctcctctgctcaatgcggccattcgccctgtcccccaaccctgaactccacactgccactccgtgctcattttttctgaaggggaaatattcatctccttgttgttttgtaccatggatactttagcatcattctcatactactaggagtgtaggtaaggagtccacacacgagtttgcaaacaccattaagcctattttgcttgattagtgccctgcaacacttcatatgttcaagacaaaatccatacccatgtctattgttgtatgatattatttgcattgaccgttgctgctcttcttgattgcagtcactaacattgcattaatctatgtgatacatttattcaggcgattcccatttctcagtgatgtcgatgtcctgtactcctgtatatttggattcaacaatatgccattagtatgctgtcaagcgtcctatttgcaagagataaatggcttacgcccgaggggcttattcttccttatcatggtatgatataattatcatacaaaaatgttacactgcttttacagggtgtacctcatctatttgcttgtacaattcatcttactactgctttgacaaacattggtctgctctgctttggtctgtgctttaggattctgtttcattgggagaaacaaatgcccttgcttactttcattataactgtgctatttttttgatccaatgttgttctaagatcaagaagtggaatacttgttctaagggtcccaagttgggtggtggtggtgggaagcgttttcaggtcggtcgtgactttggttatccactgaaaagatatgcttggtggtgctttcttgtgttgaagaacaagtatcccacggaaccacaaccgtttgtattatctggtgatttcctacattattagctggcctaactaaaccatgcgctcagaccctaaaccagctgtaagtctgtaacttaaaagcacagtgcactagcggaatggggttccttgctttttggagcgtttccccagtcagatcggcggcagggcaggtcacgtggacggggctccttgttgctggaactaaataccgtggagagtttgaagtgagactaaagaaacttatggaggaaattaagcaaaatgaagacattattctctttattgattaagtgcacacactgattggagcaggtgcagcagaagtgcattggtgccacaacactggatgagtataggaagcatatagagaaagatcctgccttggaaagaaggtttcaaccagttaaggttccagagcctactatggatgaaacaatacagatcttaagaggacttcgtgagagatatgaacttcatcacaaactgagatacacagatgatgctttaattgctgctgcacagctgtcttatcagtatatcagcgatcgttttctgcctgacaaagccattgacttgattgatgaagctggatctcgtgttaggctgaggcatgcgcagctccctgatgaagccaaagagctggacaaagagctgcggcagataagcaagcagaaaaatgaggctgtacgtggccaagattttgagaaggtatactgttgtttggcacagcggtgacaaagccgatccgctcccacctctctagcaacgtcgatatggttaataccaagcattatgttgtttccttttgagataaatattttgttactgattttaccttttgtctcctcttcttgttttttgttctagaatctgtagcaaatggctaacgatgaggatatccattactttgtttatgacaataaaactgatatgttcaagattccgtagcaacgcac

SEQ ID NO: 38233 - DNA, 1194 bp, Zea Mays
cattgccacaccctgactccgccatcaaaaacatctccaaaacctcattccgcaatgagacccgcagccgcagcagccaccgctaccaccgccgcgctccgtctccgcgccgcctccctctcgccttctctcgctgcctccctctcgccttctctcgccgccctcctttctcatcgtagatcctccctcattcttcctccgctgcgccgcatctgctcccttgcgcctccccactcctccgccgcccccaattcgcagcccccgccgcagttgctctctcccatcatggacgcgcagttcgtgctcttccgcgcgcagctcgacgagtcttccaccctccgcgaccgcatccgtgccgtcgtcgccgagattgagtccgcctcccgcgtcgccaccgccgcgctcctcctagtccaccagcccgtccccctggcagatgtgcttgtgaaagccaaggcgcaggtagaggtgatcaaggggttgtacgcgcgcctggcggaagtcctcaaggaatgccctgggcagtactacaggtaccatgctgattggaggactgagacacatatggtagtgtcgatgcttgcattcatgcactggctggagacaggtggcctactcatgcatgctgaagcccaggagaagctagggttgtgctctggggagtttggccttgatgttgaggactacctgacaggactgtgcttcatgtccaatgaatttgatgctgaatctgcgcaatgacttcttgcgtaagaaatttgatgggatgaagtatgatttgaggagggtggaagaggtctactatgatgtgaagatccgtggacttgtacctgcgtagttgaaacaagagacttagaatccttggtaatgttagattgttaacataccgtggtttggctttttgtcatccataacgtgttcatctagctaaaatgtgaaaaatattctgttggagcgtatgtgttatggactgaacttgggggcactcgaatgaccttgctcatttcttttactgtggcaccacatgttcatgcatttgaccccgggatgtagatcgagttagatttcgtgaactctggagagaataatttttattggctcactttgcctttcacaaatcttcatacttatctaatggtgatatacatgtttggattttcaatgggatctgtggtttgtaggcaaggcaatgat

SEQ ID NO: 38234 - DNA, 248 bp, Zea Mays
gatgcataaattacctattctttctaccactacctaggccgggatttcagggtgggatatttgcattgtgagcaaagagatagcctgcattaacatatattgttttcggatgcgaaatgtgggttgggagaatggggaatatgatgcttcaaataaggtttcttttgaaaagaggtgtgcgatgaagggtactcaccctcatcaccttgggagtgggatgatcaaggactccctggtttaggggaggg

SEQ ID NO: 38235 - DNA, 782 bp, Zea Mays
gcaaaaacaaaacatgtggtgcaagcgtggtccaaaataatatataagaaagaaacaatccctgcatatcttgttgctgcacaagctgtgcagtccgaataaaatcaggacagataaggcagcctgaagcacttgggatatctgcagaactaaaagataagggctatgctttgttgtgtgttggtttcccatctggcgatgttgaagtcgagactcaagatgaagatgaggtatattggctccaattcgggagatactttgcacgagggccagtggaaagagatgattacgcgctagaacttgcaatgggagacgaatgagctgtgcctaagagaccttgccatctaaaatttgaataccatctcaaatttggacccatgtagttctgagttgcccccttcccgcctttccttgttcggttgtcacttattagcctggtgcgttgctgcgtgcagttctcgtttctcctctaatagatggcacacgttatgaagtgtgtaaaggtgtcaaaatccaaaaacatccagcattcacaatctttgtcgtgatgaagtgtgtaaacttgtaaaaaattatccaaaatctttaccatgaagctacgagtggctaactagggctggttgaagttgttccaagctgttgtgtcgctagggtatatttagttcgccatcttatcatactttatctaacttttttttactaaccttagataaattgtaaattgtggcacagtcaggggcgaatcaaacatgtttctagtagagtggaaaatatatgacgtg

SEQ ID NO: 38236 - DNA, 1832 bp, Zea Mays
cgccgttcgggatacctcagctccaataaactcggcgggcgggcggtggagggcgagtgaagacgaggtgcttgcctcgctcggctcacaccccttttcgtctcttctctgcctttcctccgcaatcacagagcgcaagaggagagagagagagagtgaggggggagagagagggctagggttttgtgccccccacgcctcacgcatcgaatccgagccgggtcggggttgctgcgaatcgccggcggtgcttgatgattcaggcctgtgtggtaggtgccgtgcttgctcgtcctaggcgattttagggtggtcgtccttgtcgctgtgagctggttgggggctgtgtggatttggttttctggacgcgggaattcaaaggctgtgattccattgcaatggcatctgaaactgatgagaaagctaagatggagagtttgacatctgctgcagcctttgtggagggtggcattcaggatgcatgcaacatttgccttgaggccttctgtgagagtgacccttctgcagatcaaccaaaatggatggatcaacacatgagtcaccaaaatccaccacccaacccaatcggtatccaatcaaatactgtagacttagatgctgaagactctgttccatcaagctttacttcgaagaggccgctaggtcatgattcgtccaaggaaaaggcaaagaagcaaaggtctgttgacacatcgtccactttttctgagtacctcaggtggatgggtgaaatatctttggaacggttgtctgtgttcaaattagtagcttcaattgaggagaggaagttggagtctatgaacaaaaacgagaggcaaaaactcatcttggagaggaagaagctaaacctggagaaacttaggatggatcggcagaaattgaaggaggacaaggaagaggaggtcatgatattgggcatggatctgagtaaatgtaaccccctacttcgacaatgctacgaggctaagcaacaggagatattggcaagggttattggaaactcgtcgtcaagcaagtgaggagtgaacgaagttaatttttgttagtggttgagatgctgtcgtttcttctggaaatagcactactgtatctagtcctaggttttttttaacaggtagttccccagcttcgtcctcatcttagagcctcggatggatcaaactaaaactaacaggtggagcagaagtgcagtaacacgatgctccagttccaagttgacaacctggcggtagagcagaagtgcagtaacacgatgctgccatttttatctcaagcactgcataaactgcatgcgtgtggcttaggggaagtccgatctcaaaaaatcttctgtttagggcatgtactaaacatgtacagtggtgtttaatgtggaggctcctaaggtgtttaaggggtgtatttgcaaaaaaaattagagccgtctctccgtgaagagacgcctctggctcgtaaaccaagtagtaacagacgtctcacttcctattgtacgaatttgtcgtctgttctatcgatctgctgctgtacaaatgcatttaattctgtatttattaatagactacatttatagacactccattgtataatagagtctcttagttgtctcttgtgcttggataaccgttttggtgtctcttcactgtacatgcccttatgtcttctgtaaaaaagaacttgtgagaaaagatgtttaccggtacaaataacggatatggcatcttcgtggtgcgcggatcagttacaaatatgattgggacagcgaagtttgctgctgctgatgctatgcaagtgtaccgtgggacggtttcctg

SEQ ID NO: 38237 - DNA, 1041 bp, Zea Mays
gcagtggccacgtatcgctcagacgggcagcctggcctgtgggccttggtaggattccgcctcatctacctgcacttgcacttgcagttgcagcactgcagcaatcacagacagacacgagcaagtgtgagtgaggaggtttgcctgcccatctccatcggccatcgctgcctccccagtccccacatccgcacacatttttacccctcgcggcggccccaccgaccgccggggcgcagcggcgtcgccgcgggcaacgccgtcacgtcacgtgcatcacgacaatctcctcctccgcctcgtcttcctgccaggccgcgggagcaccagcccagcggcagatcagtcgaggcgggcgattccagggtttagagaggagcggagatggtgaaggtcatccaggggcgcccggccgagatggggttccggatgccggcggagtgggagccgcacgagcagtgctggatgggatggcctgagcgtccagataactggagggagaatgctggtccagctcaagaggtatttgctagaactgcaattgccatttcaaagtttgaacccgtcacgttatgtgcaagtgccaagcagtaccccaaagtccacgagctgatggaacatcaaaccaacatcagggtcgttgagatgagcatgaacgattcctggttccgcgacatgggccccacttttgtcacctgtaaaggggattcaggaattgcagaacaaacaatagcaggaattgattggcaattcaatgcctggggaggaatctatgacgactggagtcttgacagcgatgttgccaagaaaatagtcgagatcgagaggatccctaggtttccccaaaaaattatccttgagggtggaagcattcatgtagatggagaaggtacatgcattacaacggaagaatgcttgctgaatcctaataggaaccccaacatgaccaaactagagatagagaatgagctgaaggattttcttggagtctcgaaggtcatctggatacctcgtggactttatgccttcgacgattccgca

SEQ ID NO: 38238 - DNA, 1693 bp, Zea Mays
tagtgtgtagtgggatcctaagaggcgatacaaataggaagagagacaggagaaggccaaagttgatatgaaaaaggctacaggcaaaaagtaaaagacatagtgcaaggtgctctgtttccagaggttggtgtggataaaaggactggatctgctggtggaactggcgggcaagtagttgttcgagacattgaacttttctcctattgtgagtcatgcttgcttccattcagcatacagtgccatgtcgggtatgttccctcaggtggaagagtggttgggttaagcaagctttctagagtatctgatgtctttgccaagagattgcaaaaccctcaaagactagctaatgaaatctgtggtgcactgcatgctagcattcaacctgctggtgtggctgttgctctgcagtgctggcacattcctttaccagaaaacttggaatgcaagactttggaaggttggattagaacttcacattcatctcgctctggagtctttgaaggtgaaagcagcactttctggagtgacttcttggctcttgttaagcttaggggcatagacgtggaggctaaggaccgtactgtttctattccttggtgccctttaaggtctcatgaggttccactctctaacgggctctgcaagaaaaactcaactaatggcatggtttctgctgttacctcgatgctcttatcactcggagaggaccccctcaggaaagagcttttaggcactcctcagcgttatgtgcagtggctgatgaagttcaaagcatgtaatctactagacgtgaagctgaatggttttacacttagtaatgttagcttatatgagaggacaggtggaggcacaactgatcatggagcaatcagatcggagctgcacttgccattttgtgctcaatgtgaacaccatcttctgcccttctacggagtagttcacattgggtactttggcaatggaagcggagaaggcattgatcggtcgcattttcaggcgttggttcatttctacgggtgcaagcttcaggttcaagaaaggatgacaaggcagatagctgaagcggtttattcagtttcgcacaatggggccatggtcgttgttgaggccaaccacatttgcatgatctcaagggggatagagaaaataaggagcaacacggcaacaattgcagttttgggccagtttttggccgacccttctgccaaggcgtgcttcttacagaatgttttggattctgttggttctgcggtatgaatcgtatcgcaagcagcaaagaaaaaaatgtctagttggagtactatccagcaattgaaatttttagcaatctactggtctagcatgattcttctcgggtgcaaatttgtcacctgtgggactgtaccgaggatgtcacaagaaagcaccaaaagggttttggttctctcgtgttgtaccatgtcacttgtaaggcacttcaaataaaaaagaaatagtaatagttacaactgtgccaagaaggatatagtcattcgtacttttagatgttgtcaaaattgccatttgttcttgaaattttagtggagattactctggcttttgttgttgtaccgttgaatttgatgttacgccgatcgagatcagtaaaaaaaaaaaactcagatatctgttcgcttgaccatggtccaacgaaatgtaattcgttcttgca

SEQ ID NO: 38239 - DNA, 1446 bp, Zea Mays
tcttagagttaagctcttagccacttgctggtcttatcatttgaaagaagaaatggtactcaattgctggtccctttggcaattttttctttgcacttttcttgttagaactggcaagccacagccaagtaccttgcttgcacaaacaaaaatcccttctattgtagggcaatccatggatttattgcttgtcctgaaatttgatagaggcgttcatgatatcagttgcttgttaattccatttgtttcttgttctcttatgcattgttatgaatatttgcaccttctgcaggtaacgatcgaccaacaatggagtggcccactagattaaagatcgctctgggtgctgccaagggtttagcttatcttcatgaagactgccatccaaagatcatccaccgcgacattaaggcatctaacattcttcttgacttcaaatttgaagctatggttgctgactttggacttgcaaagttcactactgataacaacacccatgtgtcaacaagagtaatgggcacctttgggtatttggcacccgagtatgcagcatctggcaagctcacagaaaaatccgatgtattttctttcggagtcatgcttcttgagcttattactgggcggcgaccaattgacacaacccaaacatatatggatgacagcttggttgactgggcaaggccattactgatgagagcgctcgaggatggtgaatatgatgctttggtggatcctcggctcggaaaggacttcaatcctaacgagatggcaagaatgatagcctgtgcggctgcgtgcgtacgccattccgcacgtcgtcggccacgaatgagtcaggtcgttcgggctctggaaggcgacgtgtctttggaggaccttaatgaaggtgttcgacctggccatagccgcttctttgggtcatatagcagctctgattacgattccgggcagtacaacgaggacatgcagaagttcaggaagacggcgttcaataacaacacctacaccagcagccaatacagcgcgccaaccagtgaatacggccaggtgccgtctggatcaagcagcgagggccgccagacgcaggagatggaggagtcgggtgcagtgaagaaaggtggctacagcggctacagctccggatacagcggagcctcgtgagcgaattccctccctctctgtttttgctctttttacttctgatgctttctgttgctgcgtttgtaaagctgacttccgcgtgattgatgtatctaagtttgacacagtatagttgtatgtagctgcaatcgtttattctttcgtgaaaaaattgttcttggacaatgtttggctgtgcaattcaacgagagctaagctaattgactgctcatgtactgtccatggctcgctcagttcatcgttctcatccaaagacaaagagcttgccagatttttttttttacc

SEQ ID NO: 38240 - DNA, 252 bp, Zea Mays
cctggagacacgacggacacaaggacagatccaggcgaggagacgacacctagaaggaccgacgaataggaggagcaccatgaggccggagcctctcgccaagctaagacctaactaggactccaccttgtaaccaccaccatcacgaataagagacttgagagcatcttgtccctctctcgtttgcatatgaactcagatgaagataaagtaatagactatatatcacatgtgtaactccaatatttcata

SEQ ID NO: 38241 - DNA, 1430 bp, Zea Mays
ggccgatggggcgaccgagcgagcgagaacgcggtttcatcacaggggtctggtggctgggtggctgggtgtgaaagggccgtgcgggaagctaaccaccgcgaaagcgcctctgggggagtcagacgaacgaagcaatccaaccgaacgaaccgacctaggtcgtcgtcggctcgtcccctccgcaggaccggttcgccgtctcgtcccgatctcgccgcctgcccgccgcgccctattaccgccatggaggcgctgtggaagcaggcctccaggctcaaggaccaggtctctcggcagggtgtgttcaagcagtttggctacgggaattctgataatgcgtttacagatgagtcagaggttaaactgcatcagagattggaaaagctttacttatcgactcgtgctgctaaacattttcaaagggacattgttcggggcgtggagggctatatagtcacaggatctaaacaagtcgaaatagggaataaattgtctgatgacagccagaaatacggtgttggaaacacatgtacaagtggtgatactttgtccaaagctgctacatatttcggaaaggcacgctcacagatggaaaaggagcgtggcaatatgttgaaagcatttggcacacaggtggcagagccactgcgggcgatggttatgggtgcacctttagaggatgccagacatatggcccagagatatgacagaacgaggcaagaagctgaagcacaggctgtcgaagtatcaagacggcagaacagggtgagggaatctactgggaatggcgatatggtatcaaaattggaagctgccgagtacaagcttgaagaactgaagtcaaacatggtgggattagggaaggaagctattgcagcaatgtcggctgttgaggctcagcagcaacggttgaccttacagcgtctcattgcactggttgaggctgagagaacttaccatcagagagttctggagatacttgacaaattggaagaagaaatggtgtctgagcgccaaaaaattgaagcacccccgactccagcagctgaaaattatataccaccaccagcaccaccatcttatgatgaaattaatggagcatttgcatccacttctgttaacgagtcagtccaatctgtcgatttcttccttggagaggcccttgattcatttaatgctgaaagtgagtttgagcttaccttgtcagctggtgacattgtaattgtccgaaagatctcaagcaatggttgggcagaaggtgaatgcaagggcaaagcaggatggttccctcatgcttatatcgaaaggcaggaacgtgttctagcaagcaaagttccacatatattttaggtaagactatttcacttctggagtctcaaggtgaaatggtcaagttgcatggaatttgaagctcctgctggatacct

SEQ ID NO: 38242 - DNA, 3024 bp, Zea Mays
cacggccacagtaccacacagaacagtagcaccgggctccgggcaccagggcaggcgaattcctaggttcgctggagcctggtccgagggatggccgccgcctcgctcgcgttggcgagtcctctccggcttctcctccgcgtccgtcacccgcgcggagccatcgccgtcccgtgctacttcatctcgcgaggacggtatagcaccgccattgccgttgcagcagcgagggatttggcggtgaaaggaagcgtggacaggaattcagcggaggaagtcaggaacattctgaatatggcagaaagggcttcccaacgaagaaatgtttttcacaccaattttcttactccacctatagtgaaagaggctatgctggcacttgaaaagtttgcagataccaaagcagtagctcagggtggctaccctcaggctgagaggtgccgaatatctgttggacacccggacgtcatgacaagtaacccagatgtggttgctgctttgagcatctcagggaatttccggttggaatcttgttctcatggtgactttcttggtgctattcttgggacaggaataacaagggagaaagttggagatattcttttgcagggggaacgaggtgcccaggtccttgttgacccagaacttgttgactatctgatttctacccttgaaaaggtggggaaagttggtgtttcatgcactcagattcctttgcttgctctagaatatgaaccaccaaggaccaattcatttaaaactgtagaatcatcgctcagggttgatgcccttgccagtgcaggatttaaaatctcacgcacgaagcttgctagcttgataagttctggtgatgttcgtgtgaattggacaccaacaacaaaaaatggagttaccctcaaatctggagatgttgtttctgttagtgggatgggaaggttaaagattggggaaattgtgactacgaggaaaggaaaatatgcggttgagttgattcgctatttgtaatcatggaactggtctactttcatgtctgaaactctgaatttaacggtacacattttctcctatatgtgatgagaatcatgtattaagtattacttctcagtgaagttgaaagtgatgcacaaatctgagtatatttgtagtattcattgactgctttagcttcgtaatgcaaatattcttataggtcaagaatttcataaagtcgtcagtgtacattcattatttcaaataataagcaccaaagggccaggttgctttggatcttccatcgcttctgtgttatcaccaacatagtcttgtacaactctgcaatatcgaatcacttctacttctgttagtactttctgatctgaagcttaaaagaaaatgagataaggtataagtcttcacaactgaaaagagaactcttttttcttctgatccagcttgtgtcttgtcatagtaaatagcataccctttttcttgtttgaaatctcactaggctgcctgcatcataagttcataacacgtgaaatgattatgacgagatgacagaaacctttcgcaaatgggaaagtcgacagctaccagtcatagatccatacgcctttcaatgctaataggcttgacagagaactattgctttttacttattctgtggttcttgattgcaaaatcatcacgaagttcaatatccaaagctgcaaattgtgcaaggtcgtagtattgcttcatttgacttgtctcaaggttactcacgcggagcttgttttcttgggaacaggttgaagcaaaagtcccgtggctcctgtgtttttttgggtcaaattattagctactatctcacgaaaaacatactcagaatccttgtacactgaagtattgctgtatttttagctaaatattatctatatgtcgctgtgtttggttagatgtaggaatgggagtttagaggtttgtttgtttggtggggataagagttttgactggatggggatgggagaatagggggtaaactcccaccaaatttttacgtggaaggtggatgcccccgcactgtccatcatgatttatgacgcaattttttactctcaagtctcaaaccctcacataaacaaaggtcatgaagtcattttccaactatcacttttgatgctttcacaaaccaacttccaagtgaatttcctccgccaacatctattgctactgctgaatccaatgctcttgccacttgccagaggcaccgtatgtggttgcccatgtttagagtcagagagagtaccatgggccttctggctgaaagaagctgcaaccactctcctgttcttaacaacacaatatgctattttttgtgttctcttttacagatacatccaacaatatctaacgagctgctacatgtgaagttgtcatgcgaaaagcaggatgtcacatgtttgtaaaggtaggttttgtgatgtatccatccttgtggaactttggatgcactatgttgacagccagcgaggagctgtttattgtttgtttgatctttgaagcccagcaattaattggccaggcacaatagctacagctaccttacagttttctttggagatgggagcacgagcagcgaaacccaacggtgcttgaaatgttttcggtgagttgaatcaatggaaaaggttaagggcgaactgcactttccggaaaagattcatgctcgtttggacacttccacgagaagtttactttgagccggtgcgaagatatactaaactagagccttgtccctgcactgtcaagtcccagtttgcttgctccagctgcttgggtacctttttgtatctctcgcagtccaactagtggaaaataacacttgttttttttaagggaaagcaaaggcttctccggatgtgccatttgtaaggcaagattaatgtgtgacaaaattgactaaaggctaaataaggttccaaaatacgtcaagtttccttggtttctacgctcgccaatacttaaaaaacacacaatcccaatgcttgcctttttcttgtccta

SEQ ID NO: 38243 - DNA, 1014 bp, Zea Mays
cttgaataccatggttctctttatctcaagtatatccctttctgaggaatctccacactttggagtctctcacgccttacacaaaatgatctcgaatgggtacaagagtaaggagggaaaagcaacacacacaagagcgagagttgcaacaccaacacactcacaagacaagaacgagcacacgaaagcagcacagcggagttacaactcagaaaagtgctcaaatatctatcatagtgaaccagatgcgtgaatgtggagtctcgtcgtcttaggatgttcaagaggtgcttggtgtactgttccatgcgcctaggggtcccttttatagccctaaggtagctaggagccatttggagctccatttggaaggccatagttgccttctgcccgtgggcgcaacgaacagtgaacagacgtgattttcttccttttatggcaaagccgaccgttgcagccacaacactcgtggaacaccggacagtccggtggcacaccggacagtccggtgcggcctggtgaccgttggcgaagtccacgcgtcgcccgctgattgcactgccgaccattggcgtgtgcgcggctggctcaccgaatagtccgatgcacaccggacagtccgatgaatatagccgcggcgcactgaattttctcgagagcggcatgtttgctgggcgcaccagccgaagcactggacagtgtccggtgcaccacaggctggtgcaagtctggttggacttagccaaacttctccaatccaatttctctctatttgataaggttcctagcacttagtagaataatgttaataccaaaaacaatttactaaggctagaatcataccttgatttttcatttgcatctaatcaccaaaacatttatataaatggcctaagggcacatttccctttcaaaacttaattgaataaaagtcgctattggtcccatgttttacttaagcttcatttggatccttatacttttaaacattctgattgagtcttcaaccttcaa

SEQ ID NO: 38244 - DNA, 1893 bp, Zea Mays
cgtggccagtgtgggtttaatggcaaatggagtatcatccgggctctatttctaaacccaagactgatcaagcgaacaaatcattaataaaaagtttgctagtgagtcgagaagagagagagaggcgtccggaattcatcgccagcgatgtctccgtccgccgacgcccccggcccggcctcctccgcctcggcgcccccgctcgcgcccctcatcgccgcgcagctcaactacctcctctcgcactccaagctgcccattagggtggtacagatctggtccggctgccgcaacggtcgccctgccgatcggttcaggctcgccatccccttctgcctcgactacgtccactgggatttcgtgtacaatgcgctgtctcccaaggtggcaccagacgtggtgttcggtccggaggatgagaggttccagccgctggtcgattacgctgctgctggaaatggcgataagagctgcttggcgcgttgggattgccgcgcccccgagggactccatgcgctcgtacaggagcttcgagaattgtacattgaataccaaaaggagcgggttcacatggtggatgacgcgagactagcgtttgaactaagcacagttctctctaaggaggggattgaagtctgcatggtaccttctgctgataggccagatgaggccaaatttgctgtaccacttctggagtctgactttgactttgccaaactggtgccaggatgtccttggagattacctcaaaagatccatctccaggtcatttttcctatcagcaggagttcaagctactcttctatgccttctgctccacgactcaaactaatctcaacaccagatttgaggtcacttctctcagttgaggatgtgaaactccctccatggtcaaatgggatgtgtttggcggagtatcttcctgctttagaagacagtcttaacggtctgcttgtagatgcgtcggcttcaattggttccagaagacgctttattgaggcactagctcccatctttgggagaccattagaggctgatccgattttttgcaggagggctacagttctttccatttctggaatgttcacatttctggttcactttgccatcccccttcaattcccaaagcaacaacctgtcgtcacactgcagagttctcagatgtaggcgagtagcagggtcgcataggaagggctttttttaaccaattatatgctagtaaggaaatgatgaaaatcgtcactggataggcctgccactagaatgaatgtttacagacactgtaatgccgatgggatgcctatcacgtcgcctccgataaatgactatccctggagtcctagatgggaccaggcagagatggttgaacggatctacgacttcctgaccgacgagtgccaaaatttcaagaagttctgcagcgatgctatcactcagcagaagtagctgacatcgttctgcagcagaaagccgtggtgctgattttctcagcaacaggctttcttattcccagcaagcggcacacgtgtctacttgtgcgcccgccccaagcctgcaaccgttgatgctgttctctttcttgtcatgtgagaggacgcaacctcaggcgttggttaggatcggcataaaccaagcaggacaacacaagacctgttggttgtttacgatgtcgtacccctgtataagctgccgacatggtgactgtttgggatatggtatagatggatacaatccagttcttttgtaaatatgatatgaaggatggtggcactcctacccccgttgcattctcctctccaaagcaccacatgctgtcgatgccgttgggaagtttgcaaaaatcttactcttattgttatgcaatcaaattgtgtgtttccacgcgatatttcc

SEQ ID NO: 38245 - DNA, 2684 bp, Zea Mays
aagggcgagcaaaactggaagcctacgaaaatggtggagctcacctccttatccccagggccaccacgtccttctcggctgactcctcgccgccggccgccgccgccgacacctcatgttcatacctcctcgcgtcgtcgcgggaggatcctcggcgccgcgaccgccacgcctggcgccgacgactaccactccaccatccgctccctcaactcccgcggccgccacgtcccccgaaaatccctcggaactacacgctcaactccaaggtgaacgaggagctggtggcggcggcgggggtggaggagggtgacgtcgtgctcgagatcggcccaggcaccggctcgctcacttccgcgctgctccaggccggcgctaccgtctttgccgtcgagaaggacaagcatatggctactctcgttaaagataggtttggatctacagaacagttgaaggtcattgaagaagacatcacaaaatttcacatccgttcccattttcttcctttcatgaaggagaaatacggtgccaccaaaaaacttgcaaaggttgcatcaaacttaccattcaatgtcagcaccgaagttgtcaaactactactcccaatgggggatgttttctctgtcgtggtgcttatgcttcaggatgaaacagcagtacgccttgcagatgcttcaatacaaagtccagagtaccgatctatcaatgtgtttgtggatttttactcggaacctgaatacaagttcagagtagacagagagaattttttccctcggcctaaggttgatggtgctgttatcagcttcaaactaaagaatgcggaggagtatccgccagttagttccccaaaaagcttcttttcaatggtgagtagtgggtcatggggtcatggtgtgcagaaacttgtcccaaatctgaattgctttctgtggttgagggagaaaggacgtgaatggaagcaattgtttatctttggatatcgttacaaggccgctcattcttggtggtcttggagtccctaatctgtatttccaaagctgggcactgtaagctaaatggttgtggctggagaaaacagacactaacagaccttggcatgggttaaaactgcatgtactaaagcaagtaaggaagttctttcaatcttcggttgttactgtggttggaaatgagaacaagactttattctagtcggacagatggttagacggcggctgcatcaaggaatttgctcctgctgttgttgctaaagtcggtaaaagtgttgtttccactagaactgcggcccaagctattggaaactggcaatggatcagtgaaatcatgacacccctttcctgggttgggttacaacagttcttgcttttatgggatgctgtaagaagagtggtgttaacacatgaagctgataaacatatatggctgcatacttcctctggccagttctcctcctaagtcatgttacaaggcatttttcatgggatccattacttttgagccttggaggaggctgtggaagtcttggactcctccaaaatgcaaatttttccagtggctggctatacggaataaatgttggacatcagatagattggaaattggaaaggagaggtttggatcacccaaaatcttgtttattatgtgatcaaacacaagaaaccatccaatatctattgtgtacgtgcgtctttgcaagacagttttggcataccatcttttcgcccttggggtttgttaatctctctccgtctggagatgagatcttctttgccgattggtggcgaaaggtatgtaagaagatacatagaagcaagagaaagggtgaattccgctttcatggggaagcgcaagatgcttaggaaatctcttcagcacatatgctcttcttctgagattgaggctgctcttgacaacattggccttccagttacagctagaccttctgatttgattttggatgatttcgtgagattgcacaatcatttagcgaaagtatgactaagaagtgcctttcaaaatgcctaaggaattgcttgttggcatggtgttcaacagttggagtaacttacgcctgaccgctgagagttgctatgcagctacaggtgcattcagctcagctccggggcgaagccaggaattacatgtagggaggccggccgaaagagccatcttgtaaaaaaatgatcgcgggttcaactggtttggttactcgcacttagcgtctgtctgagttaatacttgacaaaaaaaaaaaaacaagcacagctcaactggttaggtttctcgtagtggtggtggtcgtttgggttaattcatcgacttgacacggttgctcctatttttttttctatatgtattctagatagtgagggtttattgtattttgatcgtagacgctaatcagaaactctactgaatggatgccttcgttctctctgagtacaaaggccccattgaaatatgtatgagaaataaagcaaatttagaggaccggtagcatttccttctgcttatttgcctcctttttcaccacgtgagcatctaaccaatacaagactgtttagcagatctgtaaggccttgttcgtttacgtcggattgcatccgaaatcgttccagttaatcaaagtttatataaattagagaagcaatccggttatgaatcgttccgatccaccaatccgg

SEQ ID NO: 38246 - DNA, 2609 bp, Zea Mays
cacacagaacgttctgccgcccgcatccgcgccgcaacccgcagccgccctgcaggcaaccgcccgcatccgcggcagcgccgcggctgcttccatccatggcgccgcggcttccatcaatcgccagcgcgtcctccgtactcctgtcatccgaggaaagccttccatccatggcgccgttgctgcaattccccccgcgatccacgctacctccattgcccacacgatccgcgctccctccattgctaccgcgatgccccttcccaggaacccttccatccatggcgtcgttgctgcaggtgccccgcaatcaactccattgccgccacgatccccttccaccgacgacactcaccttccatcgacaaaactgatcttcctccattccaccgacggcactcacctctcagatcccgtgctcatcaccatcgtgcccctcgctcgccgcccccacctcaccaagagccttagccgtccctagagaagacacggaggtgcagtgccagtgctttcctcaagtgcacctcggattttcggtaccggccagattgggacgaattcaacattcatcggctccaccaaaacactgccactatgatgtgtatgcttgcgtcaggacaggagacccaaaagtacttcatagatgaatgtgacattttccacaagaacgagatacgaaatggccaaggactgctgacgatgatgacgacatggccaccatcgctgccctcagttgtcctcagggagataattgtacaaacttttggcatctcacatcaatttactccatccatgatgaatctgagcatgaatggtggtgccaaaaaacttgatgggaaatctatgacaatgctgtggagaaacagctacaatggcatgcaagccaagtttgctgcaaggcagatgccagatgattggcaggaaacaagtacacttttggctacattagagaagattgagtcttggatattttctcgcattgttgagacaatatggtggcaggcactaactcctcacatgcaaaaacgagtagaaggatcatcaactccaaaggctggtagagtgctatgtcctactttgggtgatcagcagtagggcaccttttctgttaacctgtggaaggctgcgtttcacgacgcattcaacagaatgtgccccctcagtgctggcggacatgagtgtggctgtttaccaatattagcaaaactggtgatggagcagtgtgtagcccgtttgaatgttgccatgtttaatgccatccttcgtgaatcatcaagtgagataccaacagactctatatctgacccaattgttgacccaaaagtcctaccaattccagttggtgatctaagctttgggtcaggcgcgcagctgaagaactctattggaaacgggtctagatggctgacagataatcttggcatagatcatgatgactttgaggacataggagatgttgaagacgaaagaagagttgcagctgaaacgaaatcgtttcaacttctcaatgagctaagtgatcatctattttttagtttttcataattttcctttcatggcctccttacatgtttgatttcctatgatccatgagctgccaatcatgataacgcggtttcactatgcaggagatgaacaaggatgcagtcacaactgatgctatcggcagtatcagaacttgatggtgcttgtagactgttcatggtgcttgtagggatgatgtatgtctatggcttactgagctccaaccaactatggcaggagcgttagctaggacagcagtcagtctaacaattgtggacaaagttcagtctaccatacactgaagcgcacccttgttgctaaagctgcaggtgtgaacaactttgctcagcagaatggaggatcattgtcactagcagcaagacctcgagcccagttaaccatcagtttctttccttctttctttgggccgagagagcaaagaaggatgatgcactttccaacctgtgtagcacgttgggacaactcaagaaatggcagtggatatggacatagaaattgacaggcaaaacaaagcgctggttcctttcagcgacgacatcactgaactgaattttagactgaaaggcgtgaatcagtgtggacaccagttgctgggcaagtgatatggagccagaattcgggcagttcggagactatcgccttgattgcagaatttaagaacattgttgttttacatgtttttttgcagtgaatcaggccacacatgttgtattagtgagagaatgatgatttattttatattattatggatttcatagattattttagttttccctgaactgcaattgtttcaataacataggaggggactaccttcaatgacatttaggtgaatttttaaggtatgtccattattccattatagagcacaaagcctacttcttacaactcactgtatgttttataattgtatcaaaagcactgaacaaacatagttagctatcacgttcactgttgtctaaatagattgaaataatgtggtgaagccgtcatggactcttaagtagcttagccactgcaaaggatacaattaattataaaacaccaatgaatcaataaaaaaa

SEQ ID NO: 38247 - DNA, 193 bp, Zea Mays
ttcgcatttattattatgaaggaacaggaatgatatcgaattacaaatgtaccttcagcttgaaaggagatgaaagtacaggtgtgacacaaaagcaggtgccaaatcagcgtgtccagtacgggggtactgttcacctatttataggcacgggacacagctcatataaaattacattcatgccctttacatt

SEQ ID NO: 38248 - DNA, 3725 bp, Zea Mays
gaaaattcctaaaatgaagactggagacccagcaggtacgcggagcgtagcaaattcttcacgacaccccgatcgagactctggagcgcagagacggcagagagcacagtagccaagcgactggagactcatcactggagactggagagcatccggagccagtgctcgcaccaccgctcccgattcccaatcgccttcccgccgccgaaggggcgccgcactgtcccccggcctcgatctctctcgggccagccgtcggccgtggccctgcgcctcctgcgttatctggctggagatccggccggagtgccattcctactctcggtcaataagtattctggaatgtttttccgagctgaaatagatagcttctggagctggatctcagtattctgttagggacatgctccaaccgagggaagctgatttgcctgcactctttcttgtcttcattgtacttcctgtggtagcttattttcttctcgggagatggcatgatgctgcaagtaagaaggcaagggtaagtgtgcttgctcagcgagctgcagaagaagcctatagagaggaaacaatggcgtgcccagacattattctgccagggtcttccttgagaactatgccctatttcagacctatgcctgcattaagacaggaataccatgaatgtgcaacttgccatgcccctgcaaagactcgttgctccagatgcaaggctgttagatattgctctgggaagtgtcaaatagtacactggaggcaaggacataaggaaacatgccaaaagtggcttggtagtggttctagcagctttggtggatctagcactgaggctactgaacagatgccgttcttgactaacttaaattcacctcttccgggtggtgacattcacttgcgtgacttgaacttcgatactttatcagaaccatcctttcccacaactgatggttataatctagatactgatccatttttggcagacagaagcaacatgaataaatcaaatcaaggtattcatatgagcgaaaatggtgctgttggtgtatcttttgaaaagaataattataatgctgatgatgaaatccactcaccggaaaatttatctagaaacaaggtgtcaaacaactattttggttcagatgcaataagtggtaatggggatgcaatttatcctgccaaaagtaatgcacagcagcctagcagctgtgctcctgacatgagaaaacagccaaaagcaagcatcacagtttatcagcctgacataggtgtctatttaacttctgacatggtcagttcttgtgaggggtcatatgcttctgccagtgagccactgcaaaggagcttgtcatctggaagaactattgggaaagcaaacgcggtgaataagaggcctccatacccatcaagtaaggtggtttcagcacaaaagccacaggatagggtgtctacatcatatcaaaatgatggccatgagaagaatccttgcaacaaaaatgaccaaagatctacccccaaatgtgaatcaagtcaatcaacaagcagcaatctacaaaagtttggagcatccaaggttgaagttttaaagaagccttcaaaatttctcaaaaccagccttgtgggattgatcaatgataataagaggaacaaggtattgttcccatatgaagatcttgtcaagttttttcagtatgaagcccggggtatttcccctagaggtcttttcaattgtggaaacagctgctatgctaatgctgttcttcaatgtctcatgtgcacaaagccactgatgatctaccttcttctgagattgcattctaaagattgttcttcaaaaaaatggtgccttatgtgtgaacttgagcaatatgcttcaactttacgtgaaagtggtgggcccttatctccaagtagaattctttctaatctgaggaatattggatgtcgcttgggtggtggaactcaggaagatgctcatgagtttttaaggcatcttgtgatgtctatgcaagcagcttgcttggatgggctgggtggtgagaagcatgttgagccaagtttgcaggaaacaacactgatacaacagatgtttggtggccgtcttaaatccaaggttaagtgcctcagatgttatcacgagtctgaacgatatgagaatataatggatcttactttggagattcacggctgggtagagtccttgcaggatgctttgacacagttcactgcccctgaagatttagatggtgataatatgtataaatgtggaagttgtgctgcctatgttaaagccaggaagcaactgagcgtgcatgaggtgccaaacatattaacagttgttcttaaaagatttcagtcaggaaaatatggcaagatcaacaaatgtgttactttccctgatatgttggacatggttccttttgtgactgggtctggtgacaatccccctctttatttcttgtatgccgtggttgtacatgtggatacagaaaatgcatcattctctgggcactatatatcatatgtcaaagatatgcagggtacatggttgagaattgatgattcagaggtccaggttgtatcagtgaatcaagttatgtcagaaggtgcatatatgcttttctacatgaggtctttcccccgaccaccaagaatatacatcgagaaggggccgactgttccatccgcgaagcgccacacatcaaagtattccaagggctctaaacacgagcgcgagcagacagagttactcctctcggcgaacgatccagcatacggtgtttatgactttagacctgatggcgagggctacacgcaagatcagcaagcagagttgagatccagggatttccatcgcgccgacgatgccttcgcagactcggtcagcgcggacttctcggaggccacgtcaagcgaatggtcgctgtttaccagctccgacgagtcctcattcaccaccgagagcacaagggactcgttcagcgttgtggactacggcgacaacgctggcctggacccaatctcctcgatatttgggccaagctatgctccggagcatcatcccggtccacctggcagtttcgccgcgtgcacgaggctctcgccttccaacccacagacaaggtacttctcggagagcacagggttcgtctcggactactcttccagcggcattgtacatagaggaagggatccaggtgaggcgtattaaattttggctgcatgtcattcctaggctagctcgattcaatgtagcgagagagagaggaacaaatttagattgtgtctatatgcaggtgaaattttagagcgcggtggagctgctccggttgaagccatcccccgaggcccgaaccagtaaattacgccgaatccggcagtcgtatggccctgcacaccagtgctttgtgaaaagcttgcagattcatcaattgacgtgcacttgccttttatatggacgctgacgtatggaggtgcacactctccacctccgtatatctcgccacctactctgtttatattagaaggttgattgctgacacacaacacctgctcgtacttttttgtcgaaatcatgacggacaacaacgctaaacatatagtacaatcttcttgtcttgctgatctgctatgcccctttgtgaaatctgccggtgacatcagcgatggcgtcttgctgatctcgtggtatacctgatgtttcctcggtctcagcttttatcacgcag

SEQ ID NO: 38249 - DNA, 527 bp, Zea Mays
tgctttataatggtagagatatagttaaacagggtgacgacgtgacacaatcaattatctcaattctcaaaattggagcagaagttaaggtgctgacatgggagtgtgtgaagttgttatttttgctgtgagaattgaattgacaattgaggtagcctagtgctgctagccgaacgttgctgcgaggaacatgtcctcctcgctcccaacccagccgcactggccacatcgctcgccagcacggcagcactcggccatggcgccgccggcgccgggcgccctctccgccacttgatgatcagcggcaacggcgtggacagcctcgacctcgaccagcagcctaggcgccttgcgcccacgcagctcgcggcccaccggcgagagcgtgagccacctctccgccggctgagacgacgccgccgacgccacgtcggcccacgggagctcggcccgcgccagcacccgcgacggcctcgcccgcgctccagtccccagcgacagcaacgccgccaggccggacgcggacg

SEQ ID NO: 38250 - DNA, 1366 bp, Zea Mays
cctctctctctccccacaccatgtgtgtgcccagattcccctaaataggtgtctcgcctctggcatcagtcccctcttccccttccttctcctcggtccctatccgctgctgcgaacagcagaagctgcggcacggaggtgcgctcttcccggcggtggagttgcagctgcagggggaagaagcgagctagagctgcagggatgataagcgccaagtccaacgccgccgtgtacccgtgcccggagtatgcggaggtcgaccccaccggccggtacggacggttcagcgacgttcttggcaagggcgcgtccaagattgtgtacaaggcgttcgacgagtaccaggggatggaagtggcgtggaaccaggtgaagctgcacgacttcctgcagagccccgaggacctggagcggctctactgcgagatccacctcctcaagacgctcaagcaccgcaacatcatgaagttctacacctcctgggtcgacgtctcccgccgcaacatcaacttcatcactgagatgttcacctccggcaccctccgccagtacaggcagaaacaccggagggtgaacatgtgggcggtgaagcactggtgccggcaaatcctcagcggcctgctgtacctccacagccacaatccgcccatcatccaccgggacctcaagtgtgacaacatcttcgtgaacggcaaccagggcgaggtcaagattggcgacctcggcctcgccgccatcctccgcaagtcccacgctgtccactgcgtgggtacaccggagttcatggcaccggaggtgtatgaagaggagtacaacgagctggtggacatctactcgtttggaatgtgcgtgctcgagatggtcacctttgagtacccgtacagcgagtgtacgcacccggtccagatctacaagaaagtgatctctctacctgtttgatttggtagggtactaagccagaagctctgtacaaggtgaaagatccaatgctgaggcgctttgtcgagaagtgcctagtatcgtcatctcagagactgtcagcaagagaactgcttgaggatcccttcctacagggcgatgacgtggctgtttctttggatggtggagattatcatgtaccgaccaagtacgtacggcagccttcatatctagggcatacctatagcaatggctccatggtgagtaatggattctcagaaagcatggatgaggacgctctgagtgaagactgcgaggatgatgacatgaaaggccaagatggcattgacctgttcaacgagaatgaggatgaacctcttggcaatgtggacataacaatcaaagggagaaagagtgaggatggaggcatacgaatctctagattccg

SEQ ID NO: 38251 - DNA, 2377 bp, Zea Mays
aaataatcgtactgtccagaacggaaactgccctcgcttcgcttcctcctgttcttctctcccctcctgctactgccgcccggctccgctccgctcccctcccgaaccccgttccacctccacccgccgctcccgtcccgtcccgtccatacccgcgccgctctcgactcgctcctcgacctcaaggctacctacctcgacgggccccgcaccgtacccgcccgctagctcccgcggctgcagcagcaggacgagctcgccgccgccgtgcactagaagaagaggtcgctgtcggtcgccccgccccgcccaatcctggttcctggacctgcgccgcgtcgtttcgcctcaggttccagtgtctcgatttgccaggataacttgtataattgaagctttcctttgtacgatgatgggggcatgccatggaccagaactgagggggctagggtttgctatgtggtagtagctcctgcttcaggtggcgtcagctgttctgggtggggtaatatgatgaaacagatatttggacggcgcaaggcgtccaaaaccgcagacaaggagttcactggtgggaggacgttcagccagctgtcggggtctggagttgctgacctgagtggccaaccgccaattctgtcgagtactgggcacgcctatgggagtggaaaccgtacggggttccaagactcgaggataaatgataatttgttttcttccaacttccgtccgttgccgagctttaaggatgtgccgaatacagagaaacagaatctgctcatcaaaaagttggacgtttgttgcactctgtttgactttacggatgcgtcaaagaacatgaaggagaaggaaataaagacgctgatgttgttggagatagatgagtatgtaaggactgctaacgtgaagttccctgagatcgttgtggaggcaatcacaaaaatgatttcggtgaacttgttcaggacactaatttccccacctagggagaagaaggcgcttcaagcttttgatctagaagaggacgaaccgttgatggaccctgcgtggccacatttgtaccatgtgtatgagttgctcttgacatttgtccagtctccacaaaatgatgctaagctggctaagagatatattgactattcctttattctgaggctgcttgacctctttgactcggaggacgctagggagagggatcgccttaagatggtgcttcaccgtatctatgggaagttcatggtgtatcggccatttatccggaaagctatcaataacatattctaccagttcatatatgaaacagaaaagcacaatggaattgcagagctcttggagatttttggaagtatcatcaatgggtttgctttgccactcaaggaagagcacaaactgttccttgtaaggaccttaattccacttcacaagccaagcacaaaggaggtactgttcttgggtgagttggaagaggtactagatgcaacacaacctggcgagtttcaaaaatgtatggttcctctttctcaccagatcgctcgctgctcgaacagccctcacttccaggttgctgagagagtattgtttttctggaacaatactcacttcgagaatcttgttaagcaaaacagtaaggtgatcctgcctatcgtcttccctgcattggagaaaaatataaatgggcactggaatcaagtcgtgcgaagcctcagcctgaatgtccgaaagctattctccgatcgtgacccccaaatgttcaatgaatgcttgcggggttatgaggaagacaaagacagagagaaggaatttagactgaagcaagagttggcatggaaacgtctcgatgagattgcatcagcaaaagtcacaagtggtgaggctgtcctcgtgtctccaaccttgcatcgtcaaccttcagtcttgtaggaacctgcgctacatgagtggtccttgcagagtcgttagacattgtacaggattgggttgtagataaaagcgggtatatgaagccaccaaggcaggtgtgcgaaatcgaggaaagagagatgaggagccagtagtgcatcatttctgtacatcccgtgccatggcttcttttggcatcctggtggttcactttgctgctgtagtccgttgtttgggagaatggatgttttttttcttcttataatggaaaatgtcgagatggcgtgcagtcagtttaaatgataaaagttataagcttttcctttcgcatatagttttgatacaatttgtcatggttgtgaatgcaagcgaatcatatcaaatccctgagaatgctgtaacgcggtggtcacatgtgtggggatttttttattttatccccaggaaaaaatattttaattttcatcacagggagtgc

SEQ ID NO: 38252 - DNA, 2186 bp, Zea Mays
agagataggaaagggcccaacagctcaacagaaaagccaagcaaaggctgctgcatactggaaggccctctgtctgtgtgcgagcgcaagagaaagggagtcagagagagagagagagggaggagaccttgcagaggagcgaagcaagcaaggtgggaaagaggcagcagcaagggcggcgggctgccggaaggggaacatgctccctcctcatctcacaggtcttccttcctgctcgctgacttgcctctctccaccctctctgatctgagctctacggctcttcctttccctgcggtgataccggagctctctgctcccacctcccagtaccagccgacctgtttttttttcgtttgtttgggggtgggtggatgtgggggagggatcgtttctcggttcttctggacgatttgtggtggatctggctggttccttggttgctcggctggtcttttgagttgatacggtgctgggatttgtaggcgcatttctgggtggaggtggccggtggggtaatggctccagcatgtgatccttgctaaggccttacagttacagcacactgcatgccggatttgtgttgctttatttatgttcctgcccgtgtaatcgttttgaactcaaggggagaactagtgacctactgatgagattaagatgcagcactgtttttgctagcgggaggcctatctgcagaactaactagtcatgtctgaggccctcagcacatatactctggttgcatgaaggattcttagaattcagagggcgctaccgagttgatgcatggtactgatacagcgctagcgctagcgctagctagcttactactagtacctttagagcatgtgcatgcccaagttacacatctcacctcgcgtgatcaattgagggcctactagcttactactgctgccttagtttcctttttcatgaatacagttacggtgggaaggtcaaattctgttgtgtattcatgcatcagctgtgctccttaaggcttgcagaccttaatacccagtacgtgtttcgaatctcgtatgtttatttctgggaactgacctgtgtttatatatgtttggacagtacgaactgaaaaacaagagtaaagaatttccgtgagatgagacagaatggcgcggtgatgattcagtttggccatcagatgcctgattacgactccccggctacccagtcaaccagtgagacgagccatcaagaagcgtctggaatgagcgaagggagcctcaacgagcataataatgaccattcaggcaaccttgatgggtactcgaagagtgacgaaaacaagatgatgtcagcgttatccctgggcaatccggaaacagcttacgcacataatccgaagcctgaccgtactcagtccttcgccatatcatacccatatgccgatccatactacggtggcgcggtggcagcagcttatggcccgcatgctatcatgcaccctcagctggttggcatggttccgtcctctcgagtgccactgccgatcgagccagccgctgaagagcccatctatgtcaacgcgaagcagtaccacgctattctccggaggagacagctccgtgcaaagctagaggcggaaaacaagctcgtgaaaagccgcaagccgtacctccacgagtctcggcacctgcacgcgatgaagagagctcggggaacaggcgggcggttcctgaacacgaagcagcagccggagtcccccggcagcggcggctcctcggacgcgcaacgcgtgcccgcgaccgcgagcggcggcctgttcacgaagcatgagcacagcctgccgcccggcggtcgccaccactatcacgcgagagggggcggtgagtagggagccccgacactggcaactcatccttggcttatcagcgattcgactcggctctccctcgtctgaaactgaactctctgcaactactgtaactgtaactaaactgggtgtgcccggattggcggtcgttctgttctactactagtacctgctacgcgtcgttgggttgggtctggactagagagcgtgctggttctttgatgaacttggctggacttgagggtgttgactagcgcgaagctgagttccatgtaaaacttttgcttcaagaccgatgactggcggcataataagtagcagtaataaccattcttctgtgtctgtg

SEQ ID NO: 38253 - DNA, 660 bp, Zea Mays
aaccaatgttggaaatgcataatcaggattgtacccgtcttatttggatagatagacaaaacttcctgccctttctgcgtccgtgtgaagcagttgttcgagaagctcggagcaagctacaaggccattgagttggataaggaaagtgatggagctgagctccagaatgccctgaaggagtggactggacagaggactgtcccaaatgtcttcatcaatgggaagcatattggcggctgtgatgatactatggcactgaacaatgatgggaagctggtgcctctgctgactgaggctggagccatcgccggttctgcctcgaagacaaccatcactgcttgacatgtgtgttaccattcccgtgcttaaaaataatgatgctttgcaagtgctgaacttgcagatgctatgtgggagtgactgttcgttccctgtgtaaaactccctagacatcagtcgagtcgtgttgctgtggtggttgtgaaatctacaataatcattgctacaataatgtcgtgttccctagacatcagatgagaaagatgagaagaaataacattataatcttattcgaactatcatctgtaagcttcttttgatacaatatttttatttatagattttaaaaacatttgtaggactaataagatttttaggcac

SEQ ID NO: 38254 - DNA, 1226 bp, Zea Mays
tggcagttggcagtcaaacccaccgtcccttgcacgctcggcttggctgaagcggagagtttcctctgttcccccattccgtcgtgtcaccaccgccgccgccggagtgtgtcatcgccgattcgcctggtatggcagcaccgcccgggggagcggggatagtgtggcagacgccggccaacccgcccgagtcgcacgactacatcatccgcaacggtcggcgctacgtgaggccttactacttcgagttcatctcccatgtgaagaacagatgggctggaaagaccatcgttgacctcttcactgatgagttcaaagggcgttcccgcgattactatgtatgatgccattatttcctttgaatttcatgtaccatactgtttcttttcattacacgccattgtggttatatcattgtctgccaggaggtcctagttgtagagagatgtccataacaggcttgctactgaatgaagtctctgttgtttattgaaccccatcgtcttgaaccgtgcatcttcctttttatttaaaccttgtgcttcagattttgagctcattcatagtaacatatgcattgctgcatgtaagtgaaaggtgaaattgctaggttcatgcagtgaagtgtgggaggcttcaggttgatgggcaaatggttcacacagactatattgtgaaatcatcacaaaagataagccacttcttgcataggtcagttgctttgatcaattttgaaattattacccccactaaacaagtgttcgataatttcacttcataagttcaacatagattactccatacaaacaaatgttccaaagattaggagcagcataaatcttcacaattttctgcagatacattatcctttacatgcttatatcataaaaatggcaagtgaatcaacaggtaagtaacagatgttttggttaatgtctcaatttgctctttctattggaattatttttagaatatcaataaaatattagttatactgatgaactgttgttgattccttgacttctaagttaatgatgtcatttagtttaactttgtgtgccattttaccttcatgtagttctctagttaaccagatacttcctgtggcatgcagacaggaacctagaccctctgtgttctgacttaacaaaaataattcacatgtctttttctcatttacaaatttttagttcaagtctttttctaaaggtgtttttttcttccag

SEQ ID NO: 38255 - DNA, 2203 bp, Zea Mays
acctgggccgtcagactcgccgcgcggcgcggccccgaccacatcgccgattcctcgtttcctccgcacccgcacgcttcccacccgctgccccgcgcccagccgtcgccgtgatcgccagagcgttcctctgccgagccgttcggccggtccactcccgcgaagcttccagtagaggcgaccttcggatcgagtctcggccgccgaggagtcgaaggccatggaagtggtggcgtcggcgccggggaaggtgctcatcgcgggaggatacctcgtgctggagcgccccaacgccggcctagtcctcagcaccaccgcccgcttctacgccgtcgtccgccccctccgcgacagcctccccgccgacgcttgggcctgggcgtggacggatgtcaaagtgacttcccctcagctctcacgggaggccacatacaagctgtccctaacgaagtcgacgctgcaattgacgtctgcgagggaatctacaaacccttttgtggagcaggccatacaattctcggtagcagctgctaaagcgaccattattgataaggagaggaaggatgtagtagataagttgctgctgcaaggtctgaacattacaattcttggatgcaatgatttctattcttatagaaagcagattgaagcacgcggtctccctcttactccagaggcactgctttcattgcctccattctcttcaatcacatttaactcagaggttgctaatggaacaatgactggagagaaatgtaaacctgaagtagccaaaactggacttgggtcatcagctgccatgaccacatcagttgttgcagctcttcttcactatcttggtgtcgttagcctctcatgtccaggacaatcttctggtgataatacaactacacgagaacttgacttggttcactctattgcccaaagtgcacattgtatagcacaggggaaaattggcagtggttttgatgttagtgctgctgtctatgggagtcaacgctatgtaaggttttctccagaaatactctcgtctcaggctacaggtgggactttcctcccagatgtagtatcagatattgttacacaaaggtgggatcatgagaataaacagttctcattacctcctctgatgacccttctccttggggaacctggaaccggaggatcatctactccatcaatggttggatctgtgaaacggtggcagaagtctgactctgagaaatgcaaagatacatggagtaaactggcctttgccaattcagcgctggagaaccaactgcgaatcttaaaaggactttctgaaaatcaccgagaggcatatgagtcggtagtgctatcctgtagccatctcacttatgagaagtggacagaggtggctactaaccaacatcaagaattaattattaaatcattgttggctgcaagggatgcttgccttgagataaggcttcacatgcgagagatgggcatagcagccggtgttccgattgagccagattcacaaacacggctacttgacgccactatgaatatggagggtgttttacttgctggagttccgggagctggtggcttcgatgcagtattctcagtgactttgggggatgcaagtaatgctgtagcaaatgcttggagctctgctggcgttctgccacttctcgttcgagaagactgccgtggtgtctcattggaagatgctgacccaagaacaagggaggtatcggcagctgtatcgtccattcagattaattgattctactgttaatattctatttatgtattgtgccgaatgctaggaggcaaaataagctgcacgagatgaggcggaggagatgatggttgaagtcacatttcgaatttcgaatgtgggaggaaaagaccctgggccattggagagtcagggctcgtattcgcccgttgtagggaccacctcattggggatggtagctatgagaggccctctctctctcttgtcctgttggacgagttgacgtgcatctagggaggtgccctcgtatcaccacttggactggtctctcatgcatttagagttttagggttcaggatttagggagatgccctcgagacttgttgcagggatgtgctcgtgtcatgtagcggcatagacatgcgttgacttgtgccaggctcacgttgcacatggagctctctgtctgtctgctgcatcacagcgtgctca

SEQ ID NO: 38256 - DNA, 561 bp, Zea Mays
cgaaaacgaaaacgaatcaataatggacctaccgatggctgggtacagtactagtagcacgcaacgcaacgcaacgcatcgtctcgtctccctcccaggatagcagtgactggcatttgtgagctaggaggagtagagattagagtagtagtagatgggtggggggatgcatgagccaggtggtccttggaacatgcttgcgtagaaagaaacatcgcgtcgcagaccgaggcagatgggcggggccggttagggttagccatgatgtgagcgcgcgcaaaaccgcttttttgcgcgagcggccggaggagcaggtgtgggagtggtcacagctcagagcgcgaccagagagaaccggaacccacatcacacatgccggcggcgagccacggtatcatcatcgtttttctgttgcaccggcgatgacgcggcgaatcgcattctctcgtctctctcttttttccccgcaacttgtctgtgtttcctccccgatgcggcgagcccggtaagcggaggacggaggaggtgatgtgtttgccttggcctcctcctcctcctcct

SEQ ID NO: 38257 - DNA, 2906 bp, Zea Mays
attaaagatgctgtgaacatggaagaaaggacaaacatagttattataaattgtcataggtatattattaaagatgcttttggatattgattctttcttttttctagagcaaacatttgatgattcgtctatgcatatatcttaagtcttattgacggttgatagttttgtcaggggttatgttgctatgcttcagaagaaggatccaaaactttgctctcatattttccataaccagccacaatatgatgagcaccatgattcgtccccagttttggtgtcgaagtatcatcgatgggattgctcaagatgtcttgatagtgtggaagtttcaggccataggccaacatcggaaaatgtttctatgcagcagaatggaatgaatgatggctgctctatttcaattgtttggattttgcctaatagtgttgattccagaagactgttttcttgcacacatcaatcatctcaagggaatgatcgattgaccctttcaaagactgcccaagaatgcaattcaaaatgcagttctcctggcaacaaagcaattactgcgatgaatgttccagtagctgaagaaaatgttccagaggcactcgttgatacgagggttccatctatagaagttttacaggcctctcccaatagtattgatttgtcagcaaatatcttgaatgctgtctcgaagaatgtcagcgatctacctgatgatgttgaagaaaatggcacacagaatccacacagtctaaaaccttgtgtggcgccaaatgaagatgagaataacatagctaatgatgacctcaatgagcctaatgtatgtaaaccagtatctgggcacaaaagcaaacaagtctgcaacatgggtccacgccgagcatcgtcaaaaagaaatgttgaatctgatggtaagaggaaaaggaataaatctactaaactgcctggtatttcagatctcaaattttgtcagagaaagccaaaaaagacaaggctgttatcagaactcataggttctgaacaggtaggggtttctggagatgccgttcaagtggaccatactaacagtgttgatctctgtgagggtggtaaaagaaaaatgcaccttgaggttggaaaaggtaatgacactactaatcagcaagtggacaaaatccagtcaagagctgtcaagaacaaggcaaaatacacaggagtagacaagttagaagatggatcctctctaatgaactggctgaaaagcactaataaggaagttagaacaaagaaaaaagactcagaacacaagaatcttgattcctcttctatttcaaggtcttacccagatatagttgcttctaatgatatgcatcatgattttctaccctcagttggggatgtgggccaggcagatgtaccatctactaccagtgccaagcatgggaatggaaatgcacagaatgacaaactggagcaaaatatgcagaagatggatggcttgtgtgaaaatgaatctagaaacttgaaacagaggttcttctcaaatgaaaaatcaacgattttgctaaagagaaaggtactgtccacttccgttgtccatgatgagaacattgagaacagtaatataaagagagatatgctcaggtcagatgatttgcctcaaaaggaacctgaagtctctgtacaaagatatttggcaaaggtatgattaaacataaagaattctactgaaaatttataattagattattacattcatttacgtgttttacctacttttgctgacttgaattggggacctttgtccagcataggatttttaatccctttaatgttaatgcatttgtgtctatgccactttgctcccataccatccatgctttccgttgtgtacaccactaggattttttgacactttttatgacatttgagttcacaagtttgcacgcatgccaactgaactagttatttgtgtgtgactagtttgggatgtcatgagcaaattagcgaatcccaaatgacatttacttctttataaactatatatatatacacacacacaatggtgcaagcaataggaaatccgtactgaatttagtctgcttgtatacaaatattgtaccctcatctcgttaccacaggtttctcttggtaaacaaaagatccagaatgtgtctggcctccacaagaagaatataccaaagaataagaaaggaaagcagaaggtgcacgagaaacaaaatgtgatagacgacttccccatggacattgttgaacttctcgccagaaatcagcacaagagacaattgatgactgacaccaattctttggaaaactgtcatactcaacccaaggtagctcaagttgattgtgctgcatttgcagccaagggttgtcccaccaatgcatcaaatgagttcaacactaatttccaaaaatctttggcatcagaaagtaagcagaagtccttacagtctgtcaaacaacgagagaatcactttttttagccaagtcagtgtgcttgtcagcatcaagattggcaatcacaacactgtcgtcctgcttgaaaactgaagccagcttctcataaatctaaattcaagtacatgttcagtccacaaaaaaaatgaagaccgctgcaataatttggaaattttcaagctaatactctactaaccggagcaagatgcttgcagtgaccacacctgtaaacagaagggtcaacaatgcagttcaatttcagtaaagtagcgtgatggaaataatttaggtggacataagttgaacatgataaccaaccatggggcataaaactcatcaaggacaattgagtcaaaggtctctgaagtcagaaccacgacgcttgaaggaatggcagctatcttgacattggtacctgaaacaatgtgcattagttgacaacatccaattct

SEQ ID NO: 38258 - DNA, 1336 bp, Zea Mays
tctgtattcagtggattggttggatatttgtggacagtgagcccttatctgctctactctctatttgaataactggacaaagtagatatttgagctaagtcgtggctggtgtggttgttgagcatgaaagccacatgtgttagtccctgttgtgctgtcaccttggaactcttcaccactaggatagctaaacctgaagacgtctgccttcctgccctttatttaagtgctggttcggtgaagatttccctctgccttggtgttctagccaaagcttgcagtggtgtgagggattcatgtgtattgcaagacagagctcctctcccactgccaccaagttggcactgtccagagctgtgtgcgctgtcttcctgtgtttgtgatgaccacagccaccaagttcaccacaccatagccagaacattctagggagttgttagcctgtatgaagcttgttccgtaatcatctcaggtcagtgaagctcacaccatttactacttgaactcaccactattggttgcctagaactaggtgtgaaatttgctcaaacataggctgtcaggtttttggatcccagacttagtacagaaggctgaaactagattctagtgtgttgagctccactttgtgactgaattttattcagttagctgaaataacagtttagtgtgggggtaactttggggtacaatagaatttgctctgaatgttttcaatcatggactgttataccaagttggtaaagctaaagttggagtataactttggctaagaacctttggtctgtaccatatgaaattgtgagataccaggggttttaacagggaggtgtgttgatggggtagcaggcctaaggtaattgagttcaggctttcatttgaaaactaacgaagatcactcctgctactctcacctgtgtatgtgaatagaagtgaggggcaacggagactgaatattggttgtggtgtctgttggggggctgcttcgtcgccgaaggtcttgagagaagaaacaccttcagaaggccataacacaataccgaagttaccagttagggagcttcgtagcgtatctctcgatgcaccgacttaaagatgaaatgaccaactggcccatgacaacctgtgttatgattgtaaccatttgtaaaggacatgaatgtaatttctcacaggctgcgtcctgtgcctataaatagatgaacagtactccgtactgttcacactttttcgcatcttactcttgccttggtctcctgttaagctcaaggtacaaatgtaatttgatattgttttcatgtattcaagattagttcaataataaatgtttatgcta

SEQ ID NO: 38259 - DNA, 2280 bp, Zea Mays
gagactgtgcacttgccaaactacatgatagattcatcctcccagcttcgttaattactatcaatgatgttgctgcatatttctttggcatcttctttgggaaaacaccgctgatcaagctctctccaaagaaaacgtgggaaggctttataggtgcatcaatgacaacattgctttctgcatttgtgctactcctgctgaaaatgtactaaccacaccttccatggtggagtgcagggcctccctgttggggcacgagatcgcccacccgtcgtctacaccagattatttctatcataccatcagatagtggatggacaaccaagcgtgcaccgtttcatcatttctgattctttcttagatgactaagataagtgtgaggtctgtactcatattctttccttttcttttcaatgcaggtatgatcttatacgagtggagattggcaacaaagatataaagcttgaatacttagtggaggcatttacaacttcaaatgacgtagcctcctcgacaccttctgcttctgctaactccggtgcaaggtagatccttgctatacttgacaaactaaaggaggaaagggagcaacaagaaggaaaatatggggaggaagatgtggatggttcatgtatatcagaagaagaagatggtgactgggatgtagatgagccagatgaggaggacatcatttacgtaaaatagcccattgtcttctaggaacttggtcatcattcatccagaacacagcaggttgcgttctgcatacataatattgcctatcaaggtagatttgccagagcagacttcgatcttcttaatctacctgacagtttcttaccatcatttgattttattgatggacatgttaagcctgttctagggagaaagattaactggatgaagacagggatcgttgagagtgatctggttctaacagttagtccacattatgttaaggaactcacttatggcccagataaaggtgttgagttggatggtgtccttcgcacaaagcctcttgaaattggaattgtaaatggcatggatgtttatgaatgggatccttcaacagataagtacaccagcgtgaaatatgatgcaacaacggtaactgaagcaaaggctctcaataaagagaggttgcaagctgaagttggattgcctgtggactcgagcatccctgttatagtttttgtcgggcgtcttgaagaacagaaagggtctgacatactcattgcagccattccagagttcgtgggcgagaatgttcagataatcgttcttggcacgggaaagaagaaaatggaggaggaattaatgcagctggaagtgaaatatccaaacattgctagaggcatagcgaaattcaatgttccattggcacatatgatgtttgctgggtctgacttcattattgtcccaagtaggtttgagccatgtggtctcattcagttgcaagggatgagagtttctagctcgctttgttacagttcagatttgagtgcgcattcccatctgttcatcacctggaggacttgttgacacggttgaggaggggtgtcaccggattccacatgggttctttcaatgtcgagtgtgaaactgtagacctagctgacgtgacggcagtagcgtcaaccatcacacgggcctagaacagtacggcaccccggcgttccaagaaatggttcagaactgcatggcgcaaaacctatcctggaaggggcctgcgaagaagtgggaggaggtgcttctgggccttggagtcgaggggagtcaagctggcatcgacgacgcagaggagatcgctccacttgccaaggaaaacgtagctactccatgacgcttggtgcctcggaaacacgcgttggtgataggaagcatcttctaggatcctcctggccttgtggctggagtgagttgttcagtcagacacagtttcgcctctacaacatcttcctcctcctggtggtggtccgaactccgaagcaaattccagtgataaaggatgaactaagaggtccatgtttctattgctagaccttttgcctcctaaatagacgatgtactgcgcttgtaacaagaacctcactttcgtgtcaagtaatatcaacaggtttcataatggtagtgaactgcactggaaaaacctgtaaacaatgcaaacaggattcaaaactaaaacaaatctgctattaaaagctgttattcaaaattgaaaaaaacaaaacctgttaattcagtattataactcagcaaacataaataaaaaaaaca

SEQ ID NO: 38260 - DNA, 183 bp, Zea Mays
cctccaccaaaacgattgaagactcgcaccacgacaacgatgatccgagcggcaaggattggcaccttgggaggaggggattgagaggggggcggctagggcttggtggctgcaagaattgagagaggaggagatgggcaggggggcggcggccaagggggaagagaagggggggcggctgca

SEQ ID NO: 38261 - DNA, 1244 bp, Zea Mays
cttctccatatatttgctgattctttcatttgattcaatgtgttaaggattcagataatttagtggatgtggcactgactataatcagaaatgaaatatcttcagttcctatctttaagtgcatggcagattcatcaggggtgcctttccttaatcttgcaaccttacaggggatcttgaaatttctttgctcgaagctacaagaagaggctgagggctgttcccttctgcacaatcagcttctcagtattcctattggtacatggtctccacatacggggaggtcaagtagcaggcaactcagaactttgctactgagttctcctctaaatacctgcctggatattctgcttcaagatagagtaagctcaattcctatagttgatgacaatggatccctccgtgatgtctactcactcagtgatatcatggctctggcgaagaatgatgtttatgctcgcatcgaacttgaacaagtgaccgtacaaaatgctttggatgtgcaataccaggtgcatggccgaagacagtgtcatacttgtttacagacgagtaccttgctggaagttttggagggattgtccattccaggagtgcgacggcttgttgttattgaacaaagtaccagatttgtggaaggaatcatctcattgagagacgtatttacatttctccttggatagcatgtgtagccattccatacatgaaaaagcttgctgtacttggttcaaacgaaataaaaagcttacaaatgtgatagtcatcttcttgtttccatcttgttttggttgatattatgcctcagacactgcatatttaaactgtgccgaaaaaaaaagaacagtggcaggtgctgcagcccttctaagcagaagtatgcagaagtgttcaggtgattgtttcttgcactcgtccagctaacatttcacgatttgcaggtttgaagaactgctacttgcaagttaggaatgcttcacgaatcacgatatttttaagaggccgagatttctgtttttttaaaacatcgatacaggctacagaatcagtttcgtaccgtctttgaaactagggaattttgaaggaactgaatcttgtggcttttttattttttttggaatgaggtgaaatgacctcttcaaattcgaacatctttttttgcgtggatccatcaacaacccccatacaaatgatttttttgaggctttgtcattctagttctattggatttgcagggtgttcctgta

SEQ ID NO: 38262 - DNA, 930 bp, Zea Mays
agaaaccaagaccccggcacctctctctctctccatccagctgcttctccaatctccaccgtccctctctctcgtttgcttgctagctcttgttgcacaccacagccagctctagcttgcattggggttcttgcccttggcaaagccctcatttttcttggtgtgcatatagcttgcatgcatttgattgggtttaggtttgccagcagcagcaatttaaacgaataaacaggatccctttctttctccaattttcgtgtgcgtattaattagcttgcatgcttgggccggcgatgtctgagctcgtgtgtggcggctgcttcaccatgctggtgcactcccgcagcgcaactaacgtacggtgccctcactgcggcaggctcggctcgacaagatcaggaaaccagatggggcacctgtcgtgcgggcaatgccggacaaccctggcatacccgccgggagcgacgacagtcgggtgcccgacatgccgcaacgtcaatccagttccaaccagggtacgtatggatgctcggccgcagcagacgatggttctggtggagaatcctaagacgctggatgaaaagggcaaactggtgagcagtgttgccgttggtgtcacctcgtggaaaagatgaccaacaactcacttcattccggctaatctcgtcatcatcgacaacgacgacagctaatgtaaaatcaagtgtgttttgaagcgcttgatgtttttcatataaggaaaaaaagaaaagaggcagagtagcagtagctgttgagcagcaaaagatctgaaaattgtaaatacattacatgctatagccacccgtgtgcgcctttgtgcccctggaattgtattcttgccctgccaaggtcagacacgctgagtcgactctgcactctagcgctttatctgcaaattcggattctccg

SEQ ID NO: 38263 - DNA, 426 bp, Zea Mays
cagcagtccaagcggcccaagactgctcacggacggagtcttagagtctcggcatccacctccaccaggcgctggcccagttttcgccatccaccaggcgtccttagaatatggtgcagggctaccgagcagcgagcaacaagctgccgagcacagggcgccgaccgtcgagcagcgagcaccgaggaccgccgagtagtcgagcaccgagcagctagcaccgagcagccgagcagcaagcagagggctgcgaccaccgagcagccgagccgcctcgtcttctctcgtcttctctagtaaattaaacaggcttggatgaattagttttttgatttagagttttggagagattatttgtacggatttgaaaagattacttgtatggaacgttgaaattattgtttggtgctaaaaaatattattgga

SEQ ID NO: 38264 - DNA, 2517 bp, Zea Mays
atgattctggcaaaaatgtgctgcaagtatttctaagtccaccaagtaaaaaagaacatagacttgcagcatacgttctgccctacatattctcaatcgcttcagtcagtcagtcttactagtagccagccattggcttcattttttagccaaagacaaacaggaggagggaggagggatggttctccttcgtccctggcacatcctcttcttcctcacatgcttctccccatcctttgttcatcctatggaaccaggcacctaccgttgctccaatgtttccatcccatatccttttggcgttgctgcatattggctagtgctagttctcagcagtgcataggaggggaggcgaactctagcgttaaccttgaggggaccgtcttcacattctcagacacaaggaacaagttcacagctctgggttgtaacgtggtggccatgcttttgaatggcagcacggggtatagcggtggctgtgcttccttttgctctagcggaaatagcatcatcgacggctcatgctctggtgtggcttgctgccaagcgcctgttcccaaagggctaaagaagctggacttagagttcagtaatattaatataaccaacagcggcatcgattacgggccatgtggtcaggccttcatcgtggagcagaattcatatgtgttttcacttcctgatctgaactacacagttgacacaaaacctcaataccgacatgttgtgctcgagtggtctgtgaacggcagcagctgtgaagaggcgaaactgtccggatcatacgcctgcgcagagaatgcctactgctacaactcatcaaacggaatcggttaccgctgcaattgctccagtggattcgaggggaacccatacctgcaagggccaaatggatgcacagatattaatgaatgcatcaccagaaatccgtgcaccaataggtgctcaaacacaataggtggtttccagtgcacgtgcccagcagggatgagcggcgacggcctcaaggaaggaagtggttgcaatggagtaagcacactagtgattgcaatagttgcaggattagctctgctagtgcttctcctcatccttggcttctggactcactggcttgttaagaagaggaaacttgcaaagacaaggcaaaggtacttcatgcaaaatggtggcctgatgctgaagcagcagatgttttctgaggaggcgccgctgcacatattcacctccagtgagcttgacaaggctaccagcaacttcagtgatgacaatattgtcggcagaggagggtttgggactgtgtacagaggcattctgtccaatcaagtggttgtggcgatcaagaaggcgcagcgagttgatcaaacccagacggaacaattcatcaacgagatgatcattctttcacaggcgaaccacaaaaacgtggtccagctattaggctgctgtctcgagactgaggttcccttattggtctatgagttcatcaccaacggggcccttttccaccatcttcacaatacgtcggtccccatgtcatgggagagccgtctaagcatcgcggttgagactgcgtcggcacttgcatacttgcacttagctgcaaagatgccaattattcacagagatgtcaagtcgtccaacatactcctagatgacaacttcactgccaaggtgtccgatttcggtgcctcaaggccaataccgcacaaccagacccatgtgacaacattggtgcaagggacactagggtacatggaccctgagtacttccagacaagccaactgactgagaagagtgatgtgtacagctttggcgtcgtactcatcgagctactgacaagaaagaagcctatcatggatgatatcgcggaagacattagaagcctagcgctgcaatttagtatgctattccatggaaataagctgttggaaatcgttgatcctgtagtagctgaagaagctggagtcagacatgttgaaacggtttcgaagttggcgttacgatgcttaaggttgaaaggggaagaacgcccaaggatgatagatgttgcgattgaacttgaagcactgagaaggctgatgaaacaacacttcatcttgaagaacgagtctttgcttcaggagtcatgttgcaatgaagaaatgagcatcgacgcaccatcaagtttgttccttggcgttgatggcatttctgacgatgaaggcatggagatcattccacttacatgtccatccaaaattctcacatcctatccctaactcgcaactatcacaaataaaaaggattttagctgacttctaccttctcaattgccaattccgtcttagtaatctcttcgtcttatgattagcttccaacgtaactacccggttaatggaatatgactgagttatttggcttatcgtcattcagctatgttctctttttgttcctcttgcagttcaaaaggcgatggtagtttcgctatgttggtatctctactgtatcgactgtcaacaaagaaatcaagacacata

SEQ ID NO: 38265 - DNA, 4274 bp, Zea Mays
gccaccaagtatataattgtacatcacgattcacaaaacccgcagcagggcaggggcaggctgctagttacagcctagacacggcgcggcgagtgcaggttggcagctagcgacgacgacctcgccggccgacgacatgggtaaaggcgggccgcggccggccgaggccaagaaatcggcgccggcgctgcggtcgcttgcgtcggtgttcatgcacgcggacgtcgcggacgtggtgctcatggtgctgggcctggtgggcgccatgggcgacggcatgtccacgcccgtgatgctctttatcaccagccgcatcttcaacgacctcggcagcggaccgggcctcctccaggagttcagctccaagatcaacgagaacgcgcggaacctcgtcttcttggcgctcggcaactggctcatggcgttcctagaggggtactgctgggcgcgcacggcggagcggcaggcgtcgcggatgcgggagcggtacctgcgggcggtgctccggcaggacgtggagtacttcgacctcaaggtggggtcgacgtcggaggtgatcaccagcgtctccaacgacagcctggtggtgcaggacgtgctgagcgagaaggtgcccaacttcgtgatgaactgctccatgttcctgggcagctacgccgtcgggttcgcgctgctgtggcacctcacgctggtggcgctgccgtccgtgctgctgctcatcatcccgggcttcatgtacggccgcatcctcatcggcctcgcgcgccggatcagggagcagtacacgcggccgggcgccatcgccgagcaggccgtctcgtccgtgcgcaccgtgtactcgttcgtggccgagcgcagcaccatggcgcagttctccgccgcgctccaggagtcggcgaggctcggcgtcaagcaggggctcgccaagggcgtcgccatcggcagcaacggcatcaccttcgccatctgggcgttcaacgtctggtacggcagccgcctcgtcatgtaccacggctaccagggcggcaccgtcttcgccgtctccgctgccattgtcgtcggtggcttagctctggggtccggtctgtccaacgtcaagtacttctccgaggcgagctcggcggcggagagggtccaggaggtgatcctgcgggtgcccaagatcgactcggagagcagtgccggcgacgagctggccaacgtcgccggcgaggtggaattcaagaacgtggagttctgctacccgtcgcggccggagaccccaattttcgtgagcttcaacctgcgcgtgccggcggggcgcacggtggcgctggtgggcggcagcgggtcggggaagtcgacggtgatcgcgctgctggagcgcttctacgacccgtcggccggggaggtgaccctggacggcgtggacatccggcggctgcggctcaagtggctgcgcgcgcagatggggctcgtgagccaggagccggcgctgttcgcgacgtccatcagggagaacatcctgttcggcaaggaggacgccacgggggaggagatcgtcgcggcggcgaaggcggccaacgcccataacttcatctcccagttgccgcagggctacgacactcaggtgggtgagcgtggtgtccaaatgtctggaggacagaagcagaggattgctattgccagagctatccttaagtcacccaagattctcctgcttgatgaagccacaagtgcattggacacagagtcagagcgtgttgtgcaagaggcacttgacctggcttctgttggcaggacaaccattgtcattgcacatcggctctccacaatccggaatgctgacatgattgctgtgatgcaatacggtgaggtcaaggagctgggatcccacgatgacctcattgacaatgagaatgggctctacacatctcttgtccgccttcagcagaccagagattcaagggaggccaatcaggttggtggaactgtaagtacatctgctgtggggcaatctagcagccacagcatgagcaggaggttctctgcagctagcaggtcaagctcaggacggtcaatgggtgacgcagaaaatgataatattgccgagaagccaaagcctcccatcccatcattcaggaggttactgatgcttaatgcaccagaatggaagcaggctctgatgggaagtttcagtgcaattgtgtttggaggcatacaacctgcatatgcatatgccatgggcagcatgatctcaatctacttcttggcagaccatgatgagatcaaggacaaaacaaggacctacgcactcatctttgttgctcttgcagtgctctcattcttgatcaatattgggcaacattacaacttcggtgccatgggggaatacctcacaaagagagtgagagaacagatgcttgcaaaaatcctcacttttgagattgggtggtttgaccgtgatgagaactccagtggtgccatatgctcacaacttgccaaggatgccaacgtggtgaggtctcttgtgggtgatcgaatggctctagtgatccagacagtttctgcagttctcatagcctgcactatgggtctggtgatcgcttggcgtttggcccttgtcatgatagcagtgcaaccccttatcattgtttgcttttatgctcgccgtgtcttactgaagagcatgtccaagaaatcaatacaggcacaatctgaaagtagcaagctagcagctgaggctgtctccaatctccgcaccatcactgctttctcatctcaggaccgtatcctacgcctctttgaccaagcacaagatgggccacgcaaggaaagcatccgacagtcatggtttgcaggactgggccttggcacctccatgagcctcatgacatgcacatgggccctagatttctggtatggtggcaagctcatggctgagcgtcacataactgcaaaggcactcttccagaccttcatgatactagtaagcacagggcgtgtgattgcagatgcaggtagcatgacaacagaccttgctaagggtgctgatgcagtagcttcagtattcgctgttcttgacagggaaaccgaaattgaccctgataaccctgaggggtacaaaccagagaagctaaaaggtgaggttgacatcaaaggagttgactttgcatacccatcaaggccagatgtgattatattcaaaggtttctccttgagcatccaaccaggcaagtcaacagcccttgttgggcaaagtggttctggtaagtcgactatcataggtcttatagagaggttctacgacccacttaggggggtagtgaagatcgatggcaaagacatcaaaacatacaatctcagagccctgcgtcgacatattggattagtcagccaagaaccaacactatttgcaggtacaataagagaaaatattgtgtatggtacagaaacagcaaccgaagcagaaattgagaatgctgcaaggtctgcgaatgcacatgacttcattagcaacctcaaggatggatatgacacatggtgtggtgagaggggtgtgcagctctcaggaggccaaaaacaacgcattgcaattgcccgtgccatcctgaagaaccctgcaatcctgctactggatgaagctacaagtgcactggacagccagtcagagaaggtggtacaagaggcattggaccgagtgatggttggcaggacaagcattgtggtggcacacaggctcagcacaatccagaactgtgaccagatcactgtgcttgaaaaaggaattgttgtggagaagggcacacatgcatcccttatggctaagggtccctctggaacatactttggattggtcagtttgcaacaaggaggcaaccagcactgagtttttttgcatgagaacacagcagtacttacaaatttgttgctccaatcaaatgatgtattactttggatcaatctgcaaaagatatctagcctattccaactagcttgggactgtaagctttgttgttgttgatgatgaaaacgcgagatggcccagcaggcgattgaaatttctgtgacagtggggtgtttttcttccctttgttctattagcactgtagcacacataagtctgacgagcatatagtttcttgatataactgttggacatgtattgtagttgtgcaacggccaggaaatctctgataatatgtacattaggtattatttcatcttattctctactgacttttgtactcgaaattattacattagcttttattttatctaattcttttgcgaat

SEQ ID NO: 38266 - DNA, 1357 bp, Zea Mays
gccacacgctcgctgcgcctgcgtgcgtgtgctcgcctcccaccctccccgcactagctctgcactttccctggcagtcgtcccttgttcctgacttcctgcctgagcgcatccggccaccttctatccgcccgccagtccccgccggcctccgcggatcatctgcctgggatcaagatccgtcgaggccgaggcacccgcgcgccaaagatcgtttcttgatctaaatttgggtggtcgtagggatcaaagctcggttctctgcggtgcagttgagagggcaccaatattcttggcatggtggctgacacggaaagctcagattcactgcctggcagttcaaatgctgcttctgagatgcctgctaatggatcttgatcgacaaaacactggaaaggctacagtgctaggtgatgctgcgcgagtactgcgagatctaatcactcaagtggaatctctcaggcaggaacaatctgctcttgtatcggagcgccaatatgtcagttccgagaagaatgagctgcaagaggagaacagttcgctcaagtcccaaatatcggaactacaaaccgagctctgcgcaaggatgaggagcagcagcctgagccaaaccagcatcgggatgtcggatccggcaactcaccagcagatgcagatgtggagcagcattccccacttaagctccgtggccatggcggcgcgcccagcaagtgcagcgtccccgttgcacggccaggagggctactctgctgacgccggtcaagcgggctacgcgccgcagccgcaacctcgggagctgcagctctttccggggtcatcggcatcgtcttcaccggagcgtgaacgttcttcccggctcggaagcggccaggccacgccgccgagcctgacagattccttgccgggtcagctctgcctgagcctcctacagccatctcaggaagcaagcggcggcggcggcggcggcgtcatgtcgcgcagcagagaggaacggcgggacgggtagccaactgacagacaacgcacttgaatcggggtgtgtggcggcggcgattgtcctgtaaataccaagaattccgtccctttactggctcgttcatccagaactaatgctggtagctgccctgtgttgagcggcagctctgcttgttctagaagcttctgagaacatgtgtgggctatgttttccatgagattgtaagatgtgaggtggagccgctagaacacttagcgtgcgttttactgacagtgtggagtgctgctccttagttggaatagaaaaatgcaatttgatggctgtgctgctgtcttgatctgttatcttcctgctcctggtgaaagttacccagcacatgta

SEQ ID NO: 38267 - DNA, 1582 bp, Zea Mays
gttttttttactgtttttgctaacaatgaggtattacatttatgaaaaaaatatgttaatgctttggatcatgagtggtattaaaatttttctgcaggcaagttttgagatgtcccatcaacaagccttagcacaagtaacagcacaagcagtccattctcagtacaatatgatcaatcatgcagattacactatctctttttcgtcgacgacaacaccagctttggtcacagcacagcatgccaatttttctggcaatttgacatcagcacaggagaaaccagctctgccgtcacatacaggcaatagcaacattgaatcaaatgaggtttcacaaggactcaaaacttctgcacccacttttgataaacctgctgacgatggatacaactggcggaagtatggccagaaggcagttaagggtggcgagtatccaaggagttactacaaatgtacccacacgagttgtgcagttaagaaaaaagtggagcgctcagcagaaggacacatcacccaaataatttatagaggtcagcacaaccaccagcgcccaccaaaaaggaggtccaaagatggtggtggtcaactaaatgaagcagatgatttccatgagaatgaagacacttctactagatcagaacctggctctcaagatcactctggaaaacatgaggggtcaaatgatggcataccagggccttcagtgtcaagaaggggagaggtatatgagcaattgtcaggctcaagtgatagtgaggaggaacgagatgatgaacaaagggctggcaatggatgtcctggctatacaaatgcaaacagaagacatgtgccaactccagctcaaaggataattgtgcaaacaaatagtgaggttgatcttctggatgatggttatcgatggcgcaagtatggacagaaagtggtaaaggggaatccccacccgaggagttactacaaatgcacgtatcaagggtgcgatgtgaagaagcatattgaaagatcatcccaagacccaaatgccatcataacaacgtacgaagggaagcacagccatgatgttccagcagccaggaacagtagccatgccgctgccaatgccaatgggtcatgttccaccagcgtagcacacagggtccagagttcagcatccagtagtcgcagaatggcagacttacaaaacacatcctcagcttcttctatgcacctaaaagaggaagatgaaataacgtaaaattttagagtgcgtagcagggtaaatcatttctgttctctcactcatttccagtagcagtgagcaagcagtcattggttgtagcaagggcgagctcttctgtttgtgcccttccaaaagccagcgcaccctgctggctgcgtggcgtatattatgttgtcattaaggccattggttgtaaatgccaacagtcgttcccctggagaactatagtagatgacaactttcacctgcccaagtgtatatactcgattaaaaacctgtaaatgagacatggtttgtagatacacggcttccttcctgttcttcgtaaatgttatttctacaggatatataaaggtacagttgctg

SEQ ID NO: 38268 - DNA, 587 bp, Zea Mays
ttgacgcccaccatctctcatctcatcacgccggccaccccagagaaaacgcatgcatgcatgtgtccgttagctgggcatgttagttggtgcaacacgaactacgggtgcgcaacttgacgcagagtacgtacactacgtaccccactctctctctctccctgtgtgtgtgtactttcgactttggagcaaggaggagagagggccggggactcgaaaacaagcatgctgcagatccggtcgtcgcgttgcggcatgtacgttaatggagagcagaggtgtgacactgatcgctggccggcgggggaccgcatgaattgaaacgcgttgcattggcatcggcgttggccctccgaccggccggcctgactccgatccgacgcactgcaacgcaaagcgtggcaaacgtacagcagcacatgcatgcgcgcctcggtcaccctccttggttctgattcgccataactggaacgcgcagtgccggtacggtcacgccgcgctgttcctcgggctgggaacgggcaatagcaatggcaatggcaatggcgcgcgcatgcatgccaagcaaggccggctcgctgtggtcg

SEQ ID NO: 38269 - DNA, 3111 bp, Zea Mays
cgcaggcagtcgctctcgcgcggcggctctccccgcctcgttcgcccctaccgcgccatcaacgtgcctccccgccgcccctgtcctccccatgcccgccgctcccacccgagatggttagcgcccctcctccttccggtcccttcccctgcctcggccggccagccatggattcaccaagcgggctctggtggcggccggcgccgtcgtcgtgtcctccattcccgtcaaccccctcgatgtcgccaagatatgtttaccagacgaattgatatctaggctatttatgtggttactaattttgactcctctaagacatatttacacagggttggtcgttatgggagatatgggcaccttggtttggcagtgaacttgaccacttacaaagattgtttcaacttatatagtattgataaaaaaaacttggaacggaaattaagacaatacccccacaaattgacctgtttgtatactgccaatgatgatagcgacagcttcatgagctggaggaggaggagaggcccatgtcggtggagctggaacccatcgccagcgagcagcagcttaactaggtccttggagaggcgtagcagctccagctcctcatcgtcctgctctggtaaccccactttcctagatcggtttgtgcctgtagggtgttcttgttaaagtttgcttgtaatgtctgtgagattgcaatcatggtcgtgtatgattgcggtgttcacagattttgtttgcttgttcctagatagtcatttatgtggtgcaaatttagcatcttggatgaagtgaaaatggacaattttgttcatttgttattaggttctggcacttggacttggtatttagtaactgagaatttacttatttagtagttatacagcccgtgtcattgtcgttgggcgaatgaatttcatcgtcagtctattgcatgaatgataaatgcatgtcggtggccttttgccgaatctaccattttgtttgttcctcatctccattcctatctgcttgtttattggtagtagaagtagaactgctatttatggctgaggcctgagggaaaaaataatcaaatgttcaaccaacttcatttttttcttgagtgcatgggttgcagcctttggctagcttatgatctcgtgtggtctatttaccatataaataaatagcagcattagttcaatttgatgttcatagttctctctctctaaagagtcatatgttagattcatgggaaatacttgaactatacatttttttaatgtatcagatgtgtgaattatcatgtccggatcaatttcaaccaaccaacagttcctttagcaaatttgtcaggcatatttatgcacttgttcgcataactgagactatattatttttataagactaaggtcagactattgatggtttggtttgggtggcaccttgttcttcgttccttgccatttccatgccatccttttattatatacatacatttatttggagataaaatttgatgtcaagagaaacttgtctttctttcactctccaactcatcttcgtagtttgattctcatgggaggaccctgtttccatcatgctgcatctttttatctgataaagtgatatttcttagagcatcaaggttcgacaaccaacatattctcgtgtgaggaaatggaaaagtgatgtcttgaggacattttttatcttttgatgttgataattgttcatattattatggttcaacaactcctagcaccaagtcattctgtatgatctgttaacttgatagaagttaacatcatttgattttaagaaatgtaatcatatttcctgattgctcagaattgacttgttcatcatttttcaatgtccctaattggtattagatttttgtgatcttgtgtcatattctgtgatcaacaatgtacaatttgttgaataggctgttgttgaaaaagctgtatattatgctcttgtatggatcaataggctgttggctgtcggtcatgacatcgccatcaagacagataggaaagttatattttttcctaactatatatgctcttacctattcctgttctccatagtacaaaagatgatattgattttgtggctggtttcatttgttggaatgctcttcaactttcttacgctcatttacattggtgagttctctgtccatgttaattttaagtgagtatgtaactatatgctctcatacgctttagggatccgctacgagcagcctacacatttatcatctgttcccatgcttatttttccttttttttattagtgatgggaatcgtatatccataaatagatctggagactggagcagtttttgttgggataaactttgtactggaccggagcatcttatctctggatgtgagtgccatgaaagtgatacccaacaaacaactaactctggaacacctttggtatgtcgggtaggcgcaaagccagcaagacaacaactgcttgagcagctttggccagttttgcttgccaccatgaatagccatatgttggccatcacatggtaccttgttcgtcccaaactagaccagagcattacaagcaatgactgccatatctaaaattgaaaacatcttttctctgcggtaaattgctggcttaaatgcatgctgcttgaaccctataatcagatagaccatcccgaatgcaagtcaaggcctgatagtggtctttctgcaattacagagctggaccctggttatataacagcaggatcagtaagagttaatggcccagtgacggattcaaggtatcctgctcaccaacagatcccacaagcatacggttaccgccaaatgcctgcaaggttggacagtaccaacccatcacaggccatgggaggttacacgctgcagtcacagaaggaaacattatttgaagagttgccattttgaagagttactcgaatccaatattttgctcttttgaattccttggtgtacactggcaaatattagcatatttgaagagttgccatttcgatcatcatcttcatttgtactttttgggtcagatctaataaagcatcagcattaaatttacaatgatcacctaaatccatggtttttattgcct

SEQ ID NO: 38270 - DNA, 524 bp, Zea Mays
cgagggttgtgcgcaggggctgcactaggcacatttagcagctgagcgctggccgcgttcgccatgccagagccgagccacacaggtggacacgaacagccgtgccacgagctacacagggaggggagggagaagaaggaggagagagctcacctcggcggccgacggggacacgacacggcggtgctcggcgaaatgggtgagggagcgcgacgaggctctagcccacggcacgggctgcaatggcgtgtggatgacaagggagccacaggggcgcgggctgggaggctcgcctaggcaccggcgggctccggtgagacggctctggcgaggccacagcggggctcaaaagcgcaggggcagagcggctagccaccacgcccggggacacgccggagctccggtgtggccgtacgacggggaaacagcccggccatgattgcacgacggttttggtgaggttctagcggtgggcacggcaaaggcgagagagacaatttgggaagaaaaacagggactctggc

SEQ ID NO: 38271 - DNA, 5278 bp, Zea Mays
tataacaccaccgagcactatcatggagtcatcgctggcttggcctctctgttcttcttcctcccccaaccccgctgctctccattctagccgagttgttgctcttcttccaccgacctcgctgctcacctccgcagcattgtctagatccccaccgtcgctggccttcttcgaggcccagatccccattgtaggccccttgcttcttctcctcaaccggagcttccaaaactcccttgcagagcttgtagaggttatggaaggtatgggtgtgccttcaccaccgacagttgggactccgtcggcctcgccctgccgcattacgtcccccgttgatgataccaatgcgtcgcttggccaagaaccagagtgcgcattgacatatatcagacaggacgatcctgacacattcattatctcggcatcaaatcgattgggattcaattgaagtagaagaaaggtggaatgaggaaggaagacaggatgttactagtgaacgaggattgtatattcaactcggtttgcataatgaagatgagagggtatttaagcaaagggaagatgattcaagtgctcattgtgctggaaataatagggaagaatttcacgatgaagcttcaactgccatgccttgttctgattttgtattagatgggacaaggactatctatgatatgaacaatcctgtaatggagcctggtagcttgtacgcatcaatggagcagtttagacttgcaattagacagtacgccataaataaagaatttgagttgggcattgaggctaccaacaagactagattcagagggtactgtaaagggcctgattgtccttggagcattcatgcgaggtctgagatgaaaggatcacccactattcaagttattgtcttaaacgatgagcacacatgtacatcgagcgggagacgcaagacaacgacaccaacaggtgcttgggttgcggcaagggctcttccactacttatgaaaaaaccacatatgggtgctaaggagttacaaagtatgttgcaagatacatttggatgcactattacatatgatacaatttggcatgggaaagagaaagctctgaagcaattgtttgggagttgggaagagagtttccaacttctatggtcttggagagaagcagttatacagaagtcaccggatagtattatcgagttggatgttaaaatggatgagggccggccattttttagcagatttttttgtgcacttggtccttgcattactggtttcaaagagggatgtagaccttatcttagtgttgactcaactgctcttaatggaagatggaatggtcacctgtgttgtgccataggggttgatggacagaattggatgtaccctgttgcttatggattctttgaggcagaaacaacagaaaactggacatggttctttcagcagttgcgcaaggctgtgggagatcttcctctactagcattgtgttcagatgcttgcaaaggtctaaaaaatgccatgaacactgttttccctcaagctgaaaaaagggagtgtttcagacacctaatgcagaactacgtgaagcaatttgttggatccgagtacatgtatcctgcagctagagcatataggagggaggtgttcgaccattacttttccaatgtccaagaaattcccaaggtgtctagttggttatatgagcatcatgatagtttgtggtatcgtagtgggtttaatccagccatcaagtgcgactatgttaccaacaacatagcagaagtgttcaacaattggattaaggattggaaagatctgcctgtctgtgacttggctgacaagataaggaaggaaatcatggagttgtttcataggaggagggaaataggacagaggttgcaaggtcgaatactaccctccgtggtccatatcctccatgtaaggactagaggtttaggtcacttaacagttaagaaagctgacaattacattgcggaggtgagggataataataatgtgcactctaagcacattgtgaatgctcaattgagacaatgttcatgcaacgagtggcagcatacggggaagccatgtcaccatgcccttcgcttaataacaacacaacaatttagagatgttcggatggaagattttgtggatgactactactcagttgataagttcatgaaggcttactcgagggtagtggagccaattggtgacaaatctttctggcctacagtgccatttgcaaaagaggtgtgtgcttctattgggaagcgtggagttggccgtcaaaggaaaaacatgattaaagggtgcctagagggaggaagtggtaagaagccaaacgaaaatgaaaatgtcaaaactaagaagatgattcgtgggaagttcaagtgtccaaactgtggtgaattgggacacaggaaagccagctacaaatgtcctttgaatggaacaaaaaaacggaaaaggagagcaaggaaaaatgttactaaaggttggttcccaaaagatgttgaggcatgatgatggtgcatgcactagccacacaaccacccccatgtgatgattgtgatgccagtattgcgaaaatctctccactttcatctcccagacctatctagaggctagtgctggaccagtgtaccctaggagctgggtgccaggtgcggtggcgggcggggcctagcaaagcatgacgctgtaggagggatccagtcatccgatacgtcagcactccggcacagcagtaggcatctcggaagctggcagggccacagggcaccacgcccaaggcttagccgcgcaggcactgagcagccaagtagtcaggcagtcagtgagcagcagcagacggcagcaaggctggaagcgcgaagtacctatataggcatataagtttagttcgaccgggagtttacttctctgttatctgtgacttgcccgaccccgacttgatgtgcattgtagattatcagaaattgattaatgatttaatcacagattttaatcaactcaacacgtcgagaagaatatttttgtgctcatagttttttagttcaagcaatgttaatactagtggtacttccctgagttcatatcaatgcttagtcttgggctcctcagaaatgcaaattctttctttggcttgcaattagaaacaagtgttggactgctgataatctggagaagaggggttgcagcacccaagcagctgccctttgtgtgaccaagaaagggaaacgatacaacacatcatcactacctgtgtttttgcccggcaattctggtttcttatctttgacactcgggatgagtcacctcgctcttagggctgatgagcggtcgtttgaggactggtggaggaaggccagcaacagtacaaggataagagaaaagggatcaactgtgtcattattttgggggcttggtgcctctggctgcatagaaatagaacgttttttatgggaatcatccattcagagggtgcagcaacatttcagtgacgagttctcctgttggctcttggtgcgcgccaggagtttgggtcagcttggtctccctagttccatgagtaatatcggatctaatccttttactcctctataacctttttgcttttcttttgtttcttttttctgttttagctatggatgtaagtcatgttttctctctctctaatataaagatgtgcagctctcctgcgcgttctagaaaaaatgaatgtaaaatttgatcttcaattgtttattggcccattataaaattgtacaaagcttctccaaatatgccaattgatccattacaattgtttcataactactgtttatggattttgggactgcagaactgatggattctaacagatgtaacagacctacagtagggatgctaggccaaggagttaaaatatatccacatgttagaatatttcgtaactgtagtaacttcaacattatatagattaatcatgaacttttagttgtattaaacaaataagctctgtatgttcattgttgtagaactaagtttattgtgaatttgtgaacacatatatttgttcatgaaactgcattggatttggactaacaaagtttgtgtatgtgatatgtttttagtctggatctgcccttggtcaagattcaaatatggcttctgcagggttggctcgggtgggtgagtggtgcgactcgtcctctcatgaggctcgtcaccttgagcaacatgccgatcctgcagcagctgcacctggaggagcagctcctgcgccgcacatcggacaactggtgtgtcatcaacgatggcatggcccctgctaccattctcatgggaaggaagattcaatcatgtattggtctccttgtgccccatgttgagttgctaatttggttttgcgtgatggcaggactgcaggagagtctcggagcttgtcgacatacagccggtcctctgggaccaagtgccgattgtgaggaggttcagtggaggtggcacgtcattgttgattggggaacggtggttgtgactttcatttgcaacaagaatgccgttgccgggctgcagatttatggcaaaaaatttgacagatttggtgaatttcatctgcgtgagaatgactatgcatttagtcactcgaaagtttggcggaaatgctcaatcaataacaaaaaatcgttgggttcatcacacgtcgttcttgtgggattatgatgtaaaaaatatggattatctcaaaatcccaaagcgtgcacctgaatatcgactggcaagaaaccacagatttcttgtgccgcatgaaggagtacataccttcgcggtcagttttcaccgatgaggtcactgcggccctgggagaacacttctcagttcagcccgtggatctacaagcagttctttccggtgatgaaggatccgtgccttctacaaagctgctgtcacaacaggacctagaaagaaattgtttcgtccaaagaatcccttaacaatatagaaagttgaagcgtgaccatgcttgtcgtttttgttgtgaaatatgagcagttttgtcgagctgtgaattcattcaaacattatggtcaacccagtacgtacatacgaatgcccaccaccatctttagtaacaaatggttatgttttggattgtaggtctaccgttccaagcttgggttacacgttatttgcctatgggctctagaccgagtgctaaaactatgagagactggctccaacatactctgtaaatggttatgtactctaaattataaagaaattttttgtcttcttat

SEQ ID NO: 38272 - DNA, 493 bp, Zea Mays
cccggcccggccgcgggcggctgcgctcacactccactcccctgaccctgcgcgcacaagcaacagcagcccgatggtcgcaccgtcctccgccgccacagcctgcttcgtctccccgctcccaccgcctcgccgcccgcgtcatttcctcaggcacctcgcgcgcgccgccgtcgccgagcccacgcccgcgcctgcctccgcctcctcgctcgcccacccgtcgccatggccgtgggcgcagcggctctgcgacctggtccccaccgaggccgtgggccggctgctgtcgtcggtcgtgggctccctcatcgtcgcgctcgccttcgcgtcgctcatcctcggtgacaccgacgcggcctccgcgttcgtggtatccacgccgcggaagctacaggcggacgagcttgccaccgtgcgcctcttccaagagaacacaccctccgtcgtctacatcaccaacctcgccgtcagggtcacacttgctgatcag

SEQ ID NO: 38273 - DNA, 1260 bp, Zea Mays
attatccttaggtcgaccaaatccttagaatgctcctgttcttatccagttgaggtctagaagcttactcatcacgccggagcagcagtagcagtcgagctcggcatcagctcccttgctgctcactttgcagcacctcgccagctccctggtaacactctgcacctgccgtcgaactctctcagagctcccaaaataaagagtgaagatttaagatgaagtggttgttgaagaggagtttactccagtgcctgttcatcaagtggatggagccatctaactgatcatcgtgttagaagtatctagaacctcttctctgcaacaaagctgttcacgatactgtggatccagtaaagattgtacagtcatcctccattataatagtgtccaaggcaaaatgaagttggtatgtgcaccagatgtcataatgaaatagctactgtggggaaaaaggactacctggtgaaattcgacaagaagatcattggcaactaagtatctttcaactgacaaagcagctatgcatccagatccagctgcagtaatagcttgtctccattcatgatcctgcagtttccttcttaagacatcaagaaatgatatgtgataacaaaaacatgacatgatggtgccaatggagcttcggaatataagatatattgcaaaccatgaacaagttccatacagaaggtgaatgatggagttacctgaacatcaccagcagcgaatacaccatcaactgaagttttggctgagccctctttaactaaaatatagccagcactatcaagttcgatttggccctgcaacagctgactgtttggagtatgtcctatgccataaaataaacctttcacagtaagaactgattcttctcctgtatctcttctcttcagatgaacgccagacatctgccctttgtcattgctaacaacatccatggcttctgtattgaaatgtactgttatgttggggttgttgagtactctgaaacattcgccataatcaacctgttaaccaaacatccagcgaattggaagtttacctcattaatatttcaagtgactgaagaggagctcacgtccttcaaagaacataataatttaatctacagataagttcccaaaattgatgatctgcaggatctatgaaaactcaactaatactatgatttttagtatttaaattggcaaacagctaacactaactaacatagttaccataattactagctcacatccaacaaactgtagcttattg

SEQ ID NO: 38274 - DNA, 308 bp, Zea Mays
aagacatgatgcggactttctttccggactacccctcctatcctccatcatatcctcctcctggagggtattgagtcatgtgctctctttctctctctcctccttttttggtcattgctgtcaaaaagggggagaaaatctaaaatctatggtcaagtcggttttattttggttctttaattcttctttattgttttgtttttggccactattgtggcttgtatcttttttatgaatggatgtaataaaacagctggcatattattcactatgttatgatggtcctccggccatcatcttttgcccta

SEQ ID NO: 38275 - DNA, 1546 bp, Zea Mays
gtgacggctcccgtcgagacttcagccgctagcgcggccgtcagggatcatactgatcaaggatctcaaggggaacacatcctaccagagagctatcccatctgctctgaccacgaggagtgcattgcccgtcctgagaggatcaagatccagaaaggtttcgtggccaaggaatccgtgaaggggcacatggcgagttccaacttcacaccactcggcaatctttctgtacaggactaggagatgctgttaatgtcgtgaaaggcttgaagatatatgaagatgtttttacaacatcggagatcatgaaggttgcagatttcatcaatgaaattcgtcaggctggcagaaatggagaactttcaggtgagactttcatattcttcaacaagcagatgaaaggaaacaagagggagatcatacagcttggtgtcccgttatttcaacctaccacagaggaagctaattgtcacacagaaccaatcccccttgtcctgcaggctgtcattgaccaccttgttctttggcgtttaataccagaaagcaggaaaccaaacagtgtcatcatcaacttcttcgatgaggatgaacattcgcagccctacttcaagcctccccatctggacaaccccatttgcactcttctgctgtctgaaactacgatggcatttggcaggtcacttgtcactgacagcaacggcaactacaagggacctctcacactctcactaaagcaagggtccctattggtgatgcgtgggaacagtgccgacatggcgcgccacgtggtgtgcacgtcgtccaaccggcgcgtgagcatcacgtttgcaagggtgaggccatcgacgccggtggatctgagcccactcccgtcccccaccaaggccttgacgccctggcagccgcagccagccacggcctcccaggtgccggcgcccgcgtgcatgacgcagaagcccccggtcagcggcgccatcatcggttatgccccgaccccgcagaccgtgctggcgcccgcggcctggggcatggccatgcgagcgcccgtcatgatggtggccgcagcgcctgcgaggcccatggtgatggcctcgttgggcaccggaggcggcaacatcagcaagtggatgagccgcagcggcaccggtgtgttcctgccgtggacggtcgggccgaagcggtacaacaagcaccttccgccgcgcatccagaagcgccggttctctgcgatgatgtcgcccatcgaggcgcagggctgaggacctgcccgacttcacgtcgccgtcgaacctgtgttttttttttttccttgagggctttcggtccgcctgtaatttagccgggtttgtgacttgtgacaatgtgagtgagtagcggtttagcggagttcagaaccggtagaggagtacgagcgtagggataggtgaaggcagaatcagggcagggttttccttttgttttcatcctgtccccctattttccgttccgagtaaaacttatggatgttgttgtcatacatgcatcagcagctgagtttggattcccc

SEQ ID NO: 38276 - DNA, 3541 bp, Zea Mays
ggagagatgaggaagcccaggctgagtgtcggcggcggcggcggcctcctccatggctttccctcccccgtgctgctgttcttgctgctgctgctgctgagttcttggagggtggctgcccaggcgcagcaggcgcctcagactgatccggtggaagcggcggcggtgaacgcgatcctgagcaagctgaggctgagcgcgccgccgtcgtggaacatcagcgggaacccctgcagcggcgccgcgacggacgacacgtccatcgacgacaaccctgcgttcaacccggccatcaagtgcgactgttccgaccaaaacaacacgctctgccatgtcactagactgaagataaacacactggacgcagttggccccatacctgaggagctgcggaacctcactcacctcgttaaactgaccgtgggcatcaatgcactatctggacctgtcccaaaggagcttggaaatcttaccaatctcttatcactggcattgggctcaaataattttaacggcacacttcctgatgagctggggaaactgacaaaacttcgacaaatgtgggcatcagacaataatttcagtgggcagattcctgattatcttgggagtttgactaacttgacccaactgaggctccaagggaactcttttcaaggtcccattcccacaagtctttctaatcttgtcaacttaaaaaaattggacctgagtttcaacaatatcacaggacaaatacctcaatcaattttgaatcttacatctcttagttatttagatttttcatacaaccatatctcaggaaactttccttcttgggctactgacaaaaatttacaattgaaaacatactgcttagttattgcacacaaaacctgccgattcaatataacagtaatagctaattttccctatatgttctactttgatactaaggaatttggtagcaaacgactttgtgatggatagctccaataacagtgttttgccatggggattggagtgtcttcagcatagtactccctgtttcctcggttctccaaagtctgcgtcctttgcggtggactgtggtggtagtagagcaatatcaggttcagataattctgtctatcaagctgataatgccaaccttagtgctgcatcgtactatgttgcgggtgcacctacatgggccgttagcagcgttgggttattcttggacgcagatgcacccaatgcaagttacatcatctacagttcacgccagttcgagaacaccctagactctgcactgttccaaacagcaaggatgtcgccatcatccctgagatactatggcattggacttgagaatggaaattacacggtcacacttcaatttgcagaggttgactttccagacatgcagtcttggagaagctgagggaggagggttttcgatatctatgtccagggagagcgcaaggagcagaactttgacattagaaaggcagctggagggaaatctttcactgctgttaagaagcagtatgttgttccagtaaccaaaaacttccttgagattcatctcttctgggctggcaagggcacttgttgcattccttataagggatactatggtcctgcaatatcagccctgagtgcaactccaaatttcgttcctacagtccgtagttctgaagacagcaagagcagccataaaactggtgtgatcgctggggttgcagttggtgtttcagtttttgcattgatcgcactggccggaatcttcttgtggtgtcagaaaaggagaaagctattgttagagctagaagaattgtataccatagttggaaggccaaatgtcttcagttacagtgagcttaggtcagctacagagaacttttgttctagtaacctacttggtgaaggaggatatggatcagtttacaagggtaagttgagtgatggaaaagtggtggcagtgaagcagctctctcagtcctctaaccagggaaagatgcagtttgcggcagaaatcgaaaccatttcccgagtgcagcaccgtaacctcgtgaggttgtatggctgctgccttgagagcaaaacaccattgttggtctacgagtacctggagaatggaagcctcgatcatgctttgtttggaaaggggagcttgaatctagactggccaacacgattcgagatatgtttgggcgtagcaagaggtatagcttatctccacgaggagtcaaccatccgcattgtgcacagggacataaaggccagtaacgtgttgatcgacgccgatcttaacccgaagatctccgatttcggccttgccaagctctacgacgacaagaagactcacgtcatcacaaatgttgctggcacgtttggttatctcgcgcctgagtacgctatgagagggcatatgactgagaaggttgatgtgttcgcgtttggcgtggtcgcgctggagattgtcgctggtgaatcaaactatcagaatgctctggacgaaggcacgacctatatctttgaaagggtgtgggaactgtacgagaacgggcggccgctggagttcgtggacccgaagctgacggagtacgacgcgtacgaggtgctgcgggtgatccgcgtggcgctccactgcacccagggctcgccccacaagcggccgtccatgtcgagggtggtcgccatgctcaacggggacgccgacgcggccgaggacgttgcgaagccgagctacatcacggagtggcaggtgatggcggccgacgtcagcggcagcttcgcgagcagccacgtcgggtcgtcgtcgacgcagacgcagccaacgtcttcgtccggcggccacggcggcgcccaggcgagccctgagcccggggacctgacgcccgcggtcccgtcgccgctctacacctccatcatcgaggagggcaggtgacagctagcttgcctcggaatcgcgaatgcctggcagtggcatgcatgcttgcctcggaatcgcgaatgcgttgctgtgctctccagttttgtggctaatacaatactgatgtcgggtcgccatggttgatgttgttgtgaggaatttacttgaatgtgaggccgcaagcagcagatttgatttgggaggcacactgaaatggcagccgacgcagattttgggatggcgtgcgcgtccctgtcaagaatgggatggcgtgtgcgccggcgccaggcctgcctcgccttgcttgccggcggcagcgtgacacgtctggagggtggagaccccgacgaacgttccaagggatgtttctcctgaattcggcatgcatcacctggctggtagatggtcacgtctccccctcctatgatttaagtgtgtgaaacgtggtatatatatgcattagttgtgcaatgtgttgcagacatccacatacaagtcttcccacatattttgattttgttattatatactccctccgttataaatatagtagaaagtaaaacaaatttaaatttgagacagaaagtatgttttatttttcgttgaacgcttaaaataattaagcaccactttaattaagtcgga

SEQ ID NO: 38277 - DNA, 2229 bp, Zea Mays
cccttcctctccagggaaggaggccagaatcccccgtcgacgcgcacgcgccgtcgcgcagagctccgcgtccgcatcggccaccgcccacccgcgccggccgccggcggcgtggatggggaagctcgccgccctgaagcgggaagcggtcggggtggactaggtgctcggcgaattcctagtttagactttagaagcagtaggtggaggtgatgcggggcggagcgatgaaggctctgcggcgatccagcacctcctcgccgccgtcttccccgcattttcattcgtggatccaccgccggtacctcctcgttacctcgtcggcgacgtcctctttgtctgcatcggcgaattcggccgcggagggttcggattcagcgtcagtggtggcagcttcctcgtcgccctcgttggatccttcgtctccgaacatggaccgcgaacgggaagtttcgtgatgggggaagaaagtttctaaagaaggttcgcagtgggggaattgagccaggcataagggctgaagtttggccatttctgcttggagtctatgatttgaacagctctgaggaggacaggaataccatcaagataaagaaaaggaaagaatatgaaaaattgaggcgacagtgccaccatgttctgcattgcaatagaggaaatggtctgaatgttataaatgagttcctgaatgaggacttctctgatggggctgaaggttcagagtcaccatattccaatggtgctagtaagagggcttgtgtgatgcccagagaattgaaatctttaggcagtaaggcagaagagtcagagagttctaactgggatgttgtggaatccatagatgaagatacaagtgagttaacttctgttgatccatgcatgatagaatcagaatcttctgaatctgagtcttcatatgaagaggaccctgatagaacacctgtctctaccaatatggaagagagctgtgatcccaaacctagatttgtccggactgcttcagcaaagtcagacatttttctttcagacagaactcctgaggattttaccacatggcagcgcattatacgtgtagatgctattcgagcaaatacagaatgggttctatttgcccgtaaccaggctgaagtctctaaagagaaagcactgcagtctgcaatatctgttggattgaaagattttgaccatttggagccttacatgatttatcatgcggcacgattagttgcactgcttgaggcatatgcagtctatgatccagagatcgggtactgtcaaggaatgagcgatctcttgtcaccaatagttgcagtcatggaggaagatcatgaagcattttggtgctttgtgggtttcatgaggaaagccagacacaacttcagacttgatgaggttggaataagaagacagctgaaaaccgtctcgcagatcatcaagcttaaagattcacagctctacaggcacctgcagcaacttcaggccgaagactgcttctttctgtaccgaatggtggtggttctcttcaggagggagctcacttttgagcagactatgtgtctgtgggaggttatgtgggccgaccaggccgcgattcgagctgggattggaaggtccacttgggcaaggataaggcttcacgcccctccaacagacgacttgctgctctacgctatcgcagcctgtgtcctgcagaggaggaagctgataatcgagaagtacagtagcatggatgagatactgcgggagtgtaatagcatggccgggcagctagatgtctggaagctcctagatgatgcacaccacttggttgtcgaccttcatcacagaatctgatgcgacggcttccctcagttatgtttggtagagtatgcagacatgaaccacttttccgaggtgtatttagtaatctgttgtgtactgttcatcacccggaattatgggcatatatctagagaaccgtgtggcttcaagtgaggacgaagttatctccacttcggttaagctgataaaccattggatagcacaatggtttatgcaagccatccatagtttaacttgatgtaaaatttcgtttttttgcttccagtatctgtcctaggcgaaaacatcattttccatcaagccttttatagcaaaatttaaagttcccagattttggggtgtaatgcggagtaatatatgatggattcaaagtctttgctgcgtcattgcacacaccaagttcttcca

SEQ ID NO: 38278 - DNA, 1063 bp, Zea Mays
cacccatcttgccccagtgccaagaggtcagaaaatgtttggtgttgctgggagccctgcatatgtggcacctgaagttctttctggaagctattcggagaaggttgatatatggggtgccggtgtgctactacatcagcaccccatgggaatcaatatcagttcttggacgggatcttattgggcgaatgctaaatcgagatgtctcttgcagaatgactgctgatgaagttcttagtaggtcacccatgggtcgtattttacacagaatgccccctgaaggtggtagctgctaatttgtgtctccctaacaaggttatagcacccaaaattccatgggacagacacaaatcagaatgtgactcagtgtcagacgcaagccaaaggtcagaggatcaggatgagtgtggcatagttgacgcattggcggcagcaataacacgtgttagaatatcagagccaaagagaagtcggctctgtagccccgcaattaccattcagcaggaatgctcgtcaaacttgaagaataatctttgcacggctttctgacctgacctagtttatagcacctgatcggaatggcgtccattcttctcgctgagaaggtcgttctgatttaggtgttgtagaggcgaggataataactcagcttttccagccagcaacaaacgtctggtatttagtgtttctttcagtgttcctgatgaaccccgcagttgtagctgctgtaaaattctgtaaatagcatggtcctttctcaagctgcgcctgggttgctaatttgtgccaccaaaaccgtttcacgcaatgttcataattcatgatcgagttgtgcaagacctgtcttaattctgatgcttgtcacccgaaactatatttggcacacgtatcatgaatagcttggtaccaccgatacccatgtgctacccgttctaaactgtggtaatggatatcattcaaatgtttcttcacaatttatttgagttcttaattaattttagtttaaaaatataatttgtttgagtttataattaattttaattcaaaaatatatagaaatata

SEQ ID NO: 38279 - DNA, 3577 bp, Zea Mays
ctgcgcggtgtatactgcttccacttcacacgcttcctccacgccacctcgatctgtgcggcggcaaacccagagatccttgccccgtccgccggcgaaaggcgctcacctcccctcttcgctgtctgcgatgcagaggatactatcgagggccgctcgccggtgcacgaactcctcggcggcgttcaactcacctcacgcgcaggccaatgcagcaagtgttcactctgaagacgccccaacttgttcaaacaagaacgatgattttacatggaagactagttttgttagacccatgcaatcagaagtcgtcaatgccctccgtagaggtgaccggcagcgagcatcattgattctttcgaactttcatcacactaaggaatcactgaccaaggaagatttttcttatatattggagtattgtgcagaggcacctgatcctttgtttgttatggaaactttggaactcatggaggagaaggccattggcatgagtaaaagtatctacagatatgtcattagagctctgagcagagggggatatgcgaaggaggcacttcactggctggctcttctaggggagaaagaaagcactcatgccactacaccgatttttaatatctttctaaatgcctgtggtagagcaaatctgaaggacgccgaaaactgtctagagatactggaaaatctttttcttgggaagtctgaaataacatactgtgagcttttgaagcttgcagtgttacagggaaatttgcctgcagcttatgatatctggaaggagtgctctaggtattatagcccaagcattgtcacgcaaaggagatttataagggctttaactgcgctaggtgaccttcaatctgcgtatcacatattgcagcatatggtagcccttgctgcacaaagctgtgactatctgagggtgtcttctaaaagaagataccgatcatcgagactagacattcctgtacctgctttgaatgaatttgaagatctcaacctgccatcatgccaagggaagctggctaccggcgaacatttggttgatgctcaacctgagctatttgatgagaaaactcggccaggcaacaatctttcttataaggttgtagtagatgcgagtgttgcaaatacattgaagtctgcaccaagcacagtaaaacaaattttgagatgggcgttcaatgatgttttgcatgcatgtgtaccgttcaacaactgccagttagctgagcatttatttacagagatgcagaaacttggattgcaaccaacaagttatacatatgacggttttattaaaaccgtgatagctgggaaaggaattgcatatgccaacaaagtgattaacgccatggagagaaggggcattgaaccttacagtgatacacttgctgctctctcagagggtcatagcaatagtttacagttggatttggctgaggagtttttggaaagaatttcagagataaaaccaaagcatataggttcctttaatgctttgctttctggatgtgcgattatgaatgaaccagaaagagctgtccgcatactagctaaaatgaaacatgtgaacatgaagccaactctcaggacatatgaacttttgttttctctgtttggaaatgtaaatgttccttatgaacaaggagatgtgctctctcatgtcgatgtttccaaaaggataagtatcattgagatggacatgtttaacaatggaatccaacacagctttgtgtccatgaagaacttgatacgagcttttggagctgaggggatgatagaggaaatgctgaggtacctgaatatagcagaaaatactctgtggaacataaatcctcatcagaagagtgatctctacagcactgcgttgcatgctctggttgatgtgaaggaaactcacagagcagtaaagatgttcaaaatcatgagatcatgcagtcttccaactaatatttcaatttataataccatgatagagtgctgcaaatggctgccatgcttcaaatcagctagtgctttgctgtctttgatgcttcgagatggtttcaatcctacggttgtgacttttacatcactcctgaaggttgtattagaaaatgataattttgaaggggctctggatctgcttgatatatgcaagattgaaggacttcagcctggcatacagactttcaacacagtactcttacgtgcatatgctagaggtcaaattcatgtccttgaatatattttggagtgtatacatcgatcaaaaatccaacctgatccatcaacactttggtacacgttttgtgcctacgaggagcatgaactgtacaatactgcaattgagtcattgctagtcctcagcatgagaatgatatctgaggatgccggcattcctagtgagaaaagaattgtttttgaagatctaatcctcagtgaagaacctgatgctgaattcaggatcataagggcattccaagcaggcgaagaattccttgcgacagctttactgaacctaagatggtgtgccacaatgggtgccaccgtatcttggtcaccggaggagagtctttgggcaatgaggctggcagcctcgtatgatgctaacaagagaccacatataaacccctcggatgctcccaaatcttggggaaggaatccacttaaccgcccgtattgggaggctaacgggtgattggttgattggttggctacgcttccgttgatcacgcttggcacgtgtttggatggctgcagagcatctctaccgcctgctcccatgcatgcagcgttgattttttcccccactgggtagcctgcatgcgcggaaactcaactccccgtctccccctcgtttccagcggcccaggctggcacgatgctggtgcgagacgcccctacaaccaatcatgcgttaactgaggcagagctggagtctagcgtttcaaatctctctgttgagtatgatgacaatgttgtgttctgttttgctggaagccagtagatgttttgtttacctaactaacatgattgcagtacgatcgggcggcctccctacctgtcgtgaagcttgttccgcatgattgctccaaattggcctcgtaccgttttcaggcttctaggccaacagctctatgttccgattctttacattacttgataggttgctcactttatttacccagttgtaatttctgattatactggctgtcgggagcattagctttgcaaaactgtaggaatatatatgacaacgacgaagatcgagtcgcatggcagtgacagaagaataagaggtgttacgattacaatagctggaaaccaaaacttgctctggttattttgaaggtgtttagattttggaatgacgatgttacaattacactttattctggcaaaggtagattgtagaaggatggatagtgatgcactgttaccgcgtggtactgggttggtctttgtttgttgtacatcagttgttttctggcaggtcgttttgttgacttcgtagctgcccgaataacagaccaattattccatctcagttagagatcatttgtctacggcactcgacattcccttggtt

SEQ ID NO: 38280 - DNA, 2209 bp, Zea Mays
gaaaaaaactgtccctgcctctgtactcgagtgggcgcagtgaataccctctctcggtccctccaaccgcgctcgtcttatcctcaactcgtcacccacttcccgccatctgccgtccctgcactgcgcttataccctgcaggcaacagcagcgatggcggcgagggtaccggcggccgatctcaaccagcacctctcctcgccgttcatcgcacggcgctgccacggcccaggtgaagccgccctcgaggcgcctctcagcgtacgcatcaaatccagaacgccgcggcgacgcgcggaatccacgaccacgaggatcctctgcaggggcgcagaggcgcagccgggctctggaggagggaggaggagggagccgctgcggcgcggggccgtcagcgcgcgcctcccggtgccggaccacatacgccggccgccctacgtcggcacggccgccgtcccggaggtgtgccccgaccggcaggtgcacgacggcgagagcatcatgcggatgctggacgcctgcgagctcgccgctcgggtgctgcaccatgccggggcgatggtcaagccctcggtgacgacggacgagatcgacagggctgtgcaccagatgatcgttgacgccggcgcctacccctcccctctcggatacggcgggttccccaagagcgtgtgcacgtcggtgaacgagtgcacctgccacggcatccccgactcacgcgagctacaggatggcgacattatcaacatcgacgttactgtctacttaaacggataccatggggacacctcgaggacgtacctgtgcggagaagtcgacgacgcaactaagcagctcgtgaaggtcactgaagagtgcatgatgcgcggcatatcagcctgcaggcacggcgccagtttcaaggaaatcggccagagaataagtgagcacgcggagaagtacggatacggcatcgaccccttcgtggggcacggcgttgggaggatgttccactgcgagcccatcatatggcatacctcctcctggacggcagcaatcacatcaccatctcggccggcggcagcgccaggttgaggtccagccgcaggcccacgggcggcgccgcgtcgaacactacagacgacgacgacgaggacagcgacgatgacccagagtagctctgctgctcctcgctcttgggcggcaagaagtgcagcagcgccggcgtcacggcggccgccgccgccgggtccgcgaacagctggtacggctctgcggccgccgccgcagccggcagcgccaggctgaggtccagcgacggggccgccagcggcagggagcacgacgacgccgacgccgacgccgacgacgactcgtacaccacggcgctcccgctcccgctcgccgctggagcctccgccaacgcctccgccgtcggctccggggcggggtagttggtggcggcgccgggcccgcggagcttgcgcgcggcggcgtcgtacgcccgcgccgcctgctccggcgtgtcgaaggtgcccagccacacgcgcgccttccgcaccgggtcgcggatctccgccgcgtaccggccccacggccgcttccgcacgccgcgcagcctcggctgctccgccgccgccgccgccgacactggtctcttgggcgccatggacggaccgaccagcaacacaactgcctctgccttgcttgctttctctcgctgctgcttgtctgccgaggagcttcggaggatggatggacgggtgggaatgggaatgccgctgccgctggcgaggcgcgggaatatatatacacagacgggacaggaccaagggagggcggcggacggtgacaggcagggtgaggtggagtgtgggaggaggagagcagacgcacggaaggtgaggtctgatctgtctgtggaccgggcttgggcgtacgtgggggcagtgggggcccggggcgccgcccccaaccaagcgcgtttcggcggccgtttcttcgtttcttgtgcgtcggcgcgtgaggcgcgtgagctaccgtgtctgctccgccgctggttcgctcggatccgtctcgtggctcacgtgggacgcgcccgcgtacttcgttgcccgcccacgcccagccgtcggatccgtgattgatgcttcatgatccgtgctgtgctgttgtctgaaaggttgaggtcgccgcaggttcgtctccaagtccagtggcggatattta

SEQ ID NO: 38281 - DNA, 2106 bp, Zea Mays
aggtgttagggtgtttcagtaagcaagaaatatattaccagctccttgtgtttatatccctgccttgacagtatggttgccgaccacggcgactcaaccgcaccagcgaggtccaaggccacatcctaccacacaccaccactactcattgtgtcatgttcctagttccaatcatccggttcccccaaccggtgacaacctggtatcagtcagctctgatttgatcagcatggactcccgaatctcttcgctgcaggacatggtacagaccatgtcaaaatctctggaagttgtttccaaatcagtggacaccatgaacacatcgctgaccaatgtcataggccgccagcgggacagcgataaccagcttcaagccttgaatctagcagtcacgcgattggaaaagacctctccatcctctggtctgcccgacaacaccagccataacaattgtaatgggcatagaggtggtggcggcggaggtggcagaggaggccgcaatgatggtgatggtggcggtggcagaggtggcggctaggggcatgatcatcaagatcaggaggaacatgctccaccacgctacctcaaactggattacccgaaattcgatggctcagaggatcctcttccatggttgaatcgctgagatcaattctttcatggacagggcacaccggaggagaagaaagtttggctcgcatcttaccacatgaccggcacagctcaattgtggtattatcgcctcaagatgatagcaggtgaaccatctttgcaacacttcgtccagcttgtcttgcatcgttttggtcctaccctgaccaagacaccactaagcgaactgaagctgctgtactgtacttttttcgaaaaacgcaggagaactgcgtctcattatattaaggagaaaagggtctaagaaggagctgctgcaccgtactggaagcatggatgaataccaggtggtgcctgatcaagatatccctccagtgggtgaagtgttggccttgacagtggatgacatgccagcaatatcattgcatgctcttatagggcatagctgtgcatggcattcaaacaatgaaggtgcatgttcacattatgggttgccgcctcacagcattgctggactcaggatcaacccacagtttcatcaatcacaaagtgggccaggagttgcaactgccattgcagcaatgctctagactgtgcgttgcattccagcaacagtgtcttctgcaatctgcatatagacattggaggtgaagcatttacagtggactgttttgctctggacctgggaggctacgacatgattttgggtgttcagtggctgggcacattgggccctatcttgttggatttccatcatcaaacattatatttttggcgggaaggctgccaagtcatctgaactgggtcacaaggggtgctagaacccatggatttcgcactgatgtcggtgaagacaggacctcataagcaatttactacaggagtttgagtgtctgtttgctgaaccttcgggtttaccaccacaacgggccatttgtcaccaaattcggttgaaaacagcaactgaagcggtggcagtttgaacatactccctccgttcttttttatttgtcgcattttagttcaaaaatgaactagcgggtgacaaatattcgagaacggaggtagtatcaatgacatgacaggctgcacaaattcttgaagttagctatggttatgtagttgtcacaaggatatgtcagtttttaatttaaaaagaaaaatatgcagatcttgtcacacaatggcaattccattctcttggaaactatgtcccctttaaaggtaaataatgttttattaagatcataaacaagaaaattggtgataaaccacctttttgcataaacaaaaaaacatcaaccaaaacttgaagtttggattgcattttttgtggaacttgtagagcagaaaaaagaataagtgtttgtggaaacttgttagccagcggggaaaaaacaaatgcttgtagcccttgtttggaaaccaaaatcaaattcccctccccttttatgttttttttttaaaaaaatcactttttaccaaatccagtaa

SEQ ID NO: 38282 - DNA, 1593 bp, Zea Mays
ccctctatcagatttttatctgccgcgccttctgattttttttccaccgtcggaggcatacgtcccctgccctcttcccatatcggtgctcatctcctgggttgaagccgccgcacagccttcatctccccgcccagcccctctctctggcgagcttgacccggcgtcgagctctggcggtcctcctccgctgccactcgttggaccttgcccctgctgcgccgtcgatagctcaccacaccctctcctccctggctcccgagcttcaaccatggagcttgtcccctctctgctcgtcggtgacctacgtcttctccagccaagccgcagccaagctcatctccatagccgacgcccctgccctcctgctcgccatggctggccatcggacgacgcacagcaacctcgccgtttctgagcccgaccccgccatggagctcacggcgcctactgctgctcagccttgggtgccgtcgctgagctcgccctgctccctggtgcttcctgctcgccgtctctggcgagctggctgtcctgcccgtcatggtggcgcgcgctccatctcccatggcgcccggccgcccctctttgctcatcttcgccgtcgggctgggatattccttggtgctacaactgggaggtgctcgccgagccctgtatcactggttaagcgtgcctgcccacaccgtcgtctttgatctctcgctccggtctccttgttcttcatcgcttgccaggtgttcggtaaaatgggtgaaccgaaaggagatcctcggattttgtggatgatgaagtaagatccatgtgacgttcgccaagtattcggtggattgctcgaactaggattcgttgtcgttttcgtgaattcgtgttgttttgatcatgtgtataagttatacaggtgccagaggttcacacttagcaaataaaaagacaaagtattgggttcaacaaaagagcaaagggacaaccgaaggcacctctggtctggcgcaccggactgtccggtgcatcaccggacagtgtccggtgcaccagaggactccaattcaaactcgtcaccttcgggaaaatccagaggcgctccgctataattcaccggactgtccggtgtacaccggacagtgtccggtgctccaaggaagagcggctctggaactcgccagcttcgggaattcgcaacggctagtccactataattcaccggacatgtccggtgtacaccggactatccggtgtgacatcgaagcaacggatacttcggcgccaacggctacctgcagtgcattgaatgcgcgctagcgcgcgcagaatgcaggcacgcccatactagcgcaccggacactctacggtacatgtctggtgcgccaccggacatccaggcgggcccagaagacagaggtctaacggtcggaacccgacggctttggtgacgtgactggcgcaccggacatgtccggtgtacaccggactgtccggtgcaccatacgacagacagccccaccaaacggctagtttggtgggggtgggtgtagaagggcgcacgggagagattatcatagtttccttttttttttttttttttgagctttt

SEQ ID NO: 38283 - DNA, 979 bp, Zea Mays
ataaaacaactgactgctgtactgctgttcaaattcagcaagtctgaaatgattgtttggagtttcttttgtgtccaaattcagcaagtatgaaatgattacttcgagtttcttttgtgtaggtaactagatttagttatttcttgtcttgattaatgaagtattgtagttggatatggttgtttattttctttcttaatacttgctttagacttgaataaattaagaaggcgataaacacttttgtgaatgtaaatgaattgtgattatttaggtttgtgtaagtatagtgaaataagtaatacgaagtaaaattgaattagtccttcgtgagtgatgtttggtagtgtactctagccatgaagttcaggtttatgtgcagccttataattgtttgacaatcggtttaggtccttttaacttgcagatcatgtttgtgtagaatcataggtatgtaagggtttcacctaggagttgtaatgtcttaccttaagtgttttatcgtctttggtgtgaattatctgtctcatgctattcatgctcatatgcattatgcatatcatataggtacgataattgatcacgtaatgtggaggacaaaggatggattaatctcaaggtgatgctgatgaataaacctgaagaatggatgatctgatgaagtactaggatgggagatgctcaccaagtggtcgtcatttaacaacactaacgtagtgttatcccaggcaagccccggtgcatttgccaccttccttgtgtttacaaaatctttatcacttatatgctgcattaggttataggagttgattgattaaacccttgatgcattaccatccttgaaaggttgattaccacaccttgtcacctgttttataaaagctagagatgcttagtcatgctgatagactaagaaaaatgttttttatctatgactcatgttttttacaaaaaagaaaataggctagggataatgaag

SEQ ID NO: 38284 - DNA, 5598 bp, Zea Mays
tgaacctccaaggatacaagccaccagtctccctcgcatcgcgtcgtcaccagcctatgctcgatgctcccatagtcccatctcgtgatccttccgctcctatcaaagttcgaggtttctcagaacttgcactcccgattccgcgccggcgtccaaagccccaccgaatggtccaccacaccgtctgaatcatcacatatggggaggaagaaatcgagaccggttcgagctgcgggcgccgcctttgcggcggctgaggccgacccctgtgcgccgagccctagcggcagcacgaagcgtaggaccaagggcgaggcgaggagagacgtctgcgtggaggtggataggagcacgtggggtcacgccgacatcgagcaccgcgacgtcgccgaggtggtcctccgcgacgtgagcgtctacggcgacggggatggggaaggtgcgttggaggaggcattcggggcgtcgacgttctcgttgcgtctgcgggtgcgcgacgcgccggaggaggggttcaggatgggccagtggcccgttgtagagtcggattgcgtgctcctggagtatgtcgtccacgggggccgtgaagggaagcacgcagaatatgtggtctcaggatgttttgatggtcctgatgaaggtgtatcgggtctcgtccatttggtgagcttgagattcatcacgctccgggtccaatcgttcagagcatttcagcatatgggtgaggtgagagttgagtcgtttagggttagagtggaggtgatggaacaggctttcagtgcgtgcggttcgctgctggaggtggctagacatccatggaggaagagtttgatgaatgtgattgcttggctgcgtcctgaggtcacgacatcagctgcgatatatgggttggataaccttggtgtgccaatggatgatggtggtaatgctgatttggtacctaagagtgattcacagtttgatcttgctgctttttatgaggccattaagccttcggctaatgcaggacagttggaaagggaccttcctgatttaattcctcagctcagaccatatcaacttcgcgcagcgcattggatggttcaacgtgaaaacggaaatacgctccatcaagaatacgctaattctgcaccatattgtgttccttttgattttgttcacaagaattccaggatgttctacaatccgttcaacggaaatatttcatcgcaaccagagccttctccaccttacatctctgggggcattttggctgatgaaatgggcttggggaaaactgtcgagcttttagcgtgcatttttgctcatcgtagaccaatttcattagacttttctgtcttccagaacaaaaccgaaatggatcaaattaagaggcagaaagtagaaagggttgagtgcatctgtggtgctgcgagtgaaagttctgcatacacgggtctatgggtccaatgtgacatttgtgatgcttggcaacatgctgattgtgttggttactcacccaagaggaatatactttttgctgataccactgaagatgtagtatcaacaaacaaaaaaagcaccatgaagtctggatttagaaggaaaaagaaacccaggtgttctattgttgagacagaagacaaatacatttgtgcactgtgcttggagcttattgaagcaactcaaactaatatactcagccatgctacattgatagtatgtcccgcaccaatattggcacaatggcactctgaaattacccgacacacaaggccaggatctctgaaagtttgcatttatgaaggtgcaaggaacttggatccttctaccatccaaaaaaatgatatgactgaaataattactgctgatgttgtcttgacaacatatgatgtcttgaaagaagatctatcacatgattttgatcgtcatgatggcgatcgccgtttcttgagatttcaaaagagatatcccgtcattccaactgtcctgacaaggatccactggtggcgactttgtttggatgaagctcagatggtagagtcaggcaggacttctgtgactgagatggcattgaggctaaatgctcaacaccgttggtgtatcacaggaaccccgatacaacgcaagcttgatgatctctttgggcttctacgttttcttaggacaaacccatttgacacatatagatggtgggtggacattattagagatccatatgagagggggaacaaagtagcaatgaattatgcacacaatttctttagggaaatcatgtggcgttcctccaaaattcatgtctcggctgaactgcagctgcctccacaagaagagtgtttttcatggctcatcttttcttccattgaagagtatttctataagaagcaacatgccacctgcatggaccatgcacatcaaattattagaagtttgagaaatgacaccaatagaagagaatcaatttctgattcaaatgctttgctaaatgtttacctctccaatgacgacattgccaagctcctagtcccactgctgaaacttcggcaggcatgttgccacccacaagtggggagttctggtctctgctccctgcagcataaccctttgtcaatggatgaaattttacaggttcttattggtaaagcaaaaattgaaggagaggaagagctcaggaaaattgtagttgccctgaatggtcttgctggattagctgttattgaacaaaggaaccaagaagccatttctttatacaaagaagcactagcattggctcatgaaaatattaatgatttccgtgttgaccctctgttgaatcttcatatcaactacaatcttgcagaactgcttagaattagttctgagtatttacaagaatgcccattaaaaaatccggcttttgaagttgcaatcagccgaaaaagaaaggaaatagatactgttgagacaaatgtacttagtgtaaaacgaaataaaatatgtgaaaacagtgttttgagtttgacagctaatgggctagaaatatctgaagataaaaacactattggacaaacatgcatgactagagatgtggatgtggagaatgtcactgggtgccactcatcatttgaatgttttgctgatgactgcttgaggaagacttgcaatacaatcacagaaaaatacctgtcaacttttacttcaaggctggtagtagcgcagaaggattttaatgcatcattcacagaggtcttgaatatcactaaagagctacagagtgagtatatgaattggtggctgtatgctttggactgcattgaagagaacaacatttctgctgacgatctgatcaagaagattgataattcttctagtaagagcaccactggtttgggttcatggggaatatcttccaggtctgcagcaaacttgttttaatattctccatgggttaaaagtattgctggcttaaaatatgcaattcaagctgatattgattctctacaaagttcgaggcaacatcttatggatagacttctggaagttgacaaaacaatggctaacccaagggatgaggacattgagggccagcgatattgtccaaactgctatgatggcactggttctctatgtatccagtgtgagctagatgaactctttcagaggtatgaatcacgcctgtttcttgttaagaaatcgaacaatggttctgtcattgattcagtagaagaagcacatgatctactgaggcgaaaatatgagctcaatcacttcttccgtaatagaaaatccaaggagggacctgaacctgactatgacaataacaaccctaggtcagctcgagaaaacatacaggtctataggcatccttctagaaccgagactgcattaagggttatctggaatcactcaaagacagtattgggaaagcaatattccacaatggctaaaaaacatttacttctttttgaggctatgcgcaaggaatttcctcaagcaaggtttctgtcaattgctcaaacacaattattgcgtgctcatgatgagatcaagatgtccatctcaagacttcagctcaaagagaaagaggatgatcctagcgctgccaatattgtaactagagaggaactcataccatataatgttcagtttacaagtgaaaaattcatgtcactctcatctttagcccgtgtaagaggtcaactccggtacttaaaggttgtctttacatgacagaacaaactgcagcacaattcggaaagcgtaaacaatggattatgtgccccacatgccgccagcgaacagatattgagaacattgcttttgtagttgagaaaccttgggacaaacatgaaaagagcattgaagatttggctgaaagcactatttctgtccaaggttcatatggaacaaagtttgaagctgtcacaagaagaatcttgagaatcacttcaactgatggaacagctaaagttcttgttttctcaagttggaatgatgtactggacgtactagagcactcccttgctgctaacaacatttcatatgttcggatgaaaggaggaagaaaatcacaggcagcactctcccaattcaagggtcaggagagcaatataaatgtagataaagtgaacagggcagcctgcaaaatgcagcctgttcaagtacttctgatgcttatacagcatggagcaaacggtcttaatctactagaggcacagcatgttattctagtggagccattactaaatcctgctgctgaggcacaagctatcagcaggatccatagagttggacaagacaaaagcacatttgttcaccgttttatagtgaagaaaacaatagaagagagcatctacaaattgaacaggagcagagctgtctgctctactataaaccgtaaatccaaaaacttcaaagatgagcctgttttgacgctgaaggatgtggagtcgctattcccgatggcaggacctgatgaacccctagaacaggcagatcaaaattacggcgatagcttgaggagtttgcctccatctgttgccgctgggttagctgctgaaagaaggcgactaatggagcaataagttaatggagtttgcctccatctgttgccgctgggttagctgctgaaagaaggcgactaatcaagggacctccatccatcgttgtggcagttgtgctaattttacttgatcagaatttctcttcgcagcacagtaacgacagtaggagaatgatgctccttagttatgaagcacccccatcatgagaatcaggctatttacgttgtaactttaggattttttttttatgtacctgtaggccttttagactcttgtacataagcttctagttttagttcgtttatacggcccatcctgtagttttgatgtagcagctctcagctctgccactgctacaccaacttatggcatgtataagtgtactaatacatggtcatcagcatgatacattctttagatgcttggtcaattttttagatgcttggtggtggcagagccagtagtcattatggaagaaaattgtcggttgtcctatgctgtctgcagatgtgccggatggtcagtcaggaagatgcagcaaggctttctgatagcttctgcatccgggcccctgctg

SEQ ID NO: 38285 - DNA, 2358 bp, Zea Mays
atggagtcggccaatgaagagcggaaggaggagagggtcaacgggggctcaatagctggttggtgtagatgttgctggtttgagaatagtggcggcaagatctcatggagagaagctatgcggactcccagaaaaggcgaaatcatcgtgcgattgtggagattgtcgatgggaggctccaccagcgctagggtgcggccaacaagacgctgctcgccaccgcttgagtcggtagtgagatcttagggggagaagccctgcagcccccatgctcccactccctcctgcaccccacgcttaccggcgagccgctcgacctcattggagcttgccaagccgtcatgtgccccagtgcggtggtcgacatcatccacggcgtcgaccgcgtgctggtcctgcgctcaatgcaggagtccttcaactggcggcggtggagcaaccgtactaccacagcgcgtacacaggacgcagagaacaactccagaaggcgagccccaacccctagatctgcgatgcagtcttctcaactgaaaaaagagggcagagaacaactccagaaggcgagccccaaccccagatctgcgttgtagtcttctcgactgaaaaaagagggcatctctaccgccaccaaccactagcaggcggcagacgttgctggcaataggcaatggcatgcatcaggcattgtttgcacaaaggacggagatctgtcgtcgaagaccacctcattgtttctcatggcaggcttgcttgctctagcttggcacaatatgtcgcttcaggcttcagtcggttatgtgatcaccagaacattatgggctctaaagtaggacttttgagaaatgccaggcgatggtgcatgcatgatgaagctgttgtccattatattgacatgattgatcagaccacgcttggtcaccggatgatcaagaaacaattcaacaagactccaagagctggctggcaaatcgatccttttggacattctgcagttcaagcttatttgcttggagcagaggtaactactattaacatcatatttgggatgaagccatttttttaccaaaaccagtatgataagctcctacatttttctaaacagaaaatacaattctcataattatcatttttcagtctggcattgtaggcacatgatatactaattaaagttactaaatgaatattatatttgtacggtggatgcaaatgttaagccttagtgattttcctgtgtttaattctcaatacattttttttcttgacaatcaacatgcgactgtgcaaaacatatgaatataacattttttattgcaaactgtagcttggcttcgattctttgcattttgcaagaatcgattaccaagataagaaaaagtgtaaagctggcaaaggcttagaggttatatagtgtggctcaagaacttttggttcatcttcacaggttcttattcttcttacaccacaattagttctgtctattccattcattagcacaatggatcgaattttgatttttttgaagggaatttgactctgtggtggttaaattgcatatatttacaaatgtatttcctgtcgattatagccctccagatggctttggctttgaagttttagatgaaaatatcttgcatgtctaggtacatgtacgcaaccatttccatgctcctcgaaccttacatgcatcttagattgaaatttgtaggatgacatactgatgtttgactataatgttgaagaacgagttaatgattttgttgttgtagccatagaacaggtaaactttcaatattgttgccacaggctgtagttcactagagcaattaattatgcttcgttcaaagtaagaaattggatttaattaacttgtgatgatcaggcaaattttacgcgtacaaaccacataatgtggaccatgggagatgattttagttatcagtatgcagaatcttggttccggaatatggacaaacttatctatcatgtgaacaaggatggccaagtgcatgcactgtattctaccccatccatttacacagatgcaaaacatttgtcaaatgtatcttggccagtaaaatatgatgagtatttcccctatgctgattcaaaaaattcatattggactgggtactatacaagccgtccaactttcaagcgatatgttcgagtgttgagtggttattacctggctgcacgtcaaatagaatttttagtaggtaggaggagttccttagggttgttcacgaccagcttggaagacccaatggcaattgcccagcatcatgatgcagtctcaggtacaacaaacaacacacgacagatgactacttgaaacaccttgctcttggagcatctaag

SEQ ID NO: 38286 - DNA, 550 bp, Zea Mays
gtcgtcgttcgtcgttgcgtcgttcacagtcaagtcctcgaacccgtcatcccctgctcgaccctcacctcaccagctcgctccagacttcaatcgaaggtcgtcgtcgatccgtgcgtcatcaaggaatcccaagcgtcgggtgaagacaaagctagcaagcgtagtgttcaccaagtgcgcgacaaaaagctcgaacatcctgcgcggctcaagttcgactcgtcagaattattcaatcgagaaaaagatcttcaacaattgattaccaaagaaaagaagccccctagatggcgtcaatcgaaaccgtcgtcgtgcttgcgactatcgcgtcgaattagtcagggtaagttgattcgtatttccgttaactaggtctataaatagagtaaatagaattattggtttcaataaatgctattaatttagcatgcgtatattgtgatgatcgatttagataaatcggtaaaacaagtaattaagatacacagttttaaagagttaataacaagctaggaataaaaatagattttctagtgttattatgtta

SEQ ID NO: 38287 - DNA, 3381 bp, Zea Mays
gccattttcctcttgttcccaaaccgatagctttgactcacaacagcaaagctgaataacagatcactcccgtctcccatccccttcctctcctagcaatcctctgccggagtccaagctccaatcagatccggacccacccctccccctccgaagaagccctaggcatgccccgcagccgatgaggtcgctccgccgggtcctcatcccgctcgtcctcctcgcaggactcgtcttccgcgtggacgacggcggcggcgcgttcctcccgcccccgccccccgcgctccccgctcccccgccccgcctcgcacttaacggagaagcggctccggaggatgatggggcggcggtttcccgctccacggagatcgtcgcggcggaggcgcgctccaccgagttcgtcgccccagcgaggcccaagaagcagagcttccgggagctccttgtccggccgcagcctgcgcgccacgagccggctagtttggttaccgacgaggcgaaagccgaatccaggggctttcttggtcttatctccataataaaagcattttgggccatattcttgttttgtgttgatctggagcacggaaggaggagcctttgctgattaggtttcttataatgtggccactggttgggcatgatacttcctgtgctaccgagggctactcactcatgcttagcacattcttgggggttggggcatctggaagtggcataccagttatgcaccttatggtttgttggtatttctgatcgaatgacttttggttctctttgtcaacagctctgtgcttcagttttgggataatggcacaattcagcttgtggacaaactgtcgcaatctcctctgtgggagatcaccacagggcctccactatcagaccagattaataccgctgagtctggtctgaattacctcatttatcctttcaatgagaacaagaacatgaatggtactgaactttgggaggtttataatgggaacaccgtgaggctcccatggaaattggaggaattcgttgccagaagcccatacattcgggattctgttgttactattggatcaaaagtttcaaccgtttttgttgttgattctgatagtggtgagattatttacaggcacagtattccagctgtgttaaatgaattggaaggaccagggattgaaggaacaccatccaagctaaatgcccgtactaattatgacagcgataatatcatggtgcttgtgagaaatgactattctcttagtgcatcagatcttggcaagcatttatttaactggacaagaacttctttctctgtgaaatacaaccaccctgacattccatgcatcagaagtgagggtttgccacttgctttacctgattcacgttcagctaatgtaattgtcttgaaagaaggtaccccttttatttccatccatggttctgatgccctggaaccagttcaaaccccaaggaagctaccaaacactgctgggaagtcagatatcgtattggatgattctcaaaatcaaacgtatgatggtgctcgatctcatgtcatctctgctgattctgaagctaccgaaacccccactaggaacacttatgcaatttgtgattcagcttattaagccattcacgcgcgacaagaaatcggtggacattagaggcaggtcagagggatctcctaaaagaagaaaaacacggaagaaggatggacttgtcaatagccctgagaccttgacagcatctgacaaggagtgcagtgaaactggtgggtcaactgaggcaccaatggaaaattctgcactaaaagatgcccttggtggtcgtcacattggtaaactatatgtctccaataaagaaattggtagagggagcaatggcacagttgtttttgaaggatcgtatgatggtcgtcaagttgctgttaaacgtctgctgcgttcccacaatgacatagctgaaaaggagactcagaatcttattatatctgatcatgatccaaatattgttagactatatggttgtgactatgacagcgattttgtttatatctcccttgagaggtgtcactgcagtttggctgatctaattcaaaaacactcatatctgtcttctggagagtctgtttctaacaatgaggccagtttcagcatcaagtcaaagatttcaaatgttaagggaatggatgtggaattgtggacacatgatgggcttccttcagcacaactcctgaagctgatgagagatgtggttgctggccttgtgcatctgcatgacttgggaattattcatcgtgatttgaagcctcaaaatgtcttaataagcgcaggaggacctattagagcaaagctttctgatatgggtatcagtaagcacctgcaagatgacatgacttctgttagccatcatggtacaggatttggaagctctggctggcgggcacctgaacagcttcgtcatggtcgtcaaactcgtgcaatggatctttttagtttgggctgccttattttctattgtatcactaaaggcaagcatccgtttggtgagtactatgaaagggatgtgaacattgcaaacaatcgctttgatctctttatggtggactacataccagaagcagtccatcttatatctcatttgttacaaccaaacccagaggcaagaccgacagcagtatatgtcatgcaccatccactcttttggagccctgaattgcgtctttcgtttctaagggataccagtgacagaattgagaaaaccagtgaaactgacctcataaacacactggaaagcataggatctttggcgtttggtggaaaatggggagagaaattggatgctgctttggttacagacatgggtcgttatagaaaatataactttgggtctattcgtgatcttctgaggtatatcagaaataaatcgggtcattacagagaactttcagatgatctcaagggcatacttgggtcactaccagaggggtttgatcgctattttgctagccgatttccaaagttgctaattgaggtgtacaaggtcttgtgggtgcactgcaaggacgaggaagctttcagtaaatatttcaaaggaagttagttatagctggagaggattgtcctttcctactgtacatactaaccctgatgtagaacaagtacatgtgtaccatatgactcgtattataggataaaaaagagctcaatctgtacattatgcaccggtatggtaggaccgtgtcatttgcacagcctaatgctctgatggcttggacattgtgcatcgtggaatcttcgtaatcgttgtgtgtttgatgaagtcttaacctagctagaggcctagagctctatcgcttgtcagcgaggttattttttgggggtt

SEQ ID NO: 38288 - DNA, 1900 bp, Zea Mays
atggccgttttgggtaaaagccactctgagcccggaccgagggagggcgtccacacacaccatgcccccgcctccgtgactgtcgcgctccctgcccctacgcaggtccgtgaccgtcgcgctcccacccccaatgcgcacgctacccccacccacctcccattccgctgccaggatcatgcagctctgcgccgccacgcccgagcgtactggggcgctggcgccgccgcgttcccgcagacgcccgagcggagcccgaggttcacgggcgacgcccgactggggcactgcgttcatgatgtcgccgagcgctacggctgcgccgaggacgccggagaggtggcccgcgctgcccgcactctggagtacgcgcctgcgccgaggcgagagcaggcgaggtggggcggcgaatctgaggcagaagcgcctgcgctttatgaatccggagccgaatcgctccgtccagcttgcctcctcaccgttgcttttgcgctctgcttttcacttgccttgcgtggatctgctcaacgcacgaaccaccgcctcgccgagaaggagatcgtcatcgtcctctcctctgcctccgcggtccccgtcgagagcagtgttgctgtcttcgactagcacaaggaagcaatgttgaggcggctaagcgatgctacaatggaacaatccaataacagtgattcgtctattgacgagaggtccatccagcctcgaaagaatatgaaccccctacctcaataaaggcaaagaccacaactccaaaaatcacattttcactgtcctaaatggactgatggcagcattcctttggatgtactttctgataaactcacaaaaataagcaaggtaagcaattgtagttttactttattggctcccagtcttcatttagtgatgctgactttaccagagtttctaatacaatttctaccaagtttcaggaagcttttgaacgaagagatttcatagcaactgttgtagctagcgccctgcaagaggcgttgatctctgtatctgtgatcaggaacatatataaattgatgttgcgattactaatccgatattaacaagattttttctaaaggcatcacaaacttgctatgttttgttctgaatgagtgaatatcatgtgcagctttaaagttaccatctatcttcatctcattttctttccaattataggtctgggatgcaactattgcagatccaaaattgcattatccttttgagctcaacctgtcatctatgatatgtattgtaactgatcatgtttttactacttcatgattcagatcgctgctagcaagaccaagatttacatggtgcttcagcttgtcaatgggggcgaactgttcgacgggattaaaacatacaagatgcaaatatggaggaacaacaatcttccttggtggatggtcttaaaactcccactactgtggctggtatgtccaatcatgagcatcaattggtagataaccatgtagttcaaaatatgatcaggtaaactttttctactgaagatcaagaatccacagccgtggagtgcttgtccaatcatgagtatcactcgcagactcttggatatgtaattggtggcactaacatgagaagcgacaccaaccatctcacagaagggatcaatatcttaattgtcacactggacaggcttttggaccatctgcaaaataccggtagtttcaaatacaaagagctaaagagtaccaaaaaggtcatgcccgacgacaagctcgctgagttcgcgctcctcgaccccaagccaccaagaggtgagcagagtgtgaaaatcactaggatctatgatgagaagtttgctgatttgggatggggaagaggcgaaaatgagattgaggatgtgtttatcattgttttgtag

SEQ ID NO: 38289 - DNA, 1420 bp, Zea Mays
ctttttcatagctaaacgaaatgcacctcagtggtctgtaggcaggcaggcaggcatcgacgtgcccacctcgttccgctctgacgtctgagatcgcgagatcgggaacccctgcccgtctgctccggaatctcgcccgcacgaaacttccccgacccatcgaccacaccagccccatcccctccgtcgctcccaagtcccaactgccgccacctctccgcgagccgacgccgacgcctacggtcaccaggacagagggacggctgctaccgcgggagtatgggggtggactactacaaggtgctgcaggtggggcgcggcgcctctgacgacgagctcaagaaggcttaccggaagctggccatgaagtggcacccggacaagaaccccagcaacaagaaagaagcggaggccaagttcaaacagatctcagaggcatatgaggtgctaagtgattcccaaaagcgggcaatctatgatcaggccgtgggtcttccttctatggagggaatgcatcgacattccagttcaaccctcgcagtgcagatgatatttttgctgagttttttgggttctcaagcccattctcaaccatgggtggcatgggcggaggtgctgagagaggcatgaggggctccaggtttgggatgttcggcgatgacatatttgggtcccaccctcagtttcctggtgaggcatcaatgcatgttccacagcggtctcagaaggttcctccaattgagaatcggttgccatgcaaccttgctgatttgtacaaaggtaccaccaagaaaatgaagatttcacgagaggttttagatgccagcgggagaactttggttgttgaggagatcttaacgatagatataaaacctggatggaagaaagggacaaaaataacatttcctgaaaagggtaatgaggctcctcatataattcctgcagatattgttttcataattgatgagaaaccccatgatgtattcacaagagatgtgcagataaataatatcatctaccctggctatgaggaggttgttccccgagagggaatgccgattcagaaggattcttcaaagaagggaaatcttaggatcaaatttagcattaaattcccctcgaggctgacctcggagcagaaagcagaaatcaagaggctactaggttcataaggagcatgcacaaccttttttttttctggtgacgcaatgctgtatccagtgtacattcagatgttaaatgtgaataccagcaaagtctcggtttccttaaactgtgccagttcctttggcatatggatgttttgagatgcaaagttgaattgtttcatttatcggggaataattctaaattctactagatacttctgtgtgattttgctgtgaggatgtccattatgcacctaacaaaagctttattt

SEQ ID NO: 38290 - DNA, 1052 bp, Zea Mays
accagcccgccgcgacgcgctcgcagcggcggcccgcggcttgccctgtgcggtagcatgcgtggccagcctgcgcggcagcctgcccggagcgcaactcggtgcggccttccgtggccctgcgcgccctagcgcagtgcctttgcccaggcgtgctcccctgccggtgtagccagcggcccccacccagtgcgacgtgcgcgtgtgcccgcccgtcgcaccttttcccgtcgggctcgtcctgccggagcatcgccatccccgtcgagcttgtcgtcgcgcttgcctcgtcatcgccgcgcactcgccgtctggagctcgccatcgccgttggctgaatacccgtcctcgttgtgcgacgtcccgaggtgagaatggaggatcgtctaccccctacgtgtccataaccccgccatcgcatccatcatttgttcgtgcgtcaaacatgttgcctatccgcgccatcgcgcgtgctacctcgcgcgtagcgtgctcatcgctctcgtgcgttgcacgtctcgtcgcgcttcactaaaccatcccacctagaatcgctcgtgctaattaacgacatattaaaatggtgattattcgagtaccaacacaatcaaagttaagtaatgattttattggtgcttacaacaattgcttgctattatggctaagtcaaatacaatatcataatcaatattcgcgtagcgtgttttaagtcagcgcgtgccattcgcgcgcatcgtgcgtgtcgttcacacgtgtcgacgcgcgttgtcgcatgtgccgtttcgcgcaccttgtttagcgggttgcgtgtcctgtcacgcggcaataaactatttcgtatagaatcactcacgttaattaatttacgtgattgaatgatgattaaccgagtgtttaaccaatcagaactaagtgttaattctatcgagacatgtgataaatacctgttatagcggttatgccagtttcagtgttgcatttaatatttgtttagtataaatacaacatagattagtagttttcgcatgtcacacgctatttgcgcatcgccg

SEQ ID NO: 38291 - DNA, 299 bp, Zea Mays
gctgagttggttaggtggtctgagtaacactcatgtcctgagttcgaatcccagtgggaccgaatttcaggctaaggttaaaaaagttcacgcattggttaccctggttgtatgcatatgagatagactgtccgatggggggcggatcctcgtgtaggggatgggagggatcgaaggacgagtaaagatctggccgaacggaccctcatactgcacgaggggcaactttcgtgacctttctcggtcggggttccgattgaactttttcttaatataaacccgtgggagcggtatttccc

SEQ ID NO: 38292 - DNA, 711 bp, Zea Mays
gacggcccactggctgtggctggctcacttcactcggcgctcggcggccgcacccaagtcccaaccgcactgcgccgcctcgatcaaagcaaacccccaggcccccaacccgcccagcgccctgcccccccgccgcagtgagtgagatgatcatcggaggggcagcgggcgccgggaacccgaggaggaggaggacgcaatgaaggcgcagccgctgctaccggcggcgctcaagaggcggaggggcccgcgcgtggcggtgcttgcgctcgtcctctgctccctgctcgtgcccttggccttcctcttcgaccgcgccccctccggaggtcgttctgccttcgttggatcacgtggagaagaggcgtcgcagtggcgctgacagtggagagcgacaggatgcgccggagaagatccccagaagtagtgcaggaacgattcatcaacgaacaccagagaagaacatctccaaaggcagtgctgcagtcattcatcaacaaacaccggagaagaacatctccaaaggcagtgctggagtcattcatcaacaaacaccagagaagaacatctccaaaggcagtgcaggagtcgttcgtcagcataagcaaattggtagcaacacgacaagggatgatgctaaaccaaaagtttttgcagcaccaaaagttgaaccatcagcggatgtgacggattctactaaagtcgcaagag

SEQ ID NO: 38293 - DNA, 1053 bp, Zea Mays
acctgtcaggttgttagtggggattaactttagaagaagggattaacttcctctggcccacacgtcagccaccacgtgcatcgtccggccggtgagggaccaccgcggcagctatcctcggcgccgcgctcacgattccggaatcactccccacgcgattcgatcctctcgccggcccaggcatcgtagaatccccccaccgaaaaaaatcaagcgggcatacaaagagcgcgtgcgcagtgcttggaataggtgggtcgaacttcgaaggggttcgaggacttcagctatggcatctgtgggacgtgcaggacgaggagggaaaggagatggagggaagggagaagggtcgctggctcgcagggcgtggaggcagtacctgctccagctccagcaacatcctctccgcacaaagatgatcacggcggggtgcctcgccggcgtcagtgactccgtggcgcagaagctctctgggttccagaagattgagaaacgcagactcctgctcaagatgctctttggttttgcgtatggtggcccatttggacatttcttgcacaaaattttggattacatcttccaagggaagaaggataccaaaaccatagcaaagaaggtgttgctggagcaagtgacatcttctccctggaataacatattgttcttgttctattatggatatgttgttgagaggaggcctttgaaggaggtgacgaccagggtgaagaaacaatacccttctgtgcaactcagcgcttggatgctccattcagacattggaccttgaaggattcagaacttcacactgggcgactggctgcaattcgccgtgcaggaccgcctgcaattcaaactggttgtcacagcagacaccacaagagacctaattaaaccagacaagttcataccaactttcgtgaaaaacattctaacttccttagcagtcaaaatatattatatctgatcaaaattatagaaactacaacagcataattaattatacttatttcatgttataaatgttattatttcatcatatgaatttggttaaac

SEQ ID NO: 38294 - DNA, 1199 bp, Zea Mays
cagaacttttcagtatcttaaataaatacatttttacttgttacagctgaacaagataattaaagaaataatcgctagtgtgtgcaaaagatcagaaaccaaaacgctcgaatccagcttgaatgtttggctccttttccccatgcatgacggtgtagcctccgctaatctctcggtgtatggttcgatcggaaggagtcgtagaagtggccagcagtcatggcagatccaaactacatgcgctccttatcgcttgccgccgtcgcacccccatgacgcgcgcgatcgaccttcacaccgtttcgtcctcccgctcccactcctgcacgtgcatccgccgttgatgttgtgccgcctctcatgccgttatattcaactcatcctcctctgccgacctcgcggagctggagacatcgtcagggctggaccatccgcaggcgcccgcccacttcaaccactacctggagcagtacgacggcaccaccaacctcctccgcgacacgctggacaacctcaaggcgaagatctacggcaaggccatggagcagctgaccaccatgatgggcacctccgagagctgtgagaacgcgtggaagggcaagcaggcgtcgccgacaacctcaagacaaagatctacgacaagaccatggagcagctccgatgaagatatatgataatgccatggagcagctgaccgccatgatcgacgcctctgagagcctctgagagcctctgagagctgcgagaacgcgtggaagggtgaggaggattcactttcgtatttcatcctggacgaaaggggagtatatataataataacggcgccattaaatccgtattcacggccccctgaaagccgcagatgctcctcatcccccgctaagtagataactacttgccacggataactactacttgtgatgactgcaggttgcgtagagcttgtgatgactgtaggatgcagaactgctgtggttgttgccttgttagacgggagcacatgctgcttcttcggtgcggcatgcgcgagatatgatgggagcgcgacatgcatgggagagatggccgggcagggcttgatctgaagggacgacgggtttattttggaggaatgtaagggatatttttgtaaaatattgacgcacgacaaccgttgaaactggtgcattatagtagtatagattacaacgactcaaccg

SEQ ID NO: 38295 - DNA, 1549 bp, Zea Mays
gcccaccacgggaaagggaaaatagcgcaggaacagtggagcacggggcccacgggcacaaatcacgatcggacggcgcgccgcactttgccggtgccctggaacccaatcagagcctgtgtggaaggatgccaaaaaacaggctccctgaaggaggcttctattaaacactgtatggtgccaaccgatggccagcctgctgacaaatcgtggtacgcgcacgagccgctgtacttgcaatggaaggactggaactgcaagagcgaatgcagataccactgtatgatggaaagggagggcgaaagagcaaagcttggccttcagcctgttaagtatcatggcaaatggcctttgaaacgcgcctctgtgtttcagctctctccgctcttactctcgttgtgcaatttaatgggtggctatcgttcttcctcttgctttattataagcttcctctacggccagaaactcacaagacatactacgaatacactggcctgtggcacatctatgggctccttgccatgaattcatggttctggagtgccatatatcacagttgtgacacaatttggacagaaaagctatatttttcatcagctgctgcctttctggggtactctctcattttggcgatactgcggacttcaagtttaagagacgaagcttctagagtcatggttgccgctcctattctggcatttgtgacaacccacattctgtacctcaacttctatgagcttgacaaaggcctaaacatgaaggtttgtactgtgataagcattgctcagtgtctcctgtgggcactgtgggctgtcatgagtgggcatcgttcgcggctcaagatcatatctgtcgccgtcggaggtgcggttgcagtacttgtggaagcctacgacattccaccgcgatggggatacgcagatggccgtgctatctgcctcgctgtggctatccccctgtcgtacctttggtggagctttgccaaggaggatgctgagatgcgaacatcagcaatcctaaagaagacacgataacgaggaaatgcgacatgccgcctgtgtgcacccacccagccattgtaaagataaaagtttcacttgtaatcttaggtatgtgaattatcgtattatttttgttcgacgatgtttctttcttggctcacttcagaaggccatattgtttaatgggcccatttctattctttaatttatacagcaactgaacacttggtaggctcgtgctcatcaactgcaatctcagaagattgttaccatgcgttagtgaatggccgcttatcataataatgtctgtgggcgcttttgttggctatttcttgtgagatcctgagcaaatttggtgtgcaattgttgtataaaacatgaagaaaaagatgaagttgaaacgcatcgcacgcttagtagtgtttggttccggattgtggtaagaagtgtttggttctggattgtggtagtacacagttgttttgttcatgatttgacgttatttggattggtctcatatagaaagactctaaaaaagagaaaaaata

SEQ ID NO: 38296 - DNA, 2188 bp, Zea Mays
gtcgggccactatccctctggcctcgtctcgtcttctcttctcgcgaatggcggcgctgtgcgatctccgtcgctgccccctccgccagtgatttctgggacgcgcgacgaacacgagttggaaggaggtggtcgtgctttgggcggcgaaggacctgggcgctagcagcctcagaccctgacagatcacaacctgacagatcacagttggagtgacgggcgctaccaaaagcgatcacaggcgctaccaaaagcgacgggcggccgacggcggcattgcagttggagcgagcgagcgcggtgcctttcggacgacactgagcacaggtcgcacattgtcacatggagctagactagaggtcgtcgccatcctgtcagtgtctgctcgtgatcaaactgcctgctgcctgcccgccccaatacacccaaccagatttcaattcacttcttggaagctgctgcttcgagcttttgagtagcacccctgcttacagacatttcatatccatatatatgctcctcgtcctggatctccttgccggcattatattgccccccacaccacccccgactccccacgaccattaatctgaagtctatatttcacattgtcacgactatattttgttccaatttgtttccttaatttgcatcagttttatatgttatattgataggtagcacatctatataagtccatgattaaaatttatgtttctagataatgggttcttgggaggagaatgttaggcaatttttgttggaggaggaggaagatgatgatgaactattctttgttattctccctgctataatcccatacctctcggaagagaaaagacccatccacacatcctccctcaccggtgctaaaaaggttaaagaaattcttgaagggcatgagagctggtgcaaatctgagtttagaatggaaaaggaaatattcaaagccacgtcaaattttcttagaagggagaatttactacgtgacacacgaggagttagtgttgagaagcaacttgggatgttcatgtatatgatctcccacaacgccagtaaccaaatgctacaaaaggcttttcaacacagtggagagactatccatcgaaaaatatctgaagtttttgagatagttcccatactaactcaacgatttgtgaagcttcctagctcagttcaaactcatgctaggattgcaacagattctaggttcatgcccttttttcagaattgccttggtgccattgacggcacacatgtatccatcactatcgcagaagatagggcccctccatatagaaatagaaaaggaactctttcacacaatgttatggtagtctgcgactttgatctcaattttacatttgtctcgtgtggatgggaagggtcggcatcagacgcaggggtgcttcgatctgctattagcaaaagatttagtgtgccagaaggaaagttttatcttgtagatggtgggtatgcaaatacaccatcatacattgcaccatacagaggtgttcgataccatctcagtcaatttaggaggagtcgttcatcacaaagtggttatgcaaactacaaagagttattcaatcatcgccatgcaattctccgcaaccatatagagagggccattggtgttcttaagaaaaggttcccaattctaaaagtagacacattccatcccatagaaaatcaaatcaagatcgcagctgcagccattacatttcacaacataattagagggcaaaatggtgatgaaggatggctggacaaccaactagattatatatctccaagccattacattggtgttacttggtacttgcagagtgctgagtggaagcaacatatgaagctgacacggaaaaggaaaatggatgatctccttggttatgtttccctgtcttgtgcatgctgcatttcctgctaccgtgaagaccggggtccaggagagtaggagactgaaagcactgtcgagaagactgaaattatcacattgacatgaagaccaaagccatctcttacctacttatctttgtagcttacgtttctattttattctgtcatgaaaactaaagtcttatgtatggtcattatgtactattttggttctgaaaatatttgtttatgttatgaaaactattggttgaaagaatggtgattacggttttggcttgaaggttcagaa

SEQ ID NO: 38297 - DNA, 3404 bp, Zea Mays
cctggggcctcagccagcggagcatccagctcacacttcacgcgctgagggagcaaccagaacaaggctcctctcgtcgttattgctgaggctccggccgagtagagctcaggccatgaacctctacatgcttaaacaaacgtccctcctcctaccgctgctcctttgctgtgtctgtaataccgtccgctgctcggcagccccggacaccaacaccagcgcggaaacggacgcgctcgcgctgctcgagttcaagcgcgccgccagcgatccagggggagcgctgagcagctggaacgcgagcaccagtctctgccagtggaagggcgtgacgtgcgccgacgaccccaagaacaacggagcagggcgagtgacggagctccgcctcgcggaccgcgggctgtcgggcgccatcgccggctccgtcggaaacctgaccgccctccgcgtcctcgacctgtccaacaaccggttctccggccggatacctgctgtcgacagtatccgcggcctccaagtccttgatctgagcaccaactcgttagaggggagcgttccagatgcactcacaaactgctccagcctggaaaggttgtggctctattccaacgcgcttacgggttcaattcctcgaaatataggctacctttcgaacctagtgaatttcgacctgtccgggaacaaccttaccgggaccatcccgccgtcgatcggaaacgccagcagactggacgtgctgtaccttggtggaaatcagctgacggggagcattccggacggtgtaggggagctgtcagctatgtctgtgctggaactaaacaacaatttgctgtcaggtagcatcccatcgaccctttttaatctgtcgtctcttcaaacgctggacttgggttcaaatatgctggtcgacacccttccgtctgacatgggggactggctcgtcagcctccaatctctcttcttaaacgggaaccagctccaaggtcagataccatcgtccattggcagagcttcagagctacaatctatacacatctcagccaaccgcttctctggcccgatcccagcttctctgggcaacctctccaagctctcaactctcaacctcgaggaaaacgccctcgaaacacggggagacgaccagagctgggggttcttggccgccctgggaaactgtgcccttctgaactcactctcactagataacaataatctacagggagagctaccagattcgatcggtaacctggccccaggtcttcaagtcctgcgtatgggcttcaacaacatgtcaggaacagtccctccaggcataggcaagctgcggaacctaacgacgcttgggctaagccacaacaggtttactggtgtacttggaggatggctcggaaacctggagaacctgcagtacgtagatcttgagagcaacggttttactgggcccatcccaccttctgctgggaaccttacacagctcttggcgctcaagctagcgaacaacgggttccagggctccgtaccagcgagcttcggtaaccttcagcagctcgcgtatctggatctgagctataataatctccgaggcagcgtacctggcgaggccctcacttcaccaagaatgaggacgtgtgttttgtcctacaacagtttggaaggctccataccgcttgattttagcaggcttcaggagttaactgagctatctctctcctctaacgcgttcacaggggatatccctgacagcataggccagtgtcaaatgctacagacagtcgagatggacaggaacctcctcacgggcaacgtcccagtatcgttcggcaacttgaagagcttgagcactctgaatctttcgcacaacaatttgtcaggtcccatcccgtcagcagctctcactggcctacagtacctgacacgcctagatatctcttacaatgacttcaccggagaagttccgagagacggagtgttcgcaaacgccacggctgtttcactccaaggcaaccggggactgtgcggaggagcaacgaccctccatatgccttcgtgccgaactagatctaataagagggcggaaacacagtactatctgatagaagttttgatcccagtatttggcttcatgtcgcttgcattgctgatatacttcttgctcattgagaagacgaccaggagacgacgacggcaacatttgccgttcccttcgtttggcaagcagttccctaaggtcacctaccaagatctcgcccaagcaacgaaggacttctcggagtctaacctggtcggcagaggaagctacgggtcagtgtacagatgcaggttaaaggagcacggaatggaggaggagatggcggtgaaggtcttcgacctcgagatgccaggcgcggagaggagcttcttggccgagtgcgaagcgctgaggagcatccagcatcgcaaccttctgcccatcagaaccgcgtgctcggcggtcgacaacaggggcggcatgttcaaggccttgctctacgagttcatgcctaacgggagcctggacacgtggttgcaccctagagcggcgccgccggcggggggcgggaaagctccgaagcgtctaggcttctctcagagagtgaacgtcatcgtcaacgtagccgatgtgctggactatttgcaccacgagtgcgggaggccgactgttcattgcgacctgaagcccagcaacatcctcctggacgacgacctcaacgcccttctgggagatttcggcatcgcgaggttttacgctgactccaagtcagcaccgccgccggcggtagacgacccaactagttccgtcggtgtgagagggactataggatacatcgctccagagtacgcgggaggtgtccgcctggcgtctacctctggagatgtttacagctttggtgtagttgttttggagatggtgacaggcaagcgaccaacagaccctaccttcaaagatgggctggatatcgtcaactttgtgagcagcaactttccgcatcagatatcccgcgtcgtcgatcctcgtctcagcgaggagtgcaaggagttttcccgagataaggtggaaccagaaaatgcagcttaccagtgtttactgtgcctgctacaagtagctctttcatgcacgcacccgtcaccaagtgaaagggtcagcataaaagaagtagccaacaaactgcatgcaacccagatggcatatgaaggagcgaaagaaaagaaataaaatacatgtttcagcatagtgatagtgtgataccatgctacgagaaaaagggaccagagtggttgtcttagccgtgtttgaccgcgttcctcctgccgcggctaagctgccattatacatgtccaaacgggtcgggcctaacgggtagcccgaagcacggcacgggttaggc

SEQ ID NO: 38298 - DNA, 1284 bp, Zea Mays
gatcatcttgtcaatatatccgtgctactctaccttatattcgtcgaacttacctgcgttggagaagacattgatgatttgcagtacacacctaaacccgaatttgaggggtattttagagttaagaatgttcaaactgagttggatctacttaaagcatggttttctcacatgcaagaggttaagcctggcatttatgttacatacaacgatgacttttttgactggccatttttagagaagagggctgcacaccatggaataaaaatgaatgaggagattggtttccaatgtgacaataaccagggcgagtgtcgggctaaattttcttgccatcttgactgttttgcttgggtgaagcgagacagttaccttccacaaggaagccaaggtctaaaggctgttacaaaagccaagctacgttacgatcctctggaggttaatccagaagatatggttcgctttgcaatggagcagccacagacaatggcttcgtattctgtatcagacgatgttgcaacatactatctatacatgacttatgtccatcctttcatcttttctcttgcaaccataatacctatgttacctgatgaggtactgtggaaaggaagtgggacactttgtgaaattctgctaatggttcagctagctcttctcactaaatcagccagctcttctgcttgtcccattgtcatccagatacttatttgggatgttgaagtacaaccaaatagacatgctgtcctaggagcaagcgagtctcgccctgatctgatttatggcttcaatgagatgttggtgctagctcatctgttaagtgatgatagataacagtatgtctacatgttgctctagcacgattactgggggtctaggaatatttgcaacattgtttccaagctggatagccacatgaatgggtttacaagccccatataataaatcataacagtgcgggagcattttttggatgtccttcacacagatgcaggcaatgaaagaaacagaaaatagacaatgttagcgcggagtgagacagataggaattgggatagaatcatccttgttctcagatcagctgtacattctttattaaggtagtatatcatacatgtacgagtagactgacggttgcttccaaatactccatgtgtttgaaatatgtattgtatgtgatattctgtgttgcatgtgattttatgtttgtctaattttttatttctgtattttttatttttttttctgaaaaagggataagaacgtgggtaccgtcaaacataa

SEQ ID NO: 38299 - DNA, 4163 bp, Zea Mays
cgtgagtcggggactcgggaaccggagcacacaccaaaacccccagtgccgccggcggacgccctccagtttccggtcttcactaactccccgttttccgtactgctgcggcgcctcggcagtcggcaccacagccggcaagatgccccccttccgaatgccttcccacttcctcgcgcttccgctcctactcttgctgctcctccaggcgccgtccccggaggcggccgagtctacgccggggacccggacgcgcaagatcggcagctcgggggcgtcctcggtgttctcgctctttaacctcaaggacaagagcaagttctggactgagtcgatcatccgtaaagagttcgatgacttggaaggttctgcgtcgcgggactctagcaaaaacggcctgctcaacttcacaagagctggtaatattgcaaactatttgagcctggcagaggttgattccatatatcttccgatccctgtgaacttcatctttattggatttgatggaaatggacggcatgagtttaagttggggcctgaagaactggagcgctggtttacaaaaatagatcacatatttgagcacacaagaatccctccagttggtgaagttcttaccccgttctataagactactgttaagaaacttcagcattatgatcttcctttagtcagccatgtgaaccacaatttctctgtgcatgccatacacatgggagaagatgtcttatctgtttttgagcatgctataaaagttctatcctgtaaagatgatctcgtggattccagagaaaatgaagagatttttttgcaagtggatagtgctcaaatggaacatatattttcaactcttgttgatcaccttcagatacaagaggcttacaatatctttgttctgaaccccaagcctattggcaagaggattaattatggttatcggaaaggcttctctgagtctgagatcaatttgctcagggagaacaagaccctgcaagctcggatactccagtctaaaagtgacaacaaactcttccttgatatcgagaagggagtcaatagaaggccgttatatgaaagtcatcctctatcatcattttcatggacccgaactgacagtatggatatgggggattggtcaaagaaatgcaaggaagcattaagcaagtttgagctgctgaaggaagggaagagtaaagaggacattgtttatgaaaaggctgttcagatattacacggtacaaaggatgaggtgcatgacattgttcaaagtgctcttaagtccagtgatttgaagggtctccatgcccaatgtcttacagatatatggataggcagagagaggtttgcttttgttgatctgagtgcagggccatttgcctgggggccttctgttggtggtgatggtgtccgtacagaacttagtctgccaaatgttgcaaagactgtcggggctgttgcagaagttacagaagaagaagctgaagaaaaattgcaagacacaataagggagaggttttcgtcctttggtgaggattaccatgctgttgatattctattagcagagattgatgtgtatgaactttttgctttcaagcattgtgtgggaagaaggatacagcttgccctttgtaaagaacttgatgagaggatgcatgacctgaaaaaggaactggagggttacaatactggagattttgatgaaactaacaagaagaaagctcttgatgcactgaagagaatggaaagctggaacttattcagagatacttcagtggaacatcatagttacacagtggctcatgattcatttcttgcacaacttggatctatgttatggggctctatgaggcatgtaattgctccttctgcctctcatagagtgtaccattactatgagaagttatcgtttcagttgtattttgtgacacgagagaaagtcaggagtataaagcagttacctgttaatgtaaaatccatcagggagagcctgaattctgtgctattacatcatcaaaactccatgtttagccaaaacatgctgtcattgtcagaggatccatcattgatgatggcattttcaatggcacgtcgtgcagctgcggtgccgcttctattagtcaatggcacctataagtcaactgttagcacataccttgattctgctattctccaacatcagctacagaagctaaatgagcacaattcactgaaaggaaggcattcaaatcacaggtcaacattagaggtcccaatattctggttcatacataatgaacccatattattggacaaacattatcaagccaaggctctctcaaatatggtcgtagtagttcagtcagatgatgattcctgggaaagccatttgcagtgcaatggaagacccatcttatgggatttgaggaaaccggttaaagctgctattgctgcaactgctgagtatgtatctggtctacttcctccacatctggtttatagccatgctcatgaaactgcaattgaggtttgttacctctttatatacatttgttttattatctgtaaacaaagattatctgctgtaaaatatttgaattcttaatatgtcaatttctttctccttttgccttctgaacaccatttattgcaccttacactcacatgtctgtagtagtatgcggaacagacatcacattgtccattgtgtatccccacatgattcttacaatttagtgacacttgctgctcatccaaacatcctatatcaaaaaatacactccctctaatttcattcgtaactcaaaattaataaattagccagttactgatggattcactgaaggaagcatggtcattttgggtcatgtttgatttccttgcttaactttgcaaggaaaaccttcctgtgtggagggaaccatgactcctccaaaaaacaagaaaacttcttgttcactgactcactctgcgcaaatgaaaccgtgcatatttccttagcattgttggtggcattttaagaggaatgcttggcaaggactggacctggtctgtgggttgtaatccctcagctgtgacttctgaaggttcacaactttcagagttccagcaagatgtgattgctcgtaactatattattacttcagtggaggaatccattcaagtaatcaattcagcaattcagcaattggtaatagagcggactactgaaaaaggcttcaaaattttcaaggctcacgaaagtaagatggttgagaagtacaatgccgttgttagcttgtggagaagagtatcggctatgtccaagggattgcgatatggtgatgcagtaaaacttatgtcaatgcttgaggatgcttcaaatgggttttctagtgctgtgaactccaccatttcaagtctgcaccctgtccaatgcacccgcgaaaggaaggtcgacgtgcagctagacttgacaacacttcctgcttttctagctgtatttttgttgctttggtttcttctacgtccaaggagaccgaagcctaagatcaactgaacaccgagccaatgagcagcataggccatagagtttttgtgaatacgcgcatggattacagatggcgctggagcatggcccgggaattccaaaggtccaaaacaccgggtggcagggaacaaggtttcagaagattgcaatcctgacacatccccaagttgtagcagagttggaatgtcatgaaaactttaattcattcagtcctgtcctcgttccgggtttagccaattcttcctcgttccgggtaaggccttgttcgtttgtgtcggattggtgggtcggaacaattcccggccggattgcttctctaatttatataaactttgattagccggaacgattccgggtgcaatccgacgcaaacgaacaagccctaactgagattaatttgtccttgctgtaatgtttagccagtcctgccccgatccggggaactgagagattgtctttatcgcaacattaacggctagcggttagtatcatcttccagtcacctggaatgttactagtacaatccaattgtctgtttcctgccgcttacatgtaaaagtccatactcaagttttacagaaagaaacatgttctgtcatttattacaaaataaagccaaatagtaaaatgttatgtgtacgtagggacagtatgatta

SEQ ID NO: 38300 - DNA, 2121 bp, Zea Mays
gtcatccgcgcgcccccgctctcctccatctgccgcgtgaagctctcccgaaaacctcctccacatcagcgccccccgccatgcccctgtatctcgcctagcacacgccgcgcccacgcaggcagccgtggatctcgcccccaccgtcgagcttccatggtaggcatcctcttccatactaggcggccatggcatgaacccatcccctatccgcgcccccatcgcacgggccctaatcctagaatggtgccttcctccttctctgtcgcctctgccctactcagaccttcgagacttccactggcgatacacacccactagggaattcttagaccaacatgaggaggaagaaatgcctcatgttattagtgttacaccagacgtacaagaggccattggacggcattctttgcctgcgataggaatgaggagctatctgcaaactatcttcttgagcaagctggtgaggaagattaagccagagtagttttcgtatgggtacaaacatagctttgcgtcaatcgatgccaggcaaatgtagaacgcttggtagccggtcagcgctatgtgtagaacacatactccagagatgaacatggatcacgagaactggaataattgctgtcagctgcattgaaacaggcagatcctattaacaactccgcattggctctctgccccagccatggacccatgacatcggtggtttcgcgcacctcaaagacatgggtggggaggcatcgcggctgctgcacgccctctagagaatgcttatcgatcatcaggtgcattcaattacgctttcggttgctgcattgagaaatgaatcagtcgaactgtgaaccaactacttgaaatttcacgtgatgtggggtatagtggcaatgcataagcccacatggagcactgggtcttcgaggtgacacactgacattgcaactgaacacacttgtctatgtggctatggctacggtatacatagagtcgtacattaggtagcttattcaatcaaataatgtccggttttgtcatgaaagtgataataatcttctatataaacttggtcaaacgtaagacatttcacttaaaataaaaccagaacgtctctctttttcggtggagatagtattaatataatttcgaaaattctgatctgcgagttggtactttgataattcaaatccatgttgccaaaagctaactgatataatactttcttcaacagtaactatcatactatctgcatcttctatgatctattaaagtacctcacaagagatccaattaatgattcacacctgcaagataacacctgtagtggaaatccagttttctggtgtgagtctaaatatttcagaaacaatgaaagcatagaagaaaatgctgcagtaggacaatacctaattatcatgtgcatgcccctagaccctccatttttctcttagcgaggaagcagaaaaccaaactcaaatacaagaaatattagtcaatacaaagtggccaaatttctcgagacagaaaaagacaggtgggatgtagaaagggacttaaaagttgaaaccattggccccatgtactgcggcaaaatatttctcttcttctggcagtacagtagcttgcatcatatgtgacatcctctttatagtacaggaagtcaagaatagcccgagtgctcagcacatatgctacatgctcccaactacattaccccttctttgaagtggcgagcaaagcgagaagtttgagtggggcccaaaacctgagtggggcctaaatagaaacctacttactaatggacctttatagctacaatgaataagataaaaactccactgaaaccagaaaattgagtgggaccccgtgccccagtcagcccaacgtgagcctacccttgcttctctgctcagacatgcacataaactgaattcgtctcatttatttatgtttaaggtgtgtcgtttattcacttgctccagctgctgctatcaccccaaccaaatcaattttgaaggccgaattatctaacaacatttccaaagggaatatttcaagttcacctacacggccgcaccttctcccgaacaacgtggagcaagcaatcatttcctgtagaataatatg

SEQ ID NO: 38301 - DNA, 2677 bp, Zea Mays
gtcaacacccaacacatgctttaccacgcacacgtttgaccacggactctcggctggccgtctccagtcccccactccgcagctccgttcacacctcgccgcgggaacgggagtcctggtggtgttttttattctgctaagtggcccggcccggtcgtctttgctgcctcttgcgaagcgagtgcgccgtaacttccaagaaccggggggtgcgcggggggccggagcccggaggtagcaagcaacgagaggaaggagacgacgacgcggcctcggctcggaggagacgacggcgaggaagcgtccaggggaccccgtacgaaagacttgcagctgcgggtgtcttctgctatcacgatctgaagtgctgaacttggttggaagatactcttcttaagcctggaactgtcgtttccgatggtctggcactttctttcctgatggcaagcacagaaggtttccgcctcgtgagatgcccaaagtgtctgaacattctcccagaaccacctaacgtcacagtctacaagtgcggtggatgcggcaccacccttcgagctaaaacccgtgccagcggtggccaacaagtggccgcgaccgcgaaacaaggtcgccaggactccgacagttattcggtcgctaccgccgtgagcagtggggtgcctcgtcagaacagagaccagggctccattggtgccgtcacggagagttccttcgacgctgatgtcgcgagcgccgagcatggcagcaacggagcaaggagcggtgaaaatggtggtggtatgctggctggccagaatgtccatttcgaaggccaggataataataccagttcaaggatggaaggtcctgctggccagacacgcctgaacgcaaatgccacgtatttagactctggtggaacagaaaaccacaccgtgcaacaaactgcagagaaatgccgagtgagtggacatgtcgatgatacagaatgccacttgaacacctctgaggacgaaatgtttccttccgagacaagcaaagcagccgtcggtatgcaggatcctgggcagaagaaggaagcgggcggaaccgagcatgcagcgaacaagaagagccatcttgtgagggcactgtctcggtcgtgtgatcttggatcatcgatgaacttgaccgatttccactctgctcgggcttcgctccagtccaaaagcttcagggccagcgcgcccctccagtcgaagatcatgagcacggtggatgagctgaagggcgacctctctgagatgttcagcaaacctgcggactgcaagccaaggccacacccacaccctccacgcccttccaaacgagatggcggccgcacggctcgtgcggccgtcacgtccagcgcaccactcgcggcgtatcgtcctcccgccgagcattccggctatgtgtctcgctctcgcctcagcaggtcctgcgagcaagaaccttcagcgatgcacagggcaccggtcgagcaggttaagcgtcgtcctccgcccagaaaccactgcctgcccgtcctaagcggcgctccgttcgtcatctgctccagctgcgtcagcctggtccagctgcccgccgacttcgccgtgccgagcagaggagcacgccggctgcggtgcggcgcctgctccgagctcctttcctactcgtacagggaccccgccgggaggaagaagccgcggtcgccattcgagggcgatgagtgcagcactgacgggtacgacgagatccgccaccaggctgccggcgccggcttcgagcgggcaggtccggccgtgtcctactccgaagagtacgggctctcgttcggcatcggccactcgaccagcagcagcaccgaggacgggcagccgctgtacgtgtcgaggaactcttccttcaacaccgccgacgacggaaggatgggcagagacggcaagcttcaccggctgatgggatactcgtcggcgagcgagctgctgcggcactcgcccgacctattcgagagcttcgacaggcgcgcgcccagcgcgagagcgcacgtcgacggcaagggcaaaggcgtctgcgtggcaggaaacgacgcggcgggcgcgcgagacggtgcggcgaagaggtccaaggcgaggagcggtggcttgccgctccatgggatcctgaagaaagggatccatggcctggaatcgctcaagctcaggtcgtagctgatgatcctcgtttggcggggctctggcgatcgggtttaggagaaggtagcagtagcatacacgacatgtctttagaggcagtgtgtagtgatttgattattggcggcctgatgtgtgcttactgcttagtagctagcttgtgtgtgtgagttgtttgcaattcatctgtgtgtgtggagttggttggttggttcgcaaacttgtgctcttcggttcgatgtgtgtaagtgtaagatttgaacgccgggcatgctcgatgctgtggatgtttatagaatagaaatatgatgatgatgatgtggatctaaaccaagcaacctgagtaacttggtctaaccacaaccaaatctgaaccgattccgccacagggagcaagcggtgagtttttgttacccgcccgccaattactcaagtttgctctacaatcatcaggtaaccgaaatctgaaatttagttttcctcatggcctaatctctgcagtg

SEQ ID NO: 38302 - DNA, 2409 bp, Zea Mays
atggcgaggccggaggcaaccggaggaggaggtggtgccgtggtggtcggtctccgcgcccgcgcccgtgtgcgtggtgtttttgcgggcggtgggagcggcggcggtgtggggaggagagtcggggggagtcctgccgcagtgggacagcagaggcggggctggaggggctggcagcgccggacgggcggcgcaggagggaggacggcctggagcgcggcggcacgcagaggctctgaggcggggctggaggacggcctcgagagcagcggcctggagcggcctcgagagcagcgccctggagggaggacggcctggagagcagctgcctggagcggcggtggcctggagcagcggcacgcagaggcgggcctggcggcgccggacgggcggcgcaggagggttggagcagcggcagcggcggcctggaggctggagcgcgccctggagtgcggcggctggtgagaacgcgagttcctaattgggctggtgatagtgcggcctgtagcggcggcctgggcgggctgggcgggagtttctaattaggttgggccaatttctagcagcagacgcattaaacgcccgaaacgcggtgtttcactctataacgcgtttaaacgtcaaaacgcgacgtttaaacgacgttttacgacgaatcgtaaaacgttgtcgtttcactttctgtcagcgttttatagtttaaacgacgtttaaacgtcgttttaacgtcgttttaataagcatgttaatttctatttgtttaagttagtgatatgtgtttactttgcatttgcagtcataaaaactttttgcagtttatgactgaaaatggtatgtctactggtgttatcttatatgatggcgtagaggattgtatgacaacagttactggaagagaaatgggtctaaactttctaaattacatttttaataaatttaaggaaagaaagtgctggagtgatggctgggaattaagtgatatggaaatagaaattgaggcaggaagaaagtttgtcattaccaagtaggctgacgcagatcttactgttgaagagggcacacaaaatttatttgtttatcttggtctcctggtaccgtattataagaaagaaaactcaattctagcatttttttattccttgagaaaaaatatcttatactttcatgattttaagaaatttctaataaaatggaaaatgtttgtcaaactcattagatcagtgttagctttaaaagcgtctttgatcagatcgaccttaatctgtgagatgtccacagttatcgcattgcagcttaaattatctaattctgcatatcatcaagtgttatcaaaaaatgtcaatattggcgtgcttcaataaaatgggttatgccacacggacaggtctaccactacaggaacaatatctctttaatgtattcctatgataagtggtgttgtaacttatggcacgtaatgtggtattgaagaaacttccttcagcatttcctctactcttttacgtaggtcaggacatgcttaacgaagtttcttaaataccacattacgtgtcataagttacaacaccacttatcataaaaataccttaaagagatattgttcctgtagtggtagacctgtctgtgtggcataacccattttactgaagcacgtcaatcttgacatttttttataatacttaataatatgcagaattagataattaaagctgcaatacgataattgtagacatctcacagattaaggttaatctgaccaaaggcgctttcaaagctaacgctgatctaatgagtttgacaaaccttttccattttattgaaaaattcttaagatcagaaaagtataatatatcttttccgaaggaatcaaaaaatgctggattgagtttccttttttataatacggtaccagaaaaccaagatgaacaaatatattttgtgtgtcatcttcaacagtaagatctgcgtcagcctccttggtaatgacaaactttcttcttgcttcaacttccatttccatatcacttaattctcagccatcactccaacactttcctctctcgaatttattaaaaatgtaatttagaaagtctacactcatttctcttacaataactgttatcatacaatcctttacgtcatcatataagataacaccagtagacatatcattttcagccataaactgtaaaaaggttttatgactgcaaatgcaaattaaacacatatcactaacttaaacaaatagaaattaatttcaggtaataaaagtagaaattgatttattttattatttaaaatttggaatagctgataaatgtacccctttgtgtgtgacacattcaatatacgatcttatttacttgtgggttcctccacaatattcacatcctcatgagggaatgtagc

SEQ ID NO: 38303 - DNA, 209 bp, Zea Mays
cctcttgcgaccatcgcgccctttcgccttccgggcctccagatggagtgcgccggtgttctctggagggatccgcgtcaaggtcgtctcttccgtcgacttcaccgtcggagagcatgcgctcgaggtggtgtcgtcgatcttgtcttcttcttgctgtcgttggaggggtgcaaccccatgggggctggtgaaagggaattaggctt

SEQ ID NO: 38304 - DNA, 1708 bp, Zea Mays
gcttgaccccggttcggggcggttttcacagggaagaaaaacacaccccggatggtcgggcacgtaagccccgtctcgtcctccagatatcggccgccaccttcacctccaccgccccggcgcacgtgcgcgtctccatcgtcgccgcctctcctccttcggacacgactgaccttccactggcgccgacgaagaagacacataggaagaagctcaccgccaaacctcatccagatccagtcgctaccctccgaaagccgcatacggaacgtctcgtctcttcctttggatccggcagccggtgctcctcctccggatccggtggtcaactccatcacccccagctccacctcccttagtccccctccatccgccctcacccaccgcttctatatcgccacctctctcgttgtagaagacactgaggatctgatattaggatggatgaagtcacacaagctgttgaaaatctgaagaaagaatggagccaagctgtttcacagcttgaggagagcattgctgcaattgaatcatgtggaaaaacagggaaaggaacagaggaagcaacttctcttccaaggttgaatggttctgcacaggatgctctgcagttgctcaagtccctgcagttccggcttgatcttctagctcagcagctacctacttttgatgaagtgcagtctgggcaagcaaccttagggtcgtgggatgaacaatacaagaagttgcgtgctagcctgaggaatgctaacttacaagcgaaagagaacattagaaaagctgctcaggaggagagggagcttcttctagggggtggagaagagtcaacaatccgtaggcgtaatctccagacaaaggttgggatgacatctgctgctgaaagtatcaccgagagcctccgacggtctcgccagatgatggttcaggaagtggaaaggagtgcaagtaccttggcaacatttgatgaatcaacaagtgttctccggaaggctgaaggtgaatatcaaggacaccgctctttgctaatgcgtacccgtggtttgctctccacgatgcaacagcaagatgttcttgataggatcatcctgaccatcggctttatcattttctccttggcggttctttatgttgtctcaagacgtattggtctattgacgctgcaaaggaaactggccgatgccatcagatccggttcattatcagccgatgacatcgtagcgaatgcccaacgtggacctgccccagcaaatgttcctgctcccatctacgatgaactgtgattcgtttgtcctctgtattgttaaggtcgctgaaacacttggaacaaacagagcttgcttctgaagccctacacctctgaaggatcaggtatcatcaacgaatgtatcaagtaaatttacctgacactcctcgacatcgacgaaacatcttctgatcagttcattcctaactattaaaggaagtttacgctcttccatctactgcaaaattcaattggaaggatatctattgtagaattaatttagaaagactgcatgtacttctagaataggtacgagtttttatttcagacaacacactcacttctatgtttcttcaatgtgttactcaactaaacataccaagaaaaaatgatgatattgccatatatttatgtatgttgttgtattaaactgtggaagcatagatgattagcatcgccaatgcc

SEQ ID NO: 38305 - DNA, 717 bp, Zea Mays
gccttctctgttttctttttatcataaacccccctccttcatcaccttgcctacccgctaaacctattcgacccatcaacgaacagatccaccctcaccagccgcctgacgttcgagccgcaccagccctaaacccttccacctccagccgccataactgtaatcccttccaccatcagctgcccctccgttcgagccgtcgacgccctaatcctatcaccttctggccgcccaaatccctttcggctcctgccgccctctgtttgaggcgcaggccatggagtcgtcggtcttcgagtgccaggccatggagttgtcgatcttcgagtgccaggccatggcggcacagaccatggagtcacaggctatgatggcgcaggtcttagtctttaggccatggagtcgcaatcaggcgttcaagatgctctgagacttgagtcaggaatgatatatgtgttctctgtccactgatgcggctggagcgtcatgtcaacggctcaccctccccctaacaaattaaactagactgatgagtggagcttcatgttgggatgatccatgcaccttttaagttttggaacgtcgtactcaaatgtagcttgtgttagttgaacctatcgtactttcttttggaattaaattatatgatatttaaacatgtttgatgtttaatacttgtgttggatgctttatgcttcaaatatatatgcattatac

SEQ ID NO: 38306 - DNA, 2036 bp, Zea Mays
ctccaaaacggaaatgagacagcgcttggagctgcgttaacagactactcctgctgtttcttattgccaataagcacaagcacacttgagaaccggccatcaccatggagatgagactctttatcgcccttcagtgcgtgcagtgcgccaccatgcaggtgaagcagcagaagaagagcagcaacaagtgggtgtgtgtggtgtgcaaccagcgtcagtctgtgcttcatgtccatgccaggggctatcgtgctgctgatctccgccgcttcgtccaggacaccaaccttgcccgtggccgccgggagttcgcaccgttggccgagcccgacgtggacagggatctggcggcagttgaggagggagatgtgttccctatcgagaagagtcagacggaatggtccgagtatctggacgatccaggggagacaggtaaaggttgtggtggccttggcgcagatgcttcagatggagaatcggatgaaggaattgaggtgataactgaactgcctcagaaaagacctaaagttaggcctcgcaaagcccaatcagatgtagtaggaaagagaaccaagctgtcaacacatcccactttatgtaataagaggcagcagatcaagcaaggatcaaatccccactgtgcaactactactgctgaagcacaaggatcaaaatggaccaagtatttggacacgagccgttttggtgggaggaaatgcttcgatacctctggtctgcactggactgaacatgatgaatctgccactactgaggctactactgacgtagtggtggatgatgaggtgcaccctgatttcatctgatctcatgttggtttgaaatgccaaatgctttgtgttttggtagtgtgtagtttggtagccataaattgtgctgctggcaattcacattgtcaagacaaaggatgtgcagtacttggtacccgagggaagaagactgttgttcccaagatgttatccagtatgatgggcaattcatagtaaaagcaccgtgctagtcaaaatcagcccaagactattgggttgttttatctctgatcaaaacacgagtatagtcaaactcggtcctctaatcaaatctggctaccgaaacatttttttcacgtgccttgtttacggtcgccggggcatggagccagaaaccgtatttcggcgttgcaacgtgatccagggtggatttggtggtagcggattccaaatactccctctgtttattttttatttatcgcgttttagttcaaaaatgaactggctaatgataaatattccatgtgaatctccaaacgggctactctctggtggcagaatcacagggtgcatccacggaatgtcacaagctcagtgtgaggtggctgagcacttgagctgaggaaaattcttgtttctgttctgcatcaactagagtcacctgaccatgtggcacagcacagagaagagccgaagacgtacagcatggatcacaggagcagtacaccttgatgactgactgttgtctgttggtacctataatcctgtgacaggtctgaacaaccgagtgattgattgatgtctccggcttccctgcagccaaaatgacgaatgggttaccctgcttgaatcctttgccactgcgcttgcgtgctactactattccatgcaaaacaacgtgttcggaaccaaaattaaagttccgaacatcgctgtgatgaatgggtgaatcgtcacctttttctttgaaatagcaactgtatgctcgaagaacagctgtgctggtccagctatctgggtaccgtactccctaccccgattgaactgtatttgggtcaaagtaatgggggagatactctttccatgctaggatataaggtgtaactacctttaattctaagatcaagaaatatatttaattctctttatcaataaagtattgttatgagcgtgcttatattatgggacaagaataaaaagtgtttacgacttatataacaagagtagtagatataggtcatgtttgtttcagtttttttagcttccgtc

SEQ ID NO: 38307 - DNA, 2262 bp, Zea Mays
atgcgtaagtttggcaaagaagcgctcagccaatgttatctggacatacttgtccacgtgctccgccagcgaactcctgttcaccatttacgtccgcaacaagacgggctgaagcaaaagcaaaggcggttgcccacacaatccggcgggaacatggttccagccttccaggcctcccttcgccgcgcccaattcacgcttctgcccgaaatcccaccgctcgctatgccacgtcgctgggggccgaacagtcattccgcatccctcccgtttttaggaaaaccgattccccgcttcggtgcccaccacaaagctgacctgcggaagcgcgaggaggacgaaagggaccggacgaagctacgcgctgcaccgaccgaccaaaccctaggcgttcggcgggcgtcaccacggcggcgaagaaagggtgcctcgcgtcgccttggtgtccccgaagtcgtcgacggtgcagctcgatccgcctcgtcgagcatgtcgaggagggtcccttgcaaattcttcttgcatggagcttgcttcaaaggagattactgtgaattctcccatgactgcaatgatcaaccagataatgtttgcactttctaccagaaagggacgtgcacctttggtagccgttgcagaaatgaacatgttgaagttcattgtaactgcccccaaccagcaaccactgtagcgcgtgcatcctccaattcttctcagctagttgcttcttccagagatccccattgcagcgaatgccaaacggatttatgtgaccaaacacagcagatttgcaagtcaacagcagcactttctgcacatcaacctgcatgggttgttgattatcatgaccatgacactccagatgatactacaagctggccgttgcaccaagctgtgcaaaatcaaacatcacaatatcctgttcatctgccaatttgctcttctactgctgatggcacttgtccttatgggaaaggctgttctcagatgcatggagatctgtgtgcattctgtgaaagacagtgcatgaatccttatcaatctgatgaaaggggggtacatgtcaagctatgcaagaaaaacaatagagttcttgaggccatgagaagaagtgaagacatagaatgtggtgtgtgcttggaccgtgtgctttcaaaacctacggcagcagaaaggaggtttgggctgctatctgactgcgaccattccttctgtatctcatgcattaggaattggcgtagcacctctcctacgtctggcatggatgtcaactctacactcagggcttgtccaatttgccgcaaattgtcatactatgtagttcctagcattacttggtactcctcaaaggaagaaaagcaagaaattgttgaaggttacaaggccaagctcaggtctattgattgtaagcactttgacttcggaaagggcacttgtccatttggaagcagctgtttttacaaggtgcatagtacagtttttggggtcatttaaatgcctctttgtttgattacatgcttcaaagcatgtactgtttatcttcattcttgagtggaacataattggcttatcataggagcatgcctacgatgatggccgtttggaagacgctttattgaatcatcatgatgccgacgatgcaagcgcagcgattgccaaacttatgaggttgtcgtacttactgactcggctgcatgtgtaaggaaactcaaacgtatctttgagcaaacattgctgagttcgattggagttcgttgaccgagcaggcaaccttggatttcgctttgtaatggatattataaaaaacatccaaaaaaaagagggcagtcatttctgaattttatcttttcgctgaatgttcaaatcatcagaaggaagcagtcccaatcgtgccacttccacttggaagctagcattttctatccgggttggtacctgattggtggttgtgaccaaacttaactatacccaatactggtgatcctcgtttgttgcagcatctctagcatttcgtttttccagccccgagaaatgctctattgctctgtaattgaagagtggagaaatgttaatctcgatctttagtgctgctcgcctgctatggcgcgtggaactaagttcagttaaacccagctatgggtattctttaccacgaaggccttattcggttattcccaatacagccttattcggttattcccaatacacatggattggatgtgattggaaaaaattaagaagaagtttaacttgtttgatatt

SEQ ID NO: 38308 - DNA, 378 bp, Zea Mays
accagttggacggcggtggcagcgacctgctctaggacggcggcggcgaggtagtcaggtagagtgtccatgcgtgatcggctcgcccttccgtgtctgttcgattgaaggaaggcaacgtctggccatgcgaaacgtccgtccaggaaggagacaggagagaccagggcgccagctgcaaaaatttcaacgccaaaattgaaggttaccgttggatgtagagatggtaatgagccccgatctccggttccccgcgggaaatttctccattaggggatgaggatggagaaggttctcccctcgcggggatgtaaacggggaaaaatcctcctccgatgggtaaacggagacgggatggggaaacattcctcatctccg

SEQ ID NO: 38309 - DNA, 979 bp, Zea Mays
cccgctcacgcgtcctcttgatcgtcgaacgtacttacgtactacctgcctgcggccccgacgcatcgcgctctagggttttgacgcgccggcggcttgtgttccctttaaagcttggctgctcgtctgctcctgctgctgtctttcttctgctcttccatcgcgccagtgttttgagaagctggtcggcgctcctagatcccttcgcctctctcgcgttcgaggctaggtagccgccaccatgagccgctcggggcagcctccggatctcaagaagtacatggacaagaagcttcagattaagctgaatgcaaaccgtgttgttattggcacacttcggggattcgaccagttcatgaatctggtgatcgacaacactgtggaggtcaatggaaatgacaagacagatattggaatggtggttatcaggggaaacagtgttgtcatgatcgaggcactggagccagttgccaagtcgcagtgaatccttatttttcagctgatatagtcgcagcatgaaaactgatgtaaatgctatgagtgaaccctgttgtacttcggactcgtgcttttgcacagcaacataactcggctaccagcacccctgtttcaatggtgacttcattactgccttggcgctaacattggcaatgcatcatttcgtctattgttctacatagccggtgccttgtgaggcacatgagatctgtgattcatcgtcaatgctctgtttggatattgatattagagagcatggaattcaattagattcaataccaaattagctatgatattaaaatgagatgtcaccgtaaaattagattcaataccaaattctattgtttggatgtcactgtattggagttcggaattgagtggtctaatttcatgcaatatagttcggaattgagtggtctaattccatgcaatatagagttgatctgtaatgggagaggagtttttagttatagttcaatac

SEQ ID NO: 38310 - DNA, 6085 bp, Zea Mays
acacccaagatgccaagacccaatccccatggagtcatggacaaggcaggctccacgtcctttgtccctgtccacgccgaggacaaagtcacgacaccaaatccctcccaggcatcacagaccccattctccccccacatcagcacagctcaggaagcttcccatcctccatggcctaaatcatgtctgacacttgacagttcacaaaaaggtcccgtttcgtggaccaatgtcttgcttcggttgaaaggcgcggtatctgctgctgcttctgtggagttattaggcttcgatttgggggtgggggccggtggtttcagcgtgggaggaccgcgaaaggcgatgctttcagcagcatgatccaggagatgaagggcgagatcggcgccatctcgtcgcgcggcgtgctacggctccggccggggagccacgccggggccgggcgagcgccggcagccgagccggacgaggcgccgcgggagggctgctgggcgcagttgcctctcgagcttctgcgtatggtgctggtcagggtcgaggaccaggagccgcggtggccgggccgcagcgccgtcgtggcgtgcgcctgcgtctgccgctgctggagggccgccgtcaaggagatcgtgcgcgtgctggaggcgtctgggaaactcaccttccccatctctctcaagcaggttgttttggttccctctcatcaactctgaacccgaataaaaaattgtgattttgccactcacacacctttgctattatgccatctgagtgggcaaattatccaatgcacatagactacttatgctgtcatgcacatatgcacacataaaatccagatcctccatctagaatccaacggcacctgactcttttacaaaaagaacctcccccaacagctgccaacggttgttgcaaaaagaacctcccgtaccgttcgattcaatatgtacgatctggatgttacgtgtgcacatgtgcatttcttggctatgtgcattcgatactttgccagtgtgtatgatttgtttgggcctggaattctattcatcgatttattcgggttttattaacttgcaatttcaaatctgtaacctgcaacctggcccaagggatgcccctctcaaatgtttcatcaggaggaaccgggctgctcagtcgtattctttgtgccttggagtcactgatgggttagctgatgatgggaaattttctacttgctgcacgcaaatgccgtaggcctgcatgcactgaatacctgatctcgcttgatgcgaagaacacatcagctggttcctacattggcaagctaagatcaaacttcttgggaacaaagtttaccgtctatgatgcccatccaccttgtgccagagctgcggtttcaaaggggtacatgatcggctcagcccatgtttctcctggggtacctgctgggaattatccggtttctcacatttcttactatgcgactttgggttctagggtgccaagaaagatgaagtgtgtcatggacagcatccccgtctcagcgattaaaggaggagggactgctcccacgcagaccgagttcccatccatgagctccagctccttcgcatcggttccattcttcactaggaaaccaggccaccgtccggacagttgtccaggtgttccgccgggtacccagaacgaaaccaagacggtgctgaagaacaagtcccccaggtggcaccagccgctgcagtgctggtgcctcaacttccacgggcgggtcacggtcgcgtctgtgaaagaacttccagctggtggtggcttcgggcgagagtaagcctaaccaggacgacgacgtgatactccagttcgggaaggacctgttcaccatgacttccggtatccgatctccgcgttccaggcattcgccatctgcctgagcagctttgacaccaaaatcactcgcgagtgagtttgtctcccagagagacacgctctagcaccctgctttgacacagaatgtccgtattggcactgatgatctgcgctgtttaccactgtcctccactagtacttttcaggggtatccaagtcatttattacttttgatcctatagtgtcttgtcttttattcgtgggagtgtgttcaagctgcaccatttttgtttacttccacgtctcatttctcagcaggtgaaccagctagcagatacagcaaggaattaatagcctaatatagacttacctgagctttatgccggagagtttggtgatcaagtatacttttgttcagtacaatcgtgatgtaaatagcaatctagctggaccagatcatacttgtatctatctatgcaaccctacagttgtatcctaaagcatttattttgtacagttctttcttaaaatgacccttctgaggcgccagacgagtatatacatacatttgcaagtattttggcactctaaaaaaaatactgagacggctggctaaggtggcatggtggtgatgagttcaaagttgaagcttcaaacggcctcctggcctggctgcagatgattgtgatatagagtaatgaattttgctaacaagtatataatattatttttagggtagaaatttagagtaatatgagtgaggatagtctaagtatcctagatttattatcttcctatttgactacagtcagttatgcacaaatttgaaatcgagatgaaacttggtggtggatcggagctgaatgtgcaagagtagacgacgacaacataggtcagggccagccagccaaggaagccgaatgtactcaacgcagactagtaagtagtacagtgcactacagtacgtcgtggatttatttctgctgcacagagagaggaggacagtgaagtatcgccgtcctcgcgagcgaccggccggcggcaacaacacgtgcgagcagcgaccgacctgcaacaccaaaccaaccaagcaacccacgagacgagacgagaagcacatgctgcgctgtcgccctggtagagcgagcgaggcacgggccacgccacggtccccctactcctccggatcgatcgggggagtagtgtctcagacctcgccggacttggcgaaccgccccttgatccgcatccggccgtcagcgcgggccttgcgcgactcgtaccggatctgcttgccgaacctgtgcgcaagcaagagcagcgagagctagcgacgtgagagcgactgtggtgtcgatcggagctaccactactccggctcgcccgctcacctcctgttcttccgcttctccttgtagcgcgagatcaccgtgccgcggtcggggtgggccacgtcgtagccgcccttcttttccgtcaccggcaccagcgccgtcgtggccaacagctgcggtcgcggggccgtttcctcgtctggcttgttgccgctattgtccacgtcgccgccgctgctgagcgtgacgctggcggggaagatctccgacatgtccacgaacgaggacaggcacggctcgtccggcgccggagcagcctgctcgcgcgcctcctccacctccacctccgcccggcgcgcgtcgacgtcacaggcggtcgcgatccacgcctcctgctcctgtcaccagttcatgcatgtcgttgcttagaaatttgatgagatcctgttgcccttggaaatatgtagtttagaattgccatatataaactagtagatgctgtaatgtgtgcagctgcagcagagaagtgactgaacactgaaccaaacctcgtgggaaggcactgctgcgaaagccatggtcgctgcatcatgccaggcggcgtcagcgtcagcagcgtcgagagccccgaagtctgcggcggctccaatgtcgagctccggcgacgcccatggaggcagctgctcgccgtcacccggctccagctccgcgtaagacgccgccacggccgccgcctccgacttggcgagctcctccagctgccggattaccacgtcagccagctcaccgccggagctccggttctaggtcgccatatcaagacaaccattagagaagaggaaaaagaatcccgttttttttttgtttggtttcatttaacaatggctcttgtagcagggcagcagccgaagcagcaccgtacctttggggacggcggtgcgaggagcggatggaggccatgacaagatgtggtaggaacgaccacgtcctccaagcacaccacctggggctcctcccaggtggaccaccaaccgacgtccccgcccgccgccgccgccttctcgtcgtacccggcgacgccgaggatggccgcgagctcggcgatcgaagggcacccggcgtactcttccaccgcgtcatggtcgtggtggagcggccgcgggtcccggtgctcctcccccttctcctcgtcctccttctccaagcagtagcagtcggcgcagacgaagccgccgccgccgccgcggggggacgcgacggcggtggcggcggctgcgcggcacctggcgcagagcggcgcccgggcgtggcgggtggacaccgtgttggcgccgtgcacgtggcggtcgcacggcaggcacagcctcgcggagtcggcccggcagtacaccacggccggcaggcccatgcagtagtcgcatctcggcgcctccttgctgccggccgcgtccgcgtcggacatggcttccgccacctgcggcggatcacggcagcggacaagacccccgggggatctggttgggacgagcgcgatttgttgcagtgaggacggaggaggcacaggattgatggcgcgaaagggagaggggacgatagaggcctacaactcgcacggtcgtcaccctcactcgtcgctactgtcttgtagttgttgtaggtcgatggtgggtgccagtacaaagacactctgtagtctgtagatggccatgcagcagcagcagcacgccgccccgtagttgagcgcgaagcccgctattttggctcagcgtttaccagagctgtatgtattctacatatatgtctactgttgatatttgattttctaaaggtgtcgaaaacaagttaagtatttggaccttcgtcctttgatttaatgcgtaggatgaaggttcttaaaggagatggaaataaaaacgataacatgccatataagccaaaaagataatatgtcatacaatttaatgaagagagatataagagagtttaacgagagatgtgagagtacgataaaaccctccaataaaaattgccttagaccgtctccagcaggcgagaaaaaatagtgaatacgaaactgtagatgacattgtttacagagtgaagtttaaaataagaaataaaattgtggaggatactgtttacaaagtgaagtttaaaataaggaatgaaatagaaaatctgctggagatatccttagtaacagctattgacagagacgtaggagtgtgcaactgtcagccgaggacccaattatacagtggctaagctaaatagtttagcaggcttttcagctccaactaacaactatacttgggtagacagacccatgtccacacagcctgtctgtccatccgtcgttgaaagagtttatttatatcgaaagaaaggaaatacctcaaatagtccctccattgtgaaaaaaaaaatgtgccggaagaaagagtcgccctgctttcatggtgaaaaagttgatgtcgaaagaaaagaggaagaccgcgaatcgtgttacagtaagtgttaacagttgaaaattgggtcacaggaagtgttgatatttagattgggtctcgaccaattttaaaaagacccatgtttaattttggtcggatctaacaaaaaactctataaacgcctcacagacatggcgtgcggttatgtatagtcatgaactgctgaaacaaggcttgattgcgactagaacaagaatcctcataaattgcaacagaaaccgtagtgtaggggctagtggtcacgactcaccaagggagtgaggcggcatatgcaatgctccaaagtggagacacatcaaattattgcccagccacccagtcccaggaagtaaatcgattctggacaaagaaacaagacaatttagcattgatgttgccagctttcaagtcctgcaa

SEQ ID NO: 38311 - DNA, 1217 bp, Zea Mays
ttctctcttaggcttcttcagatgacaacactgagttcatgattgacatgttacgggagtgcggactagctcacaagacaatactatttattctagaagaattcgacctctttgctcagggtaaacagaggttgctttacagcttacttgatgcaatgcaatctctaacatcccaagctgttgtcattggtgtgagttgccgcttggatgcagatcaactcctagagaaaagggttagatcccgattctctcataggaaacttttatttatttcgccttcgttggatgatatacaacggttggtggagcatttgcttatactggccaaagactcaggtttaccatcaaagtatatcgccgattataactcaagacttactagcatttttagtgataagaaattcaaaggttgtctcaactccctcatggatgctgatgcaacaacgagcaacattcaaagatttcttttcagagctgtgtcatatatggacatggaatctggattcctgtcggtagaaagcttcctaaaggccctttcttccatgcagaggcaacctaagatggacagcttacaagattagaaagtaaggagcaaacctcatacaacttcaccagcataatgaaagaatacagatccatacaagacgcctataagacttctgataaatatgcaagcaccgtttgttttagggcctttgagcacctttcggatcgtgagctgattagttttggtgacaatagatggagaaaccaggcgcttgaataccgacctgttaagctcctcatatcctcccgcgagctcgctgagtccctcaagctgaacaccacctgccccgctgtactgcagaagctgtttgatcgtgaaagatacatgtagaatctcctttcagatggccgcgcttcacctgacttgagtcgccgctttcatgtttcaccgggttgtcaagttcatgtttcactgtaaaccggcgattgtattagtatcttgtccactgttcgctggaaaaggtgtgggccgtgtggccaactgcccagcgtgagtcgtgacctgcctgtcaatcgcttgagtcttgaccataggccacacggaattagatatctgtggtgcactgattttgggctaacgacccgatttctatctcgcacaagtttagcagcgtggtgacagtattttggtagctttgaaatgaatgcgctattcggagtttacaaaaata

SEQ ID NO: 38312 - DNA, 2310 bp, Zea Mays
gttatgactggggataatggaatcacaaccatatgttgctgtggagaagttcgtgagtttatctattctgataatgggactgtaaccatgatacaatcaatctcaaatgaacttaaggataataagggtcaacatgagatatgttgttctaaaattgaaacaataaagggtaaatggcttccaactatgtggattcattcgtaactttcaagaaatggcagtcgctcactactaacagtttatctacagcctaatgaaattcgttggtagtgtccacttcatatgccataagttgaagagcataaatattctgaaagctcacggtaaaagcatcaaggatagttacatgctaaatggctatgcactaaagactaaacataggccgtgcaggtcaaggaatgcctacgagagtaactcctactagaattacttctcttgattttaacattcataagacaaaaatgcaaacagatccaagggaacttgataagattcgtcagagttatttgtattctatgttccaatactttagaatttgtttgcctatatatggtagaatcagcactataaatacataatatttatatcttccttcatgttacttgtttctaattcgttcaggcaatagtcctctgtctttttaaattttttggctcgaaattcattggtccaattttgacctcggaaaggtttgaacccgtcagggactaaagatgccaaaggtatattgttttccttctcattctactatgctataactatttctcctctactgttttttaccctacgaactgtgttgctaattttaatctacactacatctacttaaactcaattgttcagtgtcatagctttgctggaagccacatggcatattacttacatgccttcttagagtcttttagttatttcggtaatctgtattataggaatcataattaatgttgttttataacaataaatttatattgttgttttttagtcagaaaaaatgcttgtcatttggtcaattagctagcgacatgatattaagtgttgtagcgtggtcaagggttagctatgtctatgtgccatgtgttaaaagtattaggctacaaaaatccgaaaatgtcttgataaaagcaaaaaatagtaggaccattgaaaatttaaattagtatcgttgttacaagtttacccaacttcgagtataagagagcatagttcagcccctcgtctatcacttgtatgtaaggtgaactgttttgtttttctatagcccgaccaatgtgcctctaagcatattcccaacaggacttagtgtgttgaaaacgccgagtcagaaatttgcacacatttttgagttatatgtatttattttagttcatttggactttggttgtgaacttaatgctccaagttattttgaccgcagtgggtcctttctccaaagtacttaaaattttcattccctatcacgcctagaggccctatgggtctgcaaatgtgattttctccataaacatcaataaggttgtagctttaagtaatggatgggtggttcttgcatgtactcttccatctgctttgtcggaatgaagcttcagttgaatttgttatagtcgttcactggtgcaaactgttattgctttgttatgtgtcatttgtttgtaggtctggaagatgagtaggcggaacgtggttgcaatagatcctattcaagtgtactatgtggaagggatcttggagcagttggcgttcgtggaggagtcgaagcgcaaggaggactgggtcgtcaggaaccaggagcgcagggcggccaaacgcaatcgcatccgcgacgagcacaagtatcaggaggatgagccagaagcacaagaatgggctgatgagctatcccctgatgagcttgagcgcctcttgaatcatgaccatggttggttgattgccaacccccaccagttcaaggtccctagctggttcctcaacaggaaaaagtactacaaggatggtaggttctctcaggaaccactatggtctgtcactactggggtctacttgtccgtggccagcacaccaagactaccaaaaggcatggaaagactataggtgtgtcggagaatagataaagtcaatttggtgcctaccttggatatttattatctgtaggatagatgaaccgttctggtttatgaaacttttgttgcgtattccaagctggttgaattgaatgttcttaagaaccaatgtcattagaaaagttaaaagattcaataatttgaaatggttttaccacacgaatttggtatatcatagtgatgcttatcgttt

SEQ ID NO: 38313 - DNA, 372 bp, Zea Mays
gaaggagttctaaggaactacaataggagaatcagctctctctgtcatttcctgcccttcccacgcgacgctagtggaagaagtatcctctccgaacgctagtcatgccacccactcaggcccatggacccttgtgctcttgacgcgttgtctcatactgcgcctcggcccaatcgcaggatcaacaggcggcccactgcttgtgtttccctgatgctgcttctgcaagacggctggtatatcgctctctgttgtagcactgctgacaatttgcaacacataaaccatggtcgcttaatgcctcaaccagtgctctcttcaatgcttccgatgttgtgtccttgacatgtttgagacctagaaatttttcaa

SEQ ID NO: 38314 - DNA, 4298 bp, Zea Mays
cggccccacaagacccaagctgcaaaactatccagccaccattcacccctccgcactccgcctccgccgcctccctgccctcaactccacgcccggcagggtggccgctcgccggcagccaaaccctaggcgatcgcggaggccaaccacgcttcgggcgcgatcagccgccgccatgcagggcttccccggcggcgcccccgatccgcagcagctacaggccaccatgctcgccatcgagcaggcctgctccctcatccagctgcacatgaatccatctgaagcggaaaaagtgataacttcgctgcattcgtctctcatgccttatcaagtatgcagattcattcttgagacatcccaaaaaccaaatgcaagattccaagctgctggtgcaattggtgatgctgcggtaagggagtggggagttcttacagatgacaataaaaggagcctaataatatattgtttaaactatgttatggagcatgcaagttctcctgatggctatgtgcaatcgaaagtttccgctgtggcagctagattactgaaaagaggctgggttgagttttcggaccaagaaaaagcagctatcttctttgaggttgagcaatctatccggggcatccatgggcctaatcgacagtttgctgcaatcaatttcttggaaaccttgaattctccccttcaactgcttctgctatgagcctgcctaaggaatttcacgaacaatgtgaatactcactcgaagtgcagtttttgaaggatttttactgctgggcacaagctgctgtgttcaatactgctgacaaaatcttgaattcaactgtaacaataccggacgaaagagcatgttcagcagcattgcgcctgatgtttcagatactaagttggaatttcaaacatactgtggagcacgagagttcagatgctaagataaatttcggcttaaggattgatacgataaatctgaagaagtttgaacgttcgttggtgaagccagggtctatgtggagagagattctaatatcaagtggacaccctacctgggttttaaacttctataccaccttgcgccaaaagtactcatatgatacactgtggggtgattctccaattgctgtctcttgcagacagcttatagtgcagttatgctccttggcaggctctgtgtttcctaatgataatggggatgcacagattaaacaccttatgctgatattatctgctgttgttctatggattgaacctcctgatgtaatcacagcatcaatccgaaatgggggaagtgaaagtgagttcatagatggttgccatgccttgctttcaatcgcatctttaactactggctcactttttgacaacctcctaaaatctataaggccctatggtacagttaatctgctttctgctttgacgtcagaagctgtcaagtcggttctgaataaccagagtgaagaggaaacctggggcatagattcccttgatattttgttagaaacatggaatgttcttttgggggacgtagatgccgataaaaatccaatctcaaccgatggagcacttgcatcttcaagtttgtttaagatgattgtggagtcacacttgaaggctgctgctgattctgcgttcgaggatactgatgatactgaatattttcatgtttctgtttcaaaacgtgatgaacagttagccttgtatgctctaatagcacgggcttctgcaaatactactattccatttcttgcacagttgttttcagaacgatttgcccggctaaatcagagaaatggtgaaagtgatcctactcaaacactggaagagctctattggctgttgttggttactagtcatgtcctaactgactctggcgaaggagaaacactacttatccctgaagcattacaggctggattccctaatgtgattgaagcagcacatcatcctgttgttacactctcctggtctataataaatttttccaggcagtgtttagatccaggaattagggcaaaatacttcagtccacgactaatggaggctgtgatctggttcttggccagatgggttgcaacctatttagtgccacttgacgtgagtagaggaaaagtaagcagagaaattgataatgtgggtacaaatggatcccaacattccagaaaactgctaaacagttttgcttgggaaaataaccaaggagagcttgttcttgattttgttgttctcatttcaatgttagctcttactacctatcagggagaaaatgagttgcagacactgacatgccagaagctacttgctacagtcgttcgccggaaacacacatgcacttatcttgttcaactggattcatggcgtgatcttacaagagcttttgcaagtggacggtctttgctttcattgagtggacgtttacaaaggtctctagcagaaacacttgcctctgcagcttcctgcatcaaagatcctgaagcatctgcacagtacctgagggatctcatgggaccagtggcagggtgcctggtagaaaatgctagcaggagtgatctaaaatctgtggcacagcaagcagatgttatttacatggtctgttgcctattggaacgactaagaggcgctgctagagctactcaaccccgaactcaaaaagttctatttgagatggctcatactgtgatgaacccacttttgactcttctggaggtctacaaaaatcattccacagtcgtatacatgatactcaagtttgtggtggactttgttgatggtcaagctgtattcctggatgctaaagagacatcagctttggtgagcttttgcttgcaactactccagatatactcctctcataacattgggaaggtaatgctctctctttcttcaagtctgcgtaatgagtcacaagcagaaaaatataaggatctgcgagctttgcttcgtcttctgacaaatatatgttcgaaggatttggttggctttctgtctgattgtggcggtgaaggttcacctgatatcgcagaggttatctacattggtcttgatattgtgacccccttgatatctttggatcttctgaaataccctaaacttagtcgtgattattttgtgcttatatcgcacttgttggaactgtacccggaaaaggttgctcacttaaatagtgatgcttttacaaggattattggaagtcttgacttcgggctccgtaatcaggatagcgatgttgttgagaggtgcctggcagcagtaaatgctcttgcttcatacaatttcaaagaaagattaggagggagaggaagactgaactcgcagctcatggaatctgaaggatctaatggcaaactgcaggaaagcatatcaagtcacttcttgagacttctgttgcaaatacttctttttgaagatttcagatcggagttagcaggttatgctgccgatgctttgcttcctttattgttctgtgaacaggagctatatcagaggttggtccatgagttgttggataaacagcagaatccgaccgtaaaatcaaggctggcaactgcgttccataaccttacaagttcaaacaatctctcaagctcactcgaccggccaaacaggcagagattcaggaaaaacctccttagcttcatggcggatgtatcgggcttcatgcagatcaagtagatgcgatggcagggaacaggtgatgtttgaccggtcaattaaaccccgaggaagcactgcaccactgtggtaggggtgcatgtgggcaccacatgtctgtggattgatgagagcgaagactgccacgacaagtctagtagatcttgaagagctagtgtcaccagaaaagacagggagatgagctagtcttagggttggcattcatagcgcatttgctggacaagatggaggcgtccctggccacgagatcgtcgtgtaaatgcgtttgttagacgcacagaaacggtggggattttgtggtggcgactcgttttgttcaattcccacaggcagaaggtagagatgttaagttgatgtaaataccgtttgatttaaacatgccttattcgtaggagaaagcgacacggcttgctgtaacttagggtttattactctttctcgtggcataggatccccaaagaagtctttgctggggtatttgcagccaaacgatgaccagtatgattgcgagaggttttcaatcttttgtaccaaatttggcctgcagttatgatgacactgagtgccgatacaggcatgaggcattccaaaattggcgggcaccacatgtgtctgtctgctgtctcagtggg

SEQ ID NO: 38315 - DNA, 3596 bp, Zea Mays
tccacatcatcccagtcccaaccgctctcttctcttcgagcgccatcgccgttcgaaaccagcgccgcccgatcccgagaatacccaccacccctctccctccctcccgctgccgcccccacctccagcagacgcgacgcgagcgcagtccaccctctacgactacacacactctctttctctctctgttctcctttcatctccactcgtccgctttgtcggaaccgttgctggtggctccggggttctgcgactgcgcatagggaatggcgatggcggcggcggttttggaggaggcgctgcgatggggtggaggaagcgttggggacgacaacgtggccgcgcgcagggcagaggaggccgcgataagaaggcatgaagcagccagttggttgcgaaaaacggttgggatagtgtgtgcaaaggacctgccggaagagccctctgaggaggaattccagcttggtctgagaaatggcattgtcctctgcaacgcactgaataaggtccagccaggcgccatacccaagattgtcggagtccagtcagatactgcggtccctgcagatggctcagctttgtgtgcttatcagtacttcgaaaatctgcgaaacttcgttgtcgttatacaagattttggcctcccaacatttgaggtgtctgatttggaaaagggtggcaaaagtgttcgaattgtggactgtgttcttgctctgaagtcattcagtgaaagtaagaaaacagggagacaagctgcatgtaaatatggtggcattttgaagcctttggtttccggaaattatttcatacttaagaattgtgatgcttttatgaataaaaatgcgagaattcacacagaagaggctaccctgaatggttttcgaggagagcaaaacttatctcttgattgttctccagaatcctatgaggtaattacttcagacaaccttagcacgattattcgcacaattctcttagataaaaaaccagaagaaatcccactgattgttgaatcactactaaacaaagttattcaggaatacgagcttcgctttgcaaatcagaacttgatggatgaagagaagcaaaataacttgactacgaaggaggaagccagttttgcagtaaatggtagtaatgcagctcaaaagttccatctgaaggctgaaataaattttgatctacagcacaaacagatcaaggggttgagaggtactgtttcttctatcaagtctggaatggaacaactgaaattgcactactctgaggagttcactaaacttgggaagcatttgtacactatatccaatgctgcttctggataccataaagttcttgaggaaaatcgcaagctgtacaaccagatacaggatcttaaaggaaatattagagtttattgtcgagtgaggcctttcctacctgggcaaataagttccttaagcagtgttgctggaatggaagaaagaaccattacaataatgactcctacaaaatatggaaaagatggaaacaaatctttcactttcaacaaagtctttggtccagcagccactcaagatatgcaaccattgatacgatcagttcttgatggttttaatgtctgtatatttgcatatggccaaacaggatctgggaagacttatacaatgagcggacctaaagttttaacagaggaaagcctaggtgtcaactataaagcattaaatgacttatttaatcttcaagcacagagaaaggggacaatagattatgatatttctgtacagatgattgagatatacaatgaacaagtgagagatctccttcaggatagtggaaacagaagattagaaattaaaaatacatcacagaaaggacttgcggttccagatgcaagcatagttcctgtcacatctacgtctgatgttgttgaactgatgaatcaaggccaaaagaatcgtgcagtgggttcaacagccataaatgaccgcagtagccgctcccacagttgcttgactgttcatgtgcaaggaagagatttgacatctgggacagttttaagaggttgcatgcatctggtcgatctagcaggcagtgaaagggttgataagtccgaggttgttggagatagactaaaggaggctcagtacataaacaagtcactttcagcactgggagatgtgattgcatccctttcccaaaagaacacacatgtaccttaccgaaacagcaagctcacccagctcttgcaagattcacttgggggacaagcaaaaacacttatgtttgttcacataagcccagaacttgacgctgctggtgagaccataagcaccttgaaattcgctgaacgtgttgcctccgttgaacttggtgcagccaagcaaaataaagaaggcagcgagattagagagctcaaagaacagattgcttccctcaaggctgcattggctaagaaggaaggagaaccagagaacattctaagcacacggtcaagcccaagcatatacagaattagaaaaggcaatgcaacacctgcaactcctaaagacaggcagccaatggaagaagttgggagcctagaggtccagaatgtcttcactccagctcaaaagaggtcaaaaatgcatttgcttggcatcctcactgagaacaactcgtctaactcggttcagaattgcaatgttcctcagaaggaaataggattaggtggttgggttgacaagatggctcttggagacaaccactttgagaactctaattccatcctagagttggagcctgacacagcacagcttccaacttctttttatcatcaaagatatagtcctgtgcaacaaagctgtaggaccgaatcagtaccatcattgggcctacatggctttgattctgctactagttgttctaaccaagagattgtagtgtcaaccatgggactaaaagcttctggtgttgccaatagaggcgcctcaactgtaaaaaagtatgaagctacatcaacgaggagtacaaatctagcaagcaagtctccattgttgcagaaaaaactgcaaacaccaaccaggaacaggaaccagctaacttcgagcaccataggtggaagaagaacaccaaatggaaaaattggcattgcaaagtaatcaattaatgtgaaggcagatttgctgtgaccatgcttagaatggaaaaattggcattgcaaagtaatcaattaatgtcaaggtgggatagcacggagcctaaaaggactgcggtttttgaacctgcagaaggatcaagatcaatcatgtaaactgatgcacattccgataggtagcacattttatttattacattgaagttggaaacagacaccaaagaggacagaaagatgataaatatgaaggaaattcgaattgaggcttctgtacattttccacacttataaagtaatgttgtatcatgtgcctattagccatgacacatcatcacctgaaagttgcttgtattagacatgtgctaagtttacagtttctctgtctcatgtatgttaccctttctcataatggatcgccactcacagactaagagggtgattggtttcacccaactaaaatttagtcccttttacattgaat

SEQ ID NO: 38316 - DNA, 1753 bp, Zea Mays
gggttggcaaacaattgaaattccatgtttcaaagatgtctaatctctcacacacctcaaaggaagatacttcacctgagggttcaggtactaccgagagaactggagcctggagtaacatgttgaacactcttatgcagcaagcctcaatctatggtgtggctgctgggtattgtttatcagcgtcgctgctctcgatcatcaacaaatgggcaatcatgaaatttccatatcctggagccctgacagctctgcagtatttcactagtgttgctggagttctcctatgcggacagctcaagctcattgagcatgacggccttaatttgaggacaatgtggaagttcttacctgctgctgtgatgttctatatctccatcttcacaaacagtgaactcctgcttcacgccaacgtggatactttcattgtgttccgctctgctgtgcctatatttgtcgcgataggagagacgttgtatctccatcagccatggccatcactcaagacatggctttcactctccacaatacttggtggaagtgtgatctatgttttcacagacaaccaattcactgtgactgcttacacctgggcagtggcctacctagcaagcatgtccattgatttcgtgtacatcaagcatgttgtaatgaccattgggctgaacacatggggccttgtgctatacaacaaccttgaggctttgatgctattcccactcgagcttctagtaatgggagaatttgatcagatgaaggtcgacagctccaaagtgtcaaactggctttcatttgatgtggtcctccctgttgctctctcatgcctgtttggactatcaatatccttcttcggattctcctgcagacgagctatttctgctactgggttcacagtgcttggcatagtgaacaagctcctaactgttgtgattaatttgcttatctgggacaagcatgcctcttttgtgggtaccattgggctcttgatatgcatgtcaggtggtgtgctctatcagcaatccaccacgaaaccgaaggcacccaaggttgagccgaaggaagagaacgacgaggagcagcagaaattgctgcagatgcagggagttcaagagagttcataaaccttacaaagaaagtacaactacaaagaagcatatggctagtactcggaaagaggacagcctcacctgagcgtttttgtattgactagtacttgggaagaagcatatggatgaatgtagtcatgaactaggagctacaaaatcccatgttttagatattagaagtcatggaggggacctaattatcactgtgcaattctttattactatactaccacttccatttgtaacgcaaaattgttatgataggatggcaaatatacctgcattgaatacttcctatacgaaagcatctatctcatacagttcggtgacggtgatactatgatctatgtttagtcatttctctgctggagtttccctatttgttctgtaccttattgttggtgatgaagccattggttcttttgctgaaaagaaagttttgtaatcatcgatgttggtgcataagggcagctccattgtgctttctaagccggtgcaaagagcacagtttttttatttgtttgggctgcaaggagtttacacattggagaccttttatgtttctaacaaagcacacgttgacgtgacaattttgtagtaccttgttatgagaaaatcctgtaactctgcaattttgtaccttgtca

SEQ ID NO: 38317 - DNA, 1993 bp, Zea Mays
ttgcagttttgcactaggcattgattgcatctctagtgcccgtcctccgtcctccggagcggctatgggcgaagagagggagttcgtgggcgctaggttggacgccggcctccgcgctgcccgcttctcgtcgccgccgtctgccgacgagtttgcggcagatgtcgagcccaagaacgtccctgcggtctttcgcggcgtggttaaggagtgggcggcctcctcccgttgggatcctctacatggcggcctcgattacctgctggaaaaagtgggacctgacgtggctgtggaagctatgatgtcaaacactggccatgtgttctacggggatctcagaagccatgagagggtgtctgtttcattctccacgttcattcagtcgtgcaagtcttacctggatcatatgaatgcagctagtgattcatccaaagagcagggaatgcttggggagccagctagttcaagggagacatgttcgaacagttcagagaacttggagcaagtctatttggcacagagaacaaagaaggatgctcattacaagttctggaaggcgacatccaagagcctatatttctgagaggaaaatcattttcgtcaataaacttttggatgaataagggtcacttgagatcaagtactcattacgatccccaccataaccttctctgtgtggtatctggtcgcaaaaaagttactttgtggcctccatctgcatccccattcttatacccgttgcctgtgtatggcgaggcctccaaccacagctctgttagtgtggaggagccagattattcaatatatacaagggcaagatacatgaaggaatattctgaaacagtaattctaaactgcagcgatgttgttttcataccagaaggctggtatcaccaagttgacagtgacgacttaacaatagcagttaacttttggtggaagtcaagaataatgactcaaatgttagaacatatggatgcctactatctacgccgaattatgagcagattggtggaccaggagatgagcataatggcgcagaagagtccttttggtcatttgaaagattgcacggatattcagcatatggccaaaacattgacaggtttccagctattcaatttgcaaaaagattcaccactacgaactctggaaccctccactctgcaagcactctatgaactcatctcactggtccatgatggtgctgaagcggttagccaaatggacaaaatagaagccacatcccagaataaatcctccaaccaaagagatgacacagatacgagtgctgctgcagacgattcatccctcttggacaaagatcctgttgcaaaaatcattttgccagttgaaccacttgaattgcggactatgctgcttgcaatggtgcatactttcccaaggacgttagaaaatttgattctcaacatgcttggggtaggagcagagatactgactaggaagtttgatgagatggatcaacaaacaacaaaagaagaacagtctgagttctacaagatattctatagcgtgtttgacgaccagtacgctgcaatggatgcgcttctgaacgggaaggaattgttttcttttcagatattccagaatgtcctggacaagtatctcggggtgcatgttgaccgacccagcagatttgttactcgtacaaaccaatgaaatggagcgcctctaccctctagtatacaaaacctgaatcggcttgttgagccaagccaatgaagaacgtattatgctgattactgatgtttgagcgtctcgatagataatgtgtttttattggcttgcaaccatattttagggattttttttggacgaaggcggcagtaactgagagcggtgcgcatatgtgagatgcgtgactgctcttgaatgcgatgattacaaacgaaaattaccgttacgcctcgtttggattcatggaatcgaatttcattctaataatattaattctaacgatattaatttaggc

SEQ ID NO: 38318 - DNA, 1908 bp, Zea Mays
cccctcctccctctcttttcaaactcactcggtcactccatatttcgttaccatttcccacctccggaaaatacttttttgcatttttatcccctcgttctcctttccccgcgctctctccctctctctccgatccaaactaccgacaaacgccgccacccgaattcgaaaccctaggcggccgctgtaaaacacgtgtggctgtagtgcctctcgttcgtcggagccggcccgcgtcggtggcggcagccggccatgtcgacggaggacgagaagctcctcaaggaggcgaagaagttgccgtgggacgagcggctgcagcataagaactggaaggtgaggaatgacgcaaacatcgacctcgccgccctatgcgactccatcaccgaccctaaggacgcccgcctccgcgagttcgggccgttgtttaagaagacggttgcagattccaatgcgccggtacaggagaaggcgctcgacgcccttctcgcgttccagcgagctgctgacgccgatgcatcaagatacgcgaaggaggtttgtgatgcaattgtggccaagtgcctcactggccgaccaaagactgtcgagaaagctcaagctgcattcctcctatgggtggaactggaggcagcagaggtcttccttgaatctatggagaaggctgtgaagaacaaagtggctaaagcagttgtacctgctattgatgtgatgtttcaagcactcagcgaatttggaactaaggtagtgccacccaaaaagattctgaagatgcttccggagctgtttgaccatccagaccagaatgtccgggcttcttctaagggtttgacactagagctttgtcggtggattggcaaagaccctgtaaagtctattttgttcgagaagatgagggatactatgaaaaaggagctggaagcagagttggcaaacgtgtctggatttgctaagccaactcgaaaaataagatctgaacaagagaaggaacttgaggaggaggctgtgccagagacaagtggggctaacacttctgaagaggctgtggcagatgcccctgtggagatcgatgaatacgaccttgttgatcctgtagacattttaaccccactagaaaagtctggattttgggacggtgtgaaagcaactaaatggtcagagagaagggatgctgtggcagagctaaccaagcttgcgtcagcaaaaaaaattgctcctggtgattttcatgaaatttgccggacactaaagaagctcatcacagatgttaatttggctgtttcggtggaagctactcaggcaatagggaatttagctagaggtttaagagcccatttttctggaaatgcccgaatgctcctttcggttttacttgaaaaattgaaagaaaaaaagccgacaatgacagaagcactatctcaaacacttcaagcgatgcacaagtctggctgttttacacttattgatgtgattgaagatgttcgagtggctgtaaaaaacaaggtgccccttgttcgttcctcaacgctgacctgggttgcattttgcattgaaacaagcaataaagcgactgtactaaagttgcacaaggaatatgttcctatctgcatggagtgcttgaatgatggtactccagaagtacgagatgcttctttttctgttttaactgccatagccaagatggttggtatgaaaccattggaacgatccctggagaaattagatgatgtgaggaaaaagaagttgtcagatatgataggttcttccagtgacactgttctgagttcagggacagtattatatgaagatgtttgcaacctgtcagccttcttctcccaagtgcctatttacagttcttatgctgcgttgttttttttgaaattaccatttgtgattgtgttttgttag

SEQ ID NO: 38319 - DNA, 1460 bp, Zea Mays
tgtatactagtagcagtcatggagtatattgcatctcagatcgcactgaaccagtggaaactaaatgtagcaaaagtcagcagcaggaaaagatagatgaaaaaaaaacaaagagggctgcctggaggttaggcgtgggcgcgtaacacacacatggcagctagccggcgacgatccaagagcgggtgcgtggcgacaggctggtaccctgttgccgtcgcctccgccatgttacgttccaccacctctcctctccactccacccacccaacagctgcccccaccaatcacatcacacccagacacctcctacttatcttgcgcgccaagggccagcgcgcgagcgacctcacttgatccgctcccttcgccgcgacgacgttcctacgcagctgcggtcgacgcgcgcacggcagctcgctcgctagctgatcacgacagctcgctcggctcgaccgaatggcgccgcggctgctggcgtgcttcgggcgcggcgtcgcggcggcgccggacgacgcgactggcgagggccagctggaggcgccccccgctggcccggtgctggtggagctgttcgggtcgcaggggtgcggggcgtcgcccgaggcggacgccgtggcggcgcggctggcgcaggactccgggtccggggacggcgccgtcgtggtgctggcgttccacgtcgactactgggactaccgcgggtggaaggaccccttcgcgtccagcgcctggaccgtgcgccagaaggcctacgtggaggcgctccgcctcgacacgctcttcacgccgcaggtcgtcctgcagggccgcgcgcactgcgtcggcaccgaccaggacgcgctcgcgctggccgtccgcgacgccccgcgctaccccgcgcccgccatcaagcggccgagccccgcaacactgcaggcgtcgttcacgggcaccctgcgcagccgcgtggagggcccaggcggcgcgagcgtgctggtggcgctgtacgagagcgggctggtgaccgactgcgggcgcggcgagaacaagggcaagtcgctgctcaacgaccacgtggtgcgccgtctcgagaaggtggccgccgtgcgggagggcgcctcgccgaagaagaccgtgtcgggcaccgtccagttcccgctctgggacggctttcgcgccaccaagtgcggcctcgtgctcttcgtccagaacgccgcgctgcaggtgctcggcgtccagcacttcgacctgcctgacaacgtctgagctcgtgacgcggtggggcgcgcgcgcgttccgcgttggctgcctccctgcggcgggcgtcacattctttgtatcactgtatgtagtacatcactggatggtatttagatggaaaacctgagtattctttatctccacgtatgttcttgttctgcattatggcaatggatcttctgttttgcacactaaacttattgtgtggtaaagtggcc

SEQ ID NO: 38320 - DNA, 260 bp, Zea Mays
caaaggcgtcgcggcatcgagccaagagagaagccaccgacgccaatccgcgcatttgtcgccgttagttcttcacagagaggtcagggaagacggccggggtacaccgatcgctcgcgtagcatccttgtaccgtggggttgatcggagtcatcgcaattgcttgctgtcgtttcgtcgtgccaccgtggaatccgcgatccaccgttgccatctccgtcagtgcctccaccatcggtcaagaacatgtaccactcgag

SEQ ID NO: 38321 - DNA, 872 bp, Zea Mays
tggtcatcgccagatgagaaatgtggtctacctcaaagcacaaggacacatgtatgaagaacaaaattagtcgtgaacaagtaaagtttccacaaggcacaggctctcaatcctacgttgcaaaggcatactcattgaagcaagaaaaatttaaagataccgaacctagtgcaattgatcttttcaaggagatgcattgcagcaagaagaaagggtttagtgaaactgtccagaaagctattgttgacatggaatcaatggcagcaacaccagttgaagatggacatcattcaaagtcttcaacagaagtagtctcccaagtgctgcctaaatcaagtttattccttcagaatgtaggcttggccacctctaacagaagctcttcaggaaatgtttcagcaaaggtgcagcaacttgagtctcaattggagactgagcggcaagaaaaagacggactacgagatgaagtccaaagcttgaaggctaagacacaggcatctgacgagaccattgctaagcaatctgatgagattgcagatttgaagaagtccatagcagaaaacaatagcctccttcgccagattttaagcatcaatcgtagccaagtgtctccttaaatatgtctgccaacttgatggtgtcaagatacatcacataccagatggaggactaaagttatatgagcttaagttacatgtttattaggatttatgttattggagtccaaatttgttttttgtttaaatacttgtgctcgatgaatttttggacgaatgttatacttggaaattatataattttggtatttcaattggttttgtttgatgacatattgtatgcatgatgaaacaatcgtgagtgcaaattgtgtg

SEQ ID NO: 38322 - DNA, 3470 bp, Zea Mays
gtgcggtcggagcggtggaatcgaagccctcctctgaaaaatccctttcttcgcctatcgcaccgcatcgcgtttccgatcatctgtccccgcaccggttcccccatcctccccaccttccttgcgtgccgctgccgcttccacttcctcagttccctctcccactccactcgattctcgatcccaagcagcggcgcacggcgcaactaaccgatatatttttctatattcgattgcgtgccgctttacatccacgccttgaagaaggtaggagaagcatataattgaaagaagcatacaatcatacaccgaactgatcgaagaggggaaaaggggacaatcgggcgatggaggcgtgctgctgctcgtcctcatcggcgccgtcggcgtccatcctcgccgccgcgccggacgtagccctccgccgtcgtatccccgcggcggcgggagggaggacgccggcgcgcccgctgcgcgtctccgcggtgatgctggccaccgcggtcccgcggcggcgcggaccgggcgtcatcagggcggtgttcgagcggttcacggagcgggcggtgaaggcggtggtgttctcgcagcgggaggcgcgcgggatgggggacgacactgttgcgccgcaccacctgctgctgggcctcattgccgaggaccggaccctcgtggggttcctcggttccggcctccgcgtcgagcgcgcgcgagaggcgtgccgcgacgccctgggtaaggccgggcctgcgcaagcggccaccgggctggccacggacgtgccattctcggctgcaagcaagcgggtcttcgaggccgccgtcgagttctccaggaacattggctgcaacttcatctcgccggagcacattgctctcggcctcttcgacctggacgatcccaccaccaacagaatcctcaagagcttaggagcagatccaagtcagctagcaaaacaggcacttaaacgtgtccaaggagagcttgccaaagatggcagagagccagtggggttatcttctttcaaagtacgtgagaggtctgccgcgggagctggcaagtctgcaattgtcaagtattcaaataaaaagaaagagaagagtgcactagctcagttttgtgtggatttgactatgcgagcaagtggaggattaattgatcctgttattggtcgcaaggaggagatcgaaagagtagttcagattatatgccggcgaacaaagaacaatcctattctgttgggtgaagcaggtgttggtaaaacagctattgctgagggcttagctctcaaaattgctaatggtgatgttcctatcttccttgtgggaaaacgtatattatcattggatgttgctctacttatggctggtgcaaaagaaaggggtgaactggaagccaggattactagtttacttcgtgaagtgatgttatgctattcatcgatgaggtccatactcttattggatctggaattgctgggagagggagtaaaggagctggccttgatattgccaatttgctgaagcctgcactctctagaggtgaattgcagtgcattgcgtcgacaactctagatgaacaccgtttgcattttgagaaggataaggctttggctcgcagattccagccagtattggtgaatgagcctagccaggaggacgctgtcaagatattacttggtctgcgtgagaaatatgagacttaccataaatgcaaatacactttagaagggatcaatgcagcagtttacttgtcagcaagatacatccctgacaggcatcttcctgataaggcgattgatctgattgatgaagctggcagtagagctcggatggaatcatttaaaaggaagaaggaagaacaatgctccattctctccaagtcaccagacgaatattggcaagagattagagctgttcagagtacacatgaagtggcactggctaacaggttgaagtattctcttgatgagaatgacaaagatgatggtgttaatattgaagtcataggggacaacaagattgcttcgccatcgatgcctccaacttcagtcgatgaacctattctggttggttcagaggaaattgcaagagttacatcattgtggtcagggataccagtccagaagttgactgcagatgaaacaaaacttctagttggactagatgatgaacttagaaagcgtgtcataggtcaagacgatgctgttgtggccatatctagagctgtgaagcgatctcgtgttggcctgaatgatcctgacagacctattgcaacactactattctgtggtccaactggagttggaaaaactgaactcacaaaagcactagcagcgagttattttggatctgaatcagctatgattaggttagatatgagcgaatatatggagaggcatgctgtgagcaagcttataggctctcctccggggtacatgggatttggtgaaggtggaactttgactgaagcagtccggagaacaccattcactgtagtcttgcttgatgaaatagagaaagctcatccagatattttcaacattcttctccaagtatttgaagatggacacctgacagactcacaaggacgcagagtttccttcaaaaatacgttgattgtcatgacatcaaatgttggttcaacatcaatctcaagcggaaggaggagtataggtttctcaacacaaagggatacagaggagaccacctatgctgcgatgaaatcacttgtgatggaagagctgaaggcattttttcggcctgaattgctcaatagattggatgaagtggttgtattccaccctcttgaaaagacccagatgatggctattctcaacctaattctacaagaagtcaagagtagacttctagcccttgggattggcctagaggtatcagaatcaatgaagatcctgatttctcagcaagggtatgacagaagctatggggcacggccacttcgaagagccgttactcagctggttgaggatgttatcagtgaagcaattctctttggacagttcaagcctggtgacacgatattgatgggcactgatgccacagggaagccttgcttgagccgactcaatgatcagaccgtccaattgtccgacactgctccaacaatatgaacatcccagcaccctgtgtatatagttgcagattacacatttattctgtacatagaatccccatctcagcgtggacataatcttccagatgttggtttgtctccacaacattataatgtaaatcttatccttaaatccaattgtacatatttttattattaatgttagaccgtgttgcgtgtataggcctgaggtctagttcatgtgtagtgtatatattgtactctttttaatatttagctattctcatttatcatggtatgagactagctccaataaagatctctaaagagtcttgtaccctaaatttagaggatgaggtcgtcctctactccct

SEQ ID NO: 38323 - DNA, 3542 bp, Zea Mays
ccggactccccacgaccctacctttcttccttccccgatttcaccgccgccagctgtccaatcccgccgcccagcccccgcccccagaggttggaggtgcgagcgatagccccggcgcccccactgccattacccccgccgcgatgctcgcgttcgtgaggcgtcacgcgcacatcgtgcaacccaacccccttcctccatcgcggcagaacgacatcctccaactccggcggcctccatttccccatcctcttcaacgcgcggcacaacgacctcctcctcccccaccggcggcctccaccagaccaccaccccaccggtcgtcgacctcaaccgtccgttgacctcaaccgtccaccagaccacctcacctcctccaattcccgcgcccgcgcctgatatggaaggtccgccggaggactcgggcgtcgaggccatggcggagcagcaccccttctcccccctgcctcgcgcgcggcggccgagatggtgctggctgggttgttcgagatgatggtccttcccgccctccctgctatcctcgccccaaatcgacgagaatcatgcagcccaaatctgaggtggaggcgtctgcactgtcgatggaggtgtcaagtctgcagtggtgtctgtagatgggaaggcatggtgtgcagcggcagcggccaggtggtgtcgctgagcctgcccttttacgggctcactggcacgctctccacggccttcgggaacctcacattcctgcgtatgctgaacctgagctccaattcattccgcggggaggtcctagcgaccatcgttcgccttgcgcatctgcatgcgctagacctgagctacaacgccttctccgaattctagagctgcgattcctgaggccatggagcagcaaacaatatcaattgccaaagctgccattacaataatactcattttagggacttcatttcttgcagctgccaatccaattgcaggatgctatgccgctcttaagatgctcatgacatttcccaatgcaacaaaatatctgaaaacaattataagctttggtaaggttgatcctgggcacaaggaaaaagttgaacagatatgtagtgcattttaagtgcttgatggttgcgtggaagaggtggggggctaccgcgtcggctacgacatcaagctctccggcaccgagtcccctaggtcggtcacggggctcgagggcgtctgcgtccgtgtgctatttgcctgggtgctcatcaccggcgtcgaggcggccgatggagaggtcactgtccacatcgggccaatcaggaagtcgttccccgccgttgggttcaaatccagcccctggtgcatcatcggattggcgacgagtgctcgacggttgcgtggaagaggtgggaggctaccacgtcggctacgacatcaagctctccagcaccgagtcccctaggtcggtcacggggctcgagggcgtccgcgtccgtgtgctgtttgcctgggtgcccatcaccggcgtcgaggcggtcgacggagaggtcactgtccacatcgggccaatcaggaagtcgttccccgccgttgggttcaaatccagcccccggtgcatcatcagattggaggcgtggtcacttgtcatggggtggagactaaggatccaagccaatatcacggaccacaacatcaagtgtatgaggcagggcaaagaggccaacaggtgcagggtttgccgtttgcttgacgatcacacgtatcaaaaagggttctcaagtattattggtaaagtatcacaattagatatagcttgaagttgcattttacgcgttgagctatcacattgtagactaacttgtacagttttcttttgcagtccttcttgcttgctttcacatttggggtgttctgctataatttacgttgattatttttcccttgcaatttggcatgcatacaaacatttgctctctatttttctatccaacataattcatgatttaaataaaggaactatttcttaaaagtcttctatttagtttcatcctttggaaaacaactctgctactaatgtgctgccccagaccccagttttacttctatttgacctgccagtgaaagcatttggagattttcttttaatccaccgtgaagcaaattcatggctaaatgctgcaacgtttagtctgtagcagtgtcctacttcttcctacttattaattagttgatggctacttccgtatgagttaacaacttatatgtgagagggcgaacgagacagagttgaaaaccctgcatccatccaatctggacatacataaaagttgtcataaagaaaggcacttgtccaggaaaaatgttttattgactgtcctgctgttcctttccccgctaaataatgtatcaagttaaaacttagctgagataatgtcaacttaagcttttccatgtcggcatatgtgcttcccacaatcttcggatggtcttttttttaaaaaaatctttggcctgcttcatcaagaactagatttgatcatgttcttctctgtgttgatgaattatctacagtttagctataaacacatctgaaatgttagtctattgaaggatacttggatactgaagccatgcatctttaaattgttaacttttctttttgtggtttagtatggatgaataaaaggggaaaaagcaaaagggaacaagcatcctctgatttttattttgatgatgcaatcttagaaaccctacctgaactgaacacctcttttggcattttaaaagtgctgcaaaggaaacaagcatcctcttgcttttgtatctttagtatgttgtcggcatatgtacgctattatgtccttttttggttaaatatctattattcatgggtttgctgttcacatgaatcgcatatagctatcacctttgctgcattcaggttgatgctatgctccaagaattagaaaaggagattgatgatgtggatgcacaaattggaaatcgttggcaactgcttgataaggaccatgatggcaaagtgacccctgaagaggtggcggcggcgacagcttatctcaaggacaccatagggaaagaaggcgtgcaagagctcatcagcaacctttctaaagacacagaaggaaaaaatccttgttgaagatattgtgaagctagcatcccaaatagagaacaatgaagaggaagaggaagcacggtagatgggagagtatatggaaacatcacactcgttcagcagtcaaaactcatgtattgaaaggcaatacatccatttcttgtgtctcttgactgactttgatagtgacttccaattagcaaggtagattttctgtagaaaggctcatgctgacatgcatttagttagccgtcgtgttgtgatttggtaggtaaattgcaaccaaaatttagaccggttgcatggacgtggataatacagatcaattgtatttgttatgctactatgcaatcccgaaatattggatctgtttcaaattctcaagtaatcattgatggatgctatttattgaccataaagcttacgaaatcat

SEQ ID NO: 38324 - DNA, 302 bp, Zea Mays
gtgttatcttattctggccttagtctgcccgaggcaaagcttaccctgtcccatttccagggtatgcggctagctaagatagtccttgctctatcaagcctacatacgcattcaatccttaatcaacctgggtagaacatcacctgttcctagcccaagtctcgatttatgtatttccatccttaggattgtttctgttccttaggatgaaaagagcatcacagggaactttgcagtaagatcccaccatgctcccaatgaaaatatattcttgcaggtagaagtcatctttcctcaggata

SEQ ID NO: 38325 - DNA, 1440 bp, Zea Mays
cctaaatccttgtcgagccccatcgcaagttcgcaaccgcgtcgtccactcgtcctcatacattttgcactggttcatctacatcgtcgaccctgccaccgctgcgttgctccacgacgccggcgagtctttcgtctccgacgagccctccagctgtactgaagatcattaagcactgtgaggagtttgcgcctgctttagttacaggtcaattgcttggtttggatgtcggtagtgttctggaagtgaccaactgttttccattccctatgagggaagaggatgatgaagcagatgcagatggtgccaattatcagcttgagatgatgaggtgtttgagggaagttaatgttgacaacaatactattggatggtatcagtcttgcttgcttggatcttttcaaactgtggaactgattgaaacatttatgaactatcaggagagcataaggagatgtgtgtgcattgtctatgacccatctagatctagtcaaggcgtgctagctctcaaagccttaaagcttacagactcgtttatggatctttaccgtaacaatggtttaactggggagaagttaagagagaagaaattgtcctgggttgatatttttgaggagataccaataaaagtttccaactcagcgcttgtcagtgccttcatgaaggagctggaacctgaatcacctgttactcagtgtgacctggaccgacttaaattgtcaactgccccctttatggaaaggaacttggaatttctgattgggtgcatggatgatctttcatcagagcagaacaagttccaatattataaccgcaacctctcaagacaacagtcacagcagcaggcatggcttcaaaagagaaggcaggagaacatggcaagaaaagcagctggcgaggagccactgccagaagaagatccatccaatcctatatttaagcctattcctgagccatcacgattggaaggctatcttgtaaccaatcagatctccagttactgcaaccatatcaacggggttgctggtcagaatttcgacaggctatacctgatgaaggccttgcatgaggattagaagactgggttgtgactgaaggctgctagatttagctcgtgatactgcttaaaatcacaattttgcgatgtaccttacatgagcgcacctgtcttgtacttaatgtttccgattagatggttagcacacattttgacacacttcctaattataccagcattcttggtagtaattcaaaaatgatcactttgattacttattagttaatgtatgtgttgccgtataaaccaatgttctccattagtaattttgggacgcacagtttaaagtccatactgtaccttgattttgttcttatcatgtaagggtttgtttgttttgctcatactgtaccttgattttgttcttatcatgtaagggtttg

SEQ ID NO: 38326 - DNA, 316 bp, Zea Mays
ggcctaggagaaatcatgttgtgcctcatgtgcctaggaaaatgtgcaatgaacccactactgttttttatgcttgcaacacttcttttgtactttcatgtaagaatgaaaaagtagttgttaggaagttgggattcaaatgcaagggagacgacaagacttgtatttgggttccaaaaattattgtgactaaccttgcaggacccaacaagagttgggtacctaaaacccaagcttaaaattaccttgcaggtttatgcatccgggggttctagctggattatcgacagcagatgcacaaaccacatgatggggg

SEQ ID NO: 38327 - DNA, 1208 bp, Zea Mays
ctcgcgtgctcgattcccatctccccctccctgcgcacacccgcacaccaccaacaccagacgccgccgcccctcatcgctgtcccgtcccgcgcgcggccgccgcatccgtccgggcctcctcgtctccccagccccgctgccgccgcaaaaacctccacgaatcgccgacactccaacccggaagagccaacgaggtgactccgcgccccggtcatgggtgacagccaatactccttctctcttaccactttcagcccgtcgggaaagcttgtgcagatagagcacgcgctcacggctgtcggatccgggcagacctccctagggatcaaagctgccaacggtgtagtgattgccactgagaagaaactgccttctattttggtggatgaaacatctgtgcaaaagattcaggcactaacaccaaatattggagttgtctatagtgggatgggtccagattttcgtgttctggtgagaaaaagtcgaaagcaggcacagcagtattatcggttgtacaaggagcatatacctgtaacacagcttgtgcgagagactgctgctgtgatgcaggagttcacacagtcaggtggtgtaagaccatttggagtatcgctgttgattgctgggtatgatgacaatggcccacagttgtatcaggttgatccctcaggatcatacttctcctggaaggcatcagccatgggaaaaaatgtgtcaaatgcaaagacatttcttgaaaagagatacacagaggatatggagcttgatgatgccatccacactgcaattttgactttgaaagaaggatatgaggggcaaatttcctccaacaacattgaaatcggaattattcgagctgaccgtgagttcaaagttctaagcccatcagagatcaaggatttcttggaagaggtggagtaagttgtctgttgatgatttactgtttcaaacaagaatagcagcatcacttatgagcagccagcctgaagcttgtcttggttttatcactctgtaaactgatttgctccagcgacatgtcttggttttatcactctgtaaactgatttgctccagcgacatgtggttcttacatttgaaaccctcctgagcgcatactgtagacaaatgagatacgtaagatggatgttgtatttgacagtctctgcagtttgtttatgtgattcacgttcttgtgtgctgtatcg

SEQ ID NO: 38328 - DNA, 1389 bp, Zea Mays
cgctgggcgcagggtaaggctatgcggctgggttgcgctacgccgcgcgcacgccgggctcaccttcgtcacccttcgagaccgctccggcatggtgcaggtgacagtgttgccagagtacccagaggtttacaacatagtaaacaagctgagggtggagtcagtggttgctgttgaaggcgtgatccggccacgcccggtggatgccatcaatgcagatatgaggactgggactatagaggttgtggcacatcatgttctagtgctgaactcagtaactcggtcactgccgtttccagttacaacttctgatactgtaaaagagaagtttccagaagaaattagattgaggtttagagtgttggacttgcgtcgtccacaaatgcagtcaaacttgcggttgcgccataatgttgttaaactcatacgccgctacttggaggatgaacatgaatttgttgagattgagactcctgttttgtccaagtctacacctgaaggtgctcgggactatcttgtaccatcgagagttcaggaacattctacgctctccctcaaagccctcagctgttcaagcaaatgttgatggtttctggttttgaaaaatattatcagattgcaaggtgcttccgagatgaagatctgcgtgcggacaggcaaccagagtttacacaacttgatatggaggttgcttttacatctatggaggatatgttgaagttgaatgaagatttaatgagacatgtttttcaagcggtaggagatatcaagctgccaaacccttttccaaggttaacatatgcagaggcaatggatcgctatgggacagataggcctgatctccggttcgattgggagctgaaagatgttagtgatgtatttttggggagtagcttcaaggtttttgctgatacattggaaagtggaggcgtaataaaggcactgtgtgttcctggtggtgccactgttttttcaaacactgacctgaagaaaggaactgtttacactgaagcttccaaagctggagccaagggcttgcctttcctcaaagttatggagaatggggagcttgaaggaatcggtccactgttatcgagtctgaaacctgaaaagaaagaccagctcatggaacttctggacacaaagacgggtgaccttatcctgtttgcactgggtgaacaatcatcagctaatcagattcttggacggttaagattatttattgctcataagctagaggtgatagacacgtctgcacattcagttctttgggtgacagattttccaatgtttcaatggaacagtgatgagcaaagatacgaggttcaagaaaacacgattaggcgtgcgattaagcgctgagcagagggtcagcgcaccgcttaccta

SEQ ID NO: 38329 - DNA, 3260 bp, Zea Mays
cccctcccaacggcgcccttcctccccgcacgctacgacggccgagacgaacgcgcggcttcctccccaccaacggcgccctttccaaaagcctcgacccgctgctctcgccgagatcccgcgcgtagcacgcgcggcttccttcccaggctggcgagatgcctccttctacgctcgcgcatgcactatgcccctgtcgttgtccacctcccacgcccacgcatgcacccatcccctcgtcacgcaaaccatagtctcctccgcccccgtgctcgccaccgcgtcgacttcggtggagtccagcgatagggcgaggtcgtaccccgacgactcccccccccccgacgtgtcgtcctagcccgcacgctccgcctctggcaccgttgcacaccacgccatcctcacccttcaactcctaaactgtccagtgggagacgatgccgccctcggttcgcgatgccgcccactcccacacgtcgtcgcgcgaagccggcgctcacttcgggccagatctacctgcccgtgtggtgttgtgcgtacgaccacctcgtgaagatgctgcaacaggcgtacgcgcaggtcgaggagctctccgtcgagcgcgagcacctcgtcaatgagctctagcttctacagagccgcttccacaagcgcaagatctgccaggcctgcctccagaagatggatggatttgatcaaacagtgaatgtgaaggttgtaatggcaactaatagggcacatactctagattctactttgttgcggccaggtagacttgacaggaaagttgagttctctcttcctgattggcggtagaagaggcctgtgttccaagtatgtactactaagatgaatttgagtgacgaggctgatttggaagattatgtttgcagactggataagatcagtgatgctgatgttgagttggtttcatggcacagaccaaaaattttatgcatttgttgttttctaacaattgtattgctagggacttttgtcctgcgctggccaaagctgtcaaaactatgaaaaaggcagagaagctgctccttatatatagtaaagccattggtagaccaacagttggagaggaaggtgttctgatgagcatcatcttgttctgcatcatcactaatcaacttgttatgcacagtgtccgatgtgcctgtctcaactcgattgctaaggcatataattgacctaaaaaggcacttcaagcgggtaggaaaattcaaggtcgttctcaagtacttccaagtcggtacggtcgttgagcctgcatctgagttctactcaagtaggctgaaaaatagggaacgcaaggcaacattggttgacgagctgttatcagatcaatctctgaagagctacaggtatgctcatcatacttttgccattttgcatgtgcatcaatggacagtggcttgtttttcagtgcaagattttctataaaaattgcatatggtcttttgcaagatttcctggtgccttgtttcagagtccaaccatcataataattacacggttgtggtgtgtatatctaaatgggtttcactggttacaactaaggtgcatggttttaaagtcggctgactaatcgcgattagtcgcgattagtcggccttatcgcctggcatagcacgatcagcatggacgactcgatcagggcgactaggttacgactaatcgtcctggtcgccgactaatcacgattagtcggccgactaggtgccatgtccgactagcttgtgccaggtttgggcctgtaaaaaaatgtgtcctctgttatatgggctggcggcccactatctcctgtccacagtagaaagaagctctactgccactgtgccgcacagtacaagcacagtagaaagttagaaaccctaaaaccctaagccgccgcctctgcctcctctgccccggtggtcctcagctccggtggtcctcagctccggcgactgtctgctctctgctcccgtgctccgttgcgctcgcctctgctcagctccggcgctcgcctctgctcactgctcagctccagcaaccgtctgcagccagtctgttctgaactctgttcagagttcagtgctcacttcagttgttaatctcactatctgcaccctctgttctgaacttaaccgaaatgagcacctctacagatggtaatctccaaggtaagtgatctttaccttttacttttagtggaaacatcctttattttgattgcttgtactgctgtcctgctagacagctatagtgtactgctgtcgtgctacagttatattatattatatacatagggtcctgttataggtggacgactataggacgactaggagtcgactaggctcgactaatcgagtaaatcgacgactaatcgcgattagtcaccttatcggtggtcaggcgactagagtcgactagccgactttaaaaccttgctaaggtgttacataactgatagttaattagtatttttttatatgtcaagatatcagtccaacaggtttcttcgagatgcaattagcacttataacaacaacattgattttcttattagaccattaaattggtttcacggataaatttgttatcattcaaaattgtcttatgttgacattatgtatatatgctattcacaataacagagtcattcatgttggtgggcgtcttggatgaactacattttcttcaacaaagatggagctcatgcagattgatttagtccctttttgcaatgtaacatatatgtttcatacaaattttttactcctgttgcaacgcacgggcactcacctagtcatcttttaagagtggtatagcgcctttgttgcagcaggcagctacgtgcccacgtttggcgaggcgccatttccggccaccggccacgtcgccgcgcgcaggagagaagctaggcactacatgatgtcagccgaccaagatttttaaaaaaagatacgaaagcttgctacaaaataaaccggtccagtcacaagctagctagctagccagattaagtcgatgccgcactgcttgtatatgcattggattccatattgttctcttcagatggacatcaaatgttctgttcattaattaaggttaatcagtggcatcctatgtggaatcgtccctgcttacatgcatatatagtgcgtgcgtgcattatatgtatccattccacatgcatgcatctgtttcaccatctttaatttggatgcttatgcatgcatgcttctttactttgattattgtttttt

SEQ ID NO: 38330 - DNA, 1129 bp, Zea Mays
ggaagactgtcttgctgctgattttgagttcgagtttacaaatcagatgtgggcttttgtgcatgatcgttatgagcctactgtatgtaaacaaagaattcttacggaaccgtagcatggatgagaatcagctagctcagcagatgtggaatagtgtagctgcaaatgacaagaaagcagcatacagtctcattgtgagatcacgcgccaatgtaaatttagttcatggagagatacattctagcccatttttgactctcggaaaagcacttcagcaagagcaaccggcttcaccacctgttggaagtcctagatttttcgattgcaactcgcatgacaagatttctcgagagcccctttcccctgctagcacgagttcatgcagagatggcatggaggacggttgcgaaggtctctccttgctccatcttgcatgccgtgttgcagatgttgggatggttgaattacttttgcagtatggtgctagtgtaaacatgaatgattctatgggtcggacaccccttcatcactgcattctgaaaggaagacatcggcatgcaaagcttctcctctccagaggtgctgattcacaagccatggatcgagatggtaggacagcattacagtatgcaatcaatggcggaacaagtgacgaagacattcttgcgttattacaggatcatagtagataatcttgcaaccaataccttcagtaaatcgaggcactcttggtgtggtcgactcaactaacaaggcaccagccccgccaggccccagcttgtcgtgcagacaatcctaaatttatggcatgaaagcaacctatgtacatgtcgttatagggcttcagtatcatgacgcgcctgttgtttcttcccccaccttgtgcttgtttaggataagtcatccatatttagtcatctggcaaacggtttggttttgtttgctgcaggtgatgcatagtaagcctgtaaatggagttatttctctttattttctagtcatcttccgtcacgaagtagatttggcattctgatgaaagatgattgtacatatcgagatgtgtgatgttggggacttgttctcaaatgctatgaattaagaacgaggcaacataaaatgttaaatgatt

SEQ ID NO: 38331 - DNA, 3285 bp, Zea Mays
ggcaccgccggcggccgcacccccggttgcccgcccttgacacccatcactcgaccccacccgaccgccctcgccgccgctccactccacaaggtgctccgccccagcaccggatccaacaagccagcctaggcactgctgctcgagccgactggccccgagacccgtggaggagaagaaagctgtggtagcagccagtgtgatgaatgatgtggcggcatgatccgaacggcttcttgttcttgtccttcccgggcgctgccactgccgctccttgtttgcatccttcctgcgcaagagcaagaagactggaagagtaatatctagcagtggtgaaatattagaagatgaaatgagccacaggggaggccttacttatggtaggattcccacctctagaaaggctttagccagcagttggatggatcagtctacccttgttggacgtgagtcacaaatgaatgaacttcgtaagtatcagaccacggcccgtttcaaagattggcaagtgatgtctgtgtggggaattgctggtgttggaaaatctgatcttgtcaaaaatttgtactatgaaaggatgcttaaagaggacccaatgtttgacaagtatggttgggtccacgtgtcccatccattcaatttgagggacttctctcggaacttacttttggattttcactcagatgccgtgggaatcagagaccctattcaggagtgtcataagcttctaaaagaacatcagtgtcttgttgttattgatgatctacagtctgtggaagaatgggacttaatacgacctgcacttgtatctagacattccaagagtgttatcatcgtcattacaacagatgaaaaaattgccacgtattgtgcagacgatgaagaggtcgtgtttaatgtgaaatgtctagaagctgaagcatcctttgatctctttaaaaaagaggtacaaaagaaaagccaaacatcccctctgatgaattcaaacaacaaggagctagaacaacttattctaaaatgtgggagacttcctaaagtgatagttgctgtagccaaatttttggcaccaaagacagttacatgtatggacagcacaaaaacactgaatcacagatttatgcaggagcttgagagcaaccctgagttcagtgttctgcaagatctgtttgcttggatgcattcttacttccgtgcttgcccggattttctaaggccgtgtatcttctatatgtcaatcttccctgggtcccaaatcattcgtcggaggcgtttagtgatgcgatgggttgcagagggctactccagggatacaaaagacatcactgcagaggagaaaggagagatgttcttctcaatgctcgtcaatctaagcatgattcagccgccaacatgcagggtcatcaccgacatgaaaatggtcctatgtcaagttagtgctttcttccatgaatacatcatttcacgtccagtggaagaaaatataatatttgcactcgaggtctttgcactgaaggggcgttgccttccaactaccggacgcacaggacggcaccttgtaatagagaggtgctgggacagggataggattgtgttcgagagcattgacttctcgcgcctgcggtctttaacagtgtttgggcagtgggaatcattcttcatctctaaaagtatgaaggtgcttcgggttcttgatctggagaatgccacaggtgtgacagataaagacctcgagcagatggtgaagcttcttcctcgcctcaagttcctatctttgcgaggaagtactggtatctgccaccttccgagttcattgggtgagctgcggcagcttgagactctggatattaggggtaccttcatagcaaaattgccagcatcgattaccaagctaaagaagctgcagtacatgcgtgctggtacaatatccctggcaaaggaatcatcaacatcttactcttcagcgtctaggttgccaaacctatgcaaatcttgtaaactagttggtgttgagatgccatcagggattgatgaactgacaccattgcacacgcttggtgttgtcaatgctggtattggagggggcaaggccactctaaaagagctgaagaagattacccaattgcgcaagcttggagtgtccggtgtcaacaagaaaaataacaaggaattctgtgctgccatctcatgtcatgtccgcctggaatccttgtcagtgtggcttagcaagggaaatcaaggtttgaatgaaatatcgtctcaggataagcctctgcaaaaccttcagagccttaagttatatggtcttggaagtgaggtgccagcttggatgaaagatcttcccaaactcacaaagttggatttgcatatgaccatatcagcagaagttgacataattaaagtccttggggaaataaaagaactatgcactctacgtctttgtgtcaagccccttcaagatggtgatggtaagcttgatttttgtgtttgggtgaatggaatacagcagcgctgttatttaaatctcaagatcctcgagattacttgcagttcaaagttaaatatatcctttggatcagaagctatgcaaaatcttgagctgctgagagctcgctgctgtagtggatcgacattgaagtttatggagataaagaatctctctaaacaaaaactcaaggaagttcagcttattggttcccatgacactgcactcaaggatgacatggagaagcaactgaaggaacatccaaggaaacctcctttgaagctggaggaaccggaaggatgctgatctcagtatttagcaatagtattattggcgctaatcctatgtgaaacatcttactctgcttcatttcttatcactaggagaagcaactgaaggaacatcttactctgcttcattcaagatgtcatgataattggcgctatcctatgtgaaacatccctaggagaagacattcagttcatttactccgtacatcaaacgccgagcttcagcttatgtaactccataaaggatgttcacttgtgtgcatgtttatggatttgacttatgcgttgatgtagtaatcgttttgtaattttgtgttagagtaatgttagggttttgaggttagccccttgtaattactgtcacacccttagagctgatttggtgaccggggatcccgagggaaagaaatcctcttgctattcaaaattgaattgcaagggaattcctcccccatggatcccctagggatccctaatcaccaaatcagtccttatgtaatggattaggcccaa

SEQ ID NO: 38332 - DNA, 1808 bp, Zea Mays
atggagaaatagactgtgacggtggaggcgccttgcaaggacctctccgcccatcagtgccaggacgcgcaagagccatcgcaaatccattttcattccccttcggatgcagcgacgtggccttctgttcatccttcaagctagcggctaaaaaggcatgaaactgggtgtttagggtaggaacgtggctacttgtgtttgtgtctgattggggtcgcaggaggaatccatgattagcatcgctgatgctttgtgtcagtctccaaacacggaggtttatgtttcgcagatccattcatgtccgattcattagacaagttcagatgattctgctggtgccataggtgtgaagtacttagtggggactggggagtgggcggacaagattttcattatagccatataaaatggagtgttccaattcaactagttcccaagggcatcatgtaggaaagtggaatcaagtgcaaatcattgatccttccattgttgaaatgggaccaagtcaccttccactgagtttcatgagaagatgccgtggagtattgtgtttggtgattatgatattaacagcatttatgatgatggtatacctgtcccctgttactactttccttgtgaggttgttcagtgtgcattacagcagaaagtctacatgcttcctgtttgggatgtggttagccatgtggccttttttgtttgagaagattaacaagaccaggtttgttttctctggtgaaagtgtgccagcaaaagagcgtgttctgttatttgctaaccacaggaccgaggttgactggatgtacttatgggattttgcattgaggaaaggccgcttgcagtgcatcaagtatatccttaagaaaagtttgatgaagttacctgttttcaactgggcatttcacattattgagtttattccggtagagagaaagtgggagattgatgaagcaataatccgaagcaggctttctgaatttaagaacccaaaggatcccctttggctggcagttttcccagaaggcactgattatactgagaagaagtgtatcaaaagtcaagaatatgcagcagagcatggtttgcctgttctgaaaaacgtactccttcccaagacaaagggtttcaattgctgtttgcaagtgctgaggagtaccatagatgctgtgtacgacatcacgatcgcctacaaacaccggccgccgacatttctggacaacgtctacggcgtgggtccttcggaagtccacatccacatcagcagcatccaggtctccgacataccggcgtccgaagacggggtggctggctggctggtggagcggttcaggctcaaggacgagctgctgtccggcttctccgcgctgggccacttccccgacgaagggaccgccgagggggacctgtcgacggccgagtgcctcgcgaacttcgcggccgtggtcgccgtcacgggcctgctcgcgtacctgaccctgttctcgtccgtgtggttcaagctcttcgtggcgttcagctgctcgtctctcacgctcgctacgtgctactctgtacatctgccccagatggtaggttttggctcaggtacccctgcgagcatccacgcgaaggaggcttgagcgtagtagcgttgtgactgtaactgagagctgtatgtatgtcagcagagaatttggtactgctacctggacgcggcttttgtatcaccacgttgctgtgtgtagtatatgtgttggtcaatgtgtttttgctaccgccatcttttatctggttcaagtaattgggcgtattcgttgcctaaggttttg

SEQ ID NO: 38333 - DNA, 1724 bp, Zea Mays
tttttcttttgcaattaaacctggtcctgcattgtttattgagccgtctcgctgaggagggggctcaagttccccagaggaccagtgcttgatgggttgacgtcgctgggccctaaggttctctcgatgctgattaggggagctgcaccgccgcgatcagcctcagcttcttcttgctgcacgagaaccatagatgcttgatctcttagaggctgctgccctgcaatttgtcttcacgaatttagttaattgaagctgatcgagaggtatttgagagacaagaggggtttcagctggcaattggaaatgagaaaaatgcagagggaggagaaggggatgatggattgcttctttggaactatgctatataaaagatttttttctagcttgacttctagcattggctgaggcatgagcatggacgactgagcatgtaatagtcttcaaaattctgctttagttctcatataatctttgttccactctccccgtgtgctatgccatgatctggaatcatctctgaactcttcttgaatactgaatattctgatactgatatcagaacatgtatttgtttaacaaaaaattatatcctgacctactgtttccagatgttcgcgtacagggagacggtgttggaggaggcacatcggggcatggagctgcgtgagcactgccgccatatagttgacaacgatgaccgacactatagattccattctctgtgtgtacaccaaggtgctcgaaccattagttgggctaaggaacacggagcagcagcaacaatatcgtaaggagagtgcagacgttggacaaatggtatgccatatcttcagttctcttatgatgcttcagcgctgcatcttcagttttctcggctaaaaagagatcatagtcaatagtatacctatgtgtgaaatactgtcaaacttgcatggtatatggacctcagaaagtataggaaagcgctatgctatttgcatgtttgctgggagaaagaaaagatagatgaagggaagctcatgttcatttcagcaattcagcttcaaccatttggcattcatgtaatatttcataggagttaaagggcacatacctaatcaagtctgtgggtctccaattctgaaatagaaagataatttatgttctcatctttctgaaatgaacaagatgactggcttatgggttaaggtttttttatagagcaccatgacttatcagttttgtgaacaaccctaacttatgtggtcctggcaccacaaaaccttgtcctgatgctcctcccttttctccacctcctccatacaaccctacaaccccgatgcaatcaccaggaagtagctcttccactactggagcaattgttggtggagtggctgctggcgcagccttgctatttgctgttcctgctatcagttttgcctattggcggcacaggaaaccacaagagcaagcatttttttcaatgtatctggcttcaaagttagtctttgattattatctttctcgcaacataagggcaaacaatgtttatatgtagcaaacaaatacggtttgcaaacgttttaggaacatgtttttacaataaagatatacttatagtttcaccaatggatggccaaaaaatacaaccttttacatttgtcaaccttttagttaaggaaatatagaacaacagcaagtagattttgataaacccattagaatctcaatataaatataga

SEQ ID NO: 38334 - DNA, 1909 bp, Zea Mays
gccagttcccactatccggtcgacatttgagtatttgacgcgttttgtttgctgtttagaatttgacaaaatccatccactcttgcctctgtcttctcaacgtaaagacaggcagggcgggcacgaagcgaagggaccagccagcgagcggctcgccggcgacgaccctctccccgccccaccccgcccacggaagcacggagaagatgtccgccgcataccctcgtctcctcctctgtctcctgaccctagccctggctctcgcaggggtcgccgcgggcaagatctcggccccccgcaccccgatctcgcgcgacatctaccactccagagctgtttgtagttacatttaatcatgtgaaggagcgcatggataatggctcaaaagttcatatccttctgaaaggttcattgtcttccagagctttgggcagcatggcagagaacttatcacctccgaagttgcattacgtcttctctatgttttaacggagaagcccaagatcgctggtgtggatatttcatcctttgagaaactgctggagaaccttgtgatcaaagttgtgccgatggaaaatatgaatggtcgcaaacgtgtcgaagaaggggagctttgtgataggagaaatggaagaggagttgatctcaacagaaattggagtgttgactggggaaagaaagaaaaagactacgacccatacgaggagaatcctggtattgctccttttagcgaacctgaggcccagatcatgagggaattatcaaggtcgtttaaacctcatatttgggtgaacgtgcattctggaatggaggccttatttatgccatatgatcacaagaataccacaccaaatggagcatctgcacattcgatgcggtcagtcttagagaatttgaaccgtcgccatttccaagatagctgcctagttgggtcaggtggtggatctgttggatatcttgcacatggtacaacaactgattacatgtatgacattgcaaaggtgccaatgccgttcacctttgagatatatggagatgagaaagcatcttccgatgactgcttcaaaatgttcaatcctgttgacaagaaaacattcgacagagttgttaacaagtggtgcatggcatttctcattctcttcgaggaaggcctgcgaaacctgcgagacgcgcagatagtgtcgcaaggcacgctggaaaactgggtcccaattggaggagacatcgtcgagataaatgtggagcggaagagcagcatccgtgagaggaggaagctggaaggcctcgaccttggaatgcaggagctaaggacatatttccggctattcttgctgtcaacattcctgttgatgttcatgttctgcgcgcggatatcaaagaacagaaaccgagactcaggtaacttgtttgacccttgaatgaagtaccaaagagagcatcggtgggggggggcctcctccgagctgaacttcgggtgcaaagagcgatcccctcagatcagacgaacaaagcgatctgaaacattcagagctggaatacagctctgccttcgcaccctggtattcggagctggacgtcccgtatactttggacacgaaggatggtggcaggcagtgtctgtttaggttacagcagagacgccagacgatgtggctaactgtttaacaaaattgtagctgtaaaaatcgcccatgtcagtttttttttggtgatgcataggttttactactacattttgatggaaggttgttagtgcacccaacacttggtacggtgccatcagttgatgtaacatctcactgatcgagcggtttatgtggaattgtgttggctcgaatttcttctgggttctcaaattcatttcgtaactttcaaagtttaaatatttatatgtatacatatatttaag

SEQ ID NO: 38335 - DNA, 1937 bp, Zea Mays
cggtgtcagtgcgtcactactttccacacgcgcctctcgccccgtacgcagccgctctctcgtaaatcgtgatcttgtctgttgctctgctcttcgttcttcgcgtccgtccagcgacatcgtgcgcccggcaaggcaagaggcaagctgccccacttccagttactattcgagggagagagagaaagagaccactaattaccttgtaaatcccccgtagccgtagcgataagaacgcaaacccatctgtgtcccatactcccatcccacgaggcggcttgcgcggggggcatcgtgcaatggcgcggcggtgcccgtgcaggctgctgctagccgtggcggcggcggccgtgctcgtggccgcggcagcgcaggcgcaggagacgtgctcggggaccgtccccgcgccgccgcgccgcggggcgcgggtgtccgtggccagcttcggcggcgcgggcgacggacggacgctcaacacggcggcgttcgcgcgcgccgtcgccagcatcgagcgccgcgccgcgccgggcggggcggagctctacgtgccgcccggggtgtggctcacggggcccttcaacctcacctcgcgcatgacgctcttcctcgcgcgcggcgccgtcatccgcgccacgcaggacacatcaagctggcctctgattgaaccgctgccctcatacgggagaggacgtgagctgcccggcggaagatacacaagtttaatccatggcaatgggcttcaggatgttgtcatcacaggcgagaatggaactattgatggtcaaggcagcgcgtggtgggatatgtggaagaacaggacactgctctacacaaggcctcaccttcttgagctgatgagctcttctgatatcattgtctccaatgtcgtctttcaggattcgccattctggaacatccatcctgtttattgcagcaatgttgtgatcagaaacgtgactatcctagctccacatgactcccccaacacggatggaattgatccagattccagcagcaacatctgcatcgaggattgctacatttctactggtgacgattccatcgccatcaagagtggctgggatgagtatggaatcgcctatggccgcgccagttctggcatcaccgtgcggcggatcacaggctcctccccgtttgctggcttcgcggtcggaagcgagacatcaggtggcgtggagaacgtccttgcagagcacttgaacttcttcaactcagggtttgggatccatgtcaagaccaacacaggcaggggcggcttcatcaggaacatcactgtctcggatgtgacgctggataacgtccggtacggcctgcggatcgttggcgatgtcggcaatcaccccgacgacagctacaaccggagtgcgctcccgatcgtcgacgcccttacggtaaagaatgtccagggccagaacgtcagggaggctgggctgatcaagggcatccccaactcggccttctcccggatctgcctgtcgaacgtcaagttcactggtggcgcacctgtccggccgtggaagtgcgaggctgtcagcggtggcgctctcgacgtgcagccgtcaccatgcacagaactgacttcaacgtctgggacgagcttctgtacaaattcgctttgatgctttgccagctagctgagctgctgctatgcttctgtatctacgagtatgtatactggtgctttaaagcttgggcacccaagtatttatcttcccgaaaattaatttggttttactaatttatttgaacctctctatacgaagagaataattcttgactcgtataggactgaacaaaaaagtgtcactggttttcttatttacctgactcaatgttttattcacaaagtacttgtttctaagcatgtcctacccacatcctctccttattacatagctcgaacttgaagagctatc

SEQ ID NO: 38336 - DNA, 1004 bp, Zea Mays
ggttgtttcttttgttctctcggaaaatgacaagatttatcaggtcaaacaatggacttcagaacacagaacaacaaaagatatccaagtatatcaacacacatgttacagaggctttccctatgagaaaagcaggaaagtttggtaacgaaaattgcaagaactttaggggtcatggcgactctgctaagttggacacttttgttccatccatggaggctgcaaaaccaggtttcaaggaagttgagaaatggagtgaaaatgctttgtggagtgtatctgagcttcatgttggcgatgagaagcagactggttctaacaaatctgatatggaaagagtactaaaagggtttggagcttgtgatgcttttgtggcttctaggctcaacgcccctaatggacaagttggtggtattacgtttaagtcttcagacattgcccttctaatatgattgttcgtaggaaagaaagctcctctggattttgcctcaaagactagcttgcagtttgtttcattgtcaccagtcaagtggtgggtgtgcactagcttctcttgctgttgtgtatcgaaattttgccagttagaaattgtattaacattgtgtctatgttgcctgaacctataacatttcctcagtttggaattgtgttctatttttctgcattttagagctgatgcatttgctgctttggcagccataagtgtacatctttttaaagtagcatgctgaaggttgcaaagctaaattgtctgttgttcaatgaaaataacactcttcaaccaaatgggtcctagatattttttaatattttgtggagtaaagtagaccagtcatttaattttgtgtaggggggtaattatcttaactttttcattaattggttatatcgtaccatatcaaggttagtcgaggatatgaccgctctgacatttgttggcagaaatcccaacaagacacggagtcaaggtttcctcaattgcggatgctcgcttgctgctatgt

SEQ ID NO: 38337 - DNA, 1470 bp, Zea Mays
catgaacagtagattgcgtgggatgcgtggctcatgttatcttgtttgctgtcctgtgaacctaaattcttctttggtgggaggctcatattcggacctgacgccaagtcactgatcctgtctgtttcgctcattgtggccccggtgctagtcctgctcttgattacatcagcgcaggatcctgggatcgttccccgcgcagcccacccgccggaggatgagttttcttatggcaacgctttgtctgggggcacgcctgggaggctacaattcccccgtgtaaaggaagtactggttaatgggatgcctgtgaaagtgaagtattgtgacacctgcatgatttatcggcctcctcgatgctcacactgttcgatatgcaacaattgtgtagagcgctttgaccatcattgcccctgggttggacaatgcattgggcagccttgtacatcaagtttctcatggatgaggattatccaacagtatggaaggctttcaaacactctcccgcttctttggggcttctgatatattgtttcattgctctctggtttgttggtggactcactggatttcatttgtacctcattagcaccaaccagaccacgtacgagaatttccgatacagatcagacagcaggcctaacatctatagccaaggatgtctgaataactttctacaagtcttctgcagcaagacaaaaccttctaaacacaagttccgggcctacgcgcaagaggaagtgcggcctccaacggttagcttcggcagggaggtcgatgaggaaccggtcggcgggcctcggccgaaagttgaggacgatcttgaaattggtaccgatcttctgaagatctctcagcggcgcaactacgaggacgtcgatgcagaaacgggaggccgtcgcagtcgcagcagcgaggtggaaggcacggccagtgccagacctgctgtggcgtgctcggagtcccagatccctgcggtcgggggtactgacgtgagggtgcggcactcgagctgggaccggcgaagcgggaactgggacatgtcggctgtgcttacgaggagcgcgtcagatgtgattggacgtagcagcgtgttcgccgcggacgctgcacgtccatctctagaagagactcgctagcgaactgtgtctgtgcatccaggaaacatgtgcgagcggttcggatagcgaggccatttgactcgtggtggtggtgacacacacccaggtgttttggctttggctgccttgattgggtttttgttaccgacccttgtcagttgtcatgtatggacagttatttttagtcagagaatctgcccccattgttgccggcatgttcgtgtgcctgtaaattgcaaatgcaggatcctcatcaacttcaattcttattgggctgtttctttgagaatgcgtaatgtgaaaaagcatctggcctagctctttataggaatggatgcaattttaaagc

SEQ ID NO: 38338 - DNA, 879 bp, Zea Mays
ttttgttttttttttctatcccacggcggccaagctgtggaaacgagggagacgaggaggacaagggaaagaaagcctaccggctcggcggctccggctcacctcccacacccccaaaaaaaatctcgcgtgccgccggcggccaccaccatcactgccatgatcagcatcctcgcgcaggagcgcctcctcgggttcgccctgggttccgtctccatcggcggcttcgtcctccaccagcgccgggccatctaccgttcaatcgctgaagccgacgggtcgccctacttttaccaggtcagcatctggttacttcctcctagcctacagcccagtagccgtctgctttctgaactagtgtgacgattcatggcttaattttacataggaactgtgcacgacaaacttccatcagaaaagtgttgttttttgttttgtttataacgtgactttttgccgctccctagcttgacaatagacaaactataatctcagcaggtttcatttcttgggggcaattacagattgttagcttgaagaattatcttggcctttttatgacagtgcagtaaaaatagtccttcgatcaggcagacatcgcaaacacatataataagaattttttttcactcttttcactttgtacaacatattttggttgaaaaaattcaacttctaagttttggcaacaattcatcaaattatactccctctaatatttgaccaggatttaaattttgtcccaaaatacttgacactctgacttcccaatacacctttatcttttatcaatgcacatttttctcttcccaatacatctactccctccggtgtcctattgtttgtagtttagggcaacggcacggtctccaaaatata

SEQ ID NO: 38339 - DNA, 1934 bp, Zea Mays
aataattggactaactagtttgctctagactataagttttacaggtgccaaaggttcacaataaaccaataaaaagaccaagaaagggttcaaacaaagagagcaaaagacaactgaagtgtgccctgatctggcgcaccggactgtccggtgcaccaccggacagtgtccggtgcaccagggaacccaactccgaactgctcaccttcgggaattctggaagccgctctgctataattcaccgaactgtccagtgtagcaccggactgtccagtgtgccagtggagtaacggctactacagcgccaatagtcgtctgcaacaacagttaatgtgctacagtgcgcgcagaagtcagagcagagccagaaggcgcaccggacagtctacaggacatgttcggtgcaccaccggactgtccggtgacccagatgtcagaagctccaacggtcagaatccaacggccgggtgacgtggctggcgcaccggacatgcgacagaagccctcaccaacagttcttttggtggttggggctataaataccccccaaccaccacaattcaatgcatccaagttttcagccttcaaacaccttacgagagctataacattcaatacaaagacacaaccaaagagattaaatcctctcccaagtccaaagatcattccaatcaaatagtgactcgtgagagagagacttgtgttcatttgagctcttgcgcttggattgcttttcttcttcattctttcttgtgttcaactcaattgtaaccaaggtaagggacaccaatcgtgtggtgatccttgtggggacttagtgtcccgtttgattgagaagagaagcttactcggtctaagtgaccgtttgagagagggaaagggttgaaagagacccggtctttgtgaccacctcaacggggagtaggtttgcaagaaccgaacctcggtaaaacaaatcaccgtgtcatccaccttatttgcttgtgatttgtttttgccctctctttcggactcgtttatatttctaactctaaccccggcttgtagttgtgcttaaactttgtaaatttcagattcgccctattcaccccccctctaggcgactttcaaggggacatgtatacaattggcaagcacaagataagttttattttgcttcaaataacatcttttagtatcatatgatcttgatgttacattgcatgctagcaagtaaatagtatcaattttctgtttgtatctatttttcgcttgttttgaccattctgccataaaacatcaaaaggaggcatattataaggaaaatgaaccccatgggccatttagtttggtttttttgattattaacaagaccatttagactaatgttgttcactagtatatttgttatagttcaacatgatgcaaagtagacttggactaagctggaccaataaatcaaatgatcaacacctcaagcaaaaccttagaagacttgtttaatacctagaagacaagctaagagtccaagacacaaaaattcaaatgttcgaagcaatcaacaaagatggcgtaaaggagctagggcagcctttgacctaccgcacaatcgaaccgcccctagtggaagtgggaccgtaaggtagcccatttggtccaatggttgatggtgtggaggctgtcagatgaagcgcttggactattcacgatgctcataatgggattgtgacatccatcggttgaactgccaggttaaggccaacaaggtggagtccctactatgtgcaatcgttggtggcgtagaggagtcaatagagcgggtcattgctagaccgctaggtccatgcgatcgacacatgggactagacaaagctgatgattgttgcttgcagtcgaccattgacggtgctggcggttggactatcaggatgagcctaaggtcaacaaaaacccaa

SEQ ID NO: 38340 - DNA, 2352 bp, Zea Mays
accaagaatttcgatcccattcctgctcattcaacttgcgatttatttagcggcggcgatcggccagcccggccccttgtcttcttcctcgcatcatccgcctctgccccctgcggattagtaggggccccatgcctcacatgcacgccgggagcgcgctggaggatgcgccgcagagctcgtcacgccgggctacactgatttgggagaaaccaaaagcaaaaaaaattactccatgtagtagccattgctgcgacgccgtgcccccgagtttgatttgatggaagcgaagacgaaccaaaccagcggcgaggacaggccgcagccggcgatggactcgccgagggcggcgcaggcggcgacgcgccgcaagaagatgacgaagcagctgacggggaagcgcgacgacacggcgatgcacgcggcggcgcgcgccgggcagctcgagtccatgcggcagatgatgtccggcaaggacgccgaggagctcggggcgctgctgtccaggcagaaccaggccggggagacgccgctgttcgtggccgccgagtacgggtacgtggccctggtggccgagatgatcaagtaccacgacgtcgccaccgccggcatcaaggcccgcagcggctacgacgcgctccacatcgccgccaagcaaggggatgtagacgtcgtgagggagctgctgcgggcgctgccgcagctgtcgatgacggtggactcctccaacacgacggcgctgaacacggcggcgacgcaggggcacatggacgtggtgaggctcctgctggaggtggacgggagcctggcgctgatcgcgcgcagcaacggcaagacggcgctgcactcggcggcgcggaacggccacgtggaggtggtgcgcgcgctgctggaggcggagcccagcatcgcgctgcgcacggacaagaagggccagaccgcgctgcacatggccgccaagggcaccaggctggacctcgtcgacgcgctcctggccgccgagccggcgctgctcaaccagacggacagcaagggcaacaccgcgctgcacatcgcggcgcgcaaggcgcggcacgagatcatcaggcggctggtcacgatgcccgacacggacgtcagggcgatcaaccggtcccgcgagaccccgctggacacggcggagaagatgggcaacacggacgcggcggaactcctggctgagcacggcgtgcagtcggcgcgcgccattagcccctgcggcggcggcggcggcggcaacaagcaggcgcgcgagctgaagcagcaggtgagcgacatcaagcacgaggtgcactcgcagctggagcagacgcggcagacgcgcgtgcgcatgcagggcatcgccaagcgcatcaacaagctgcacgaggaagggctcaacaacgccatcaactccacgacggtggtggccgtgctgatcgccacggtggcgttcgccgccatcttcacggtgcccggggagtacgtgcaggacccgggcagcctggcgcccgggcacgatctgggcgaggccaacatctcccaccagacggccttcatcatcttcttcgtcttcgactcggtgtcgctcttcatctcgctggccgtggtggtggtgcagacgtcggtcgtggtcatcgagcgcaaggccaagaagcagatgatggcggtgatcaacaagctcatgtgggtggcctgcgtgctcatcagcgtatccttcctggcgctctcgttcgtcgttgtgggccgcaccgagcgctggctggccgtgtccgtcaccatcatgggcgccaccatcctggtcaccaccatcggcaccatgctctactgggtgatcgcgcaccgcatcgaggccaagcggattcgcacaatcaagcgcaacacgctcacccactcccgctccttctcctgctccggcatgtcggagggcgagtgggtcgacgaggatttcaagaggatgtacgcaatctgacgacccacgctacctgcatgtgtttgagatcatctcgtgcaatggccatcgcgttattgtcaacttgccgtgcttcggaccgggctaacattcttcttccgtcactccttagtggcgattgaagtattgtccaaccgaataaacctacctgtgcgccgcctgcgagagagaagtaataagttttgtcttcatagaaaacgaaacaaaagaaaagtgagttttgtcttaatagaaaatgaaaagctagacttactaaaaactcctgcactccgtattacttttagcttgtcgatcaagccgtgcttccgcaacgtctagagtcttaaaaactatttaaaaaatacaagtactcaatcttttcataaatatatgacaccatttaa

SEQ ID NO: 38341 - DNA, 1310 bp, Zea Mays
tcaggatggaagtatgggtggtgtcagatactttcaaggactttgtgcagtgcatattttgccattggctacttttttttgggagcatttgctgatagtctgtgaacttctgaaggcaaatctgtacgagtttcagaaattcaacagagaatcagggggtgaggtttacttcacaatgccaagactgcagtcaatagctattcagtgtctggaggcgctgcagtttctgcatggtctcggtctaatccactgtgatttgaagccagaaaacatattggtaaagagctacagcagatgtgaaataaaagtaattgatcttgggagcagctgttttgagactgatcatctatgttcatatgtgcaatcacgatcttaccgtgcacctgaggttatactgggcttgccttatgacaaaaagatagatatatggtcacttggttgtatattagcagaactttgcactggaaatgttcttttccaaaacgattcgcctgcaacattacttgctcgtgtgatgggcatcattggcgccatagaacaagctatgcttgcacagggacgggacaccttcaaatatttcactaagaaccacatgttatatgaaagaaatcaggaaagtaacaggcttgaatacttgattccgaaaaagacatccttgcggtaccgcttgcccatggctgatcaagggtttatcgagttcgttgcgtgccttctagaggtgaacccgaagaagcgcccaagtgcctcagaagcattgaaacatccatggctttcttttccttacgagccaatatcttcatgacacaaattgctattggatcctgggtggcttaacatatgcgacaacacctaagcaccatgaaattttggtagatcaaggcgaaagattttctaccacggctgagccatggcaaacccagattcggtttgatcacgcgtggtgccacaatcagctggtctttgacgctgtgtgcaatcaatccatgccctgtgttgcgcttgtaatataactttattttttttttctctttctagccccgatgtaacaggccattttgttttttaggtactttgtgatgcatttttagcaatagggctgtcatgttgtacatggtgtgatcattgttgaactccgtgccatgctgtgcacatgttagggttctaacccaagcccagaatgtcattcattgcattgccaggtctttaggagattgccttccgtgcttgtctgtgaaacagcttacaagttttacttgccttttctggttgacatcttgccatctagagtttatatatacgatgtatctggg

SEQ ID NO: 38342 - DNA, 1590 bp, Zea Mays
ttatcgttgtcttctctagcgacggcgaggcttgagcgctcacgtcccggcgttcccgtgccggtggccaagccagcggccgacgagatggactacctcaggacggtggttccgtcacaactcttggcagagcgcggctccaatcttgtcgtcatcaacccaggatcgggaaatgtgcgaatggggtttgctagtcaggatgtgccattcaatataccacattgcattgcccgacacatcaatccacaagagggcgaagaaccaagattctctgtgcgcgatcagatgctcaactgccatgctacttcatcgcagaatgcagagcgggagagtgcatatgatattattgcagcactgatgaaaatcccatttttggacgatgaagaaatgccttcaccgaaccaaccccttcctccaaagatgggacgtgttgatggcttctcttcgcagcaaaacagagacgataataaattcacttggacagatgtgtcagagagaattattaagccatccacaccattcgataggtcagtatacaaggatgctgaggaagatactctgccaagcacatctgatgatgataatggacaggactttaaagagaataagtataaagaaatgatatttggagaagatgctctgaaaatccctccttcagagtcatactgtctgagtcgcccaattaggagaggccattttaatgtgtcccataattattcagtgcatcaggttttagaagatttacgcactatttggaactggatactgacagaaaagttgcatatcaacccaagagacagaggtctatattctgcaattcttgttcttggggagacatttgacaaccgagaaataaaagagatgctgtctattgtccttcatgatttggggttcagcactgcagttgtacatcaggaagctctatctgcagcgtttggaaatggtttatctacaacttgtgttgtcaacattggtgctcaagttacacaagtagtttgtgttgaggacatctccagatgcttgctttgggttcaacgtcgccatggcacgtggccaaacttccaaactgatccaatgagcaatcctatagatatgctaatgctcaacaaaatcaaagagtcatatagccaaataaagactgggagcattgatgcagctgtccttgttcattcatatgataatgaaaggtctggtggacatcagaagacaagactatcagcaattaatgttcctcctatgggtcttctttacccaagggttcttgttccagaagagtaccctccacctcctcgatcttggttccaagactatgatgacatgctggaggatacctggcaaacaagtgatggtctttaccctagtgggaatggtgggtttggcatgtgggacagttatccgatgtttcccactagattaaagaaatttgataacattggcctcgtagaggccattattagtagtgtactttcaacaggacgtgttgaccttcaaaagaagctgtttggtagcattcagttggttggtggtgcagcttctacagctggccttgcacaagtgctggagcaaagtcacagataatttactttttgg

SEQ ID NO: 38343 - DNA, 2051 bp, Zea Mays
attgatttttttcccaaatgatgaggatgagacagatgacatagttgaggtggctcttgctgaacttgagatgatagaacaatatagtgccttcatgtctcctgtcgcggctgcggacagcatgacacccaaaaagttcatggcgcttgtctctgctaaaatccaaacatacttttgcaggggcgggtcgatccagagggcggtgcggaggatggccggcggcggcggcggccggaggagacccggcgccttggcggacccgaggaccggcgacgcgtcgtcggcgtcggctagctgctccggggatgataccagcattggtagtgccactgccaagagggaaggggcacgaaggtgcatcatgcagcggtacaggtcccagctcgagcaggaagtcaagaaactgcaaaggcaactgcaagaagagattgatttacatctggcgttggcagatgccattacatataatgcggcgctgatacttaagtcgtctataaagcttccagataaggcgcatgagctattaattagcatatcctctttggaaatcgctatcacaaagcttgaagaggatctaaatcacctgcattaccaattataccatgcaaggaatgaaaggtttcttgcggaaaataagccaggatacttgctacctacaagatcagattgtcaaccctccacagcttgcaattgtacatgggaagaacctgaacaaatgttaagagaattgatattcagagattatcactcagtccaagaagatttttcaactgaacctgaagatcaacaggatgatgaaaaatacgttaaaggtagagaacgtgtatctctaaatatgctgctagaaaagcaccaagatatttcttcaactgggctgtttgtacaccgagatgaagagatgcaagaggcatgctctatggaaaaagaaggcgaagaagatcagaagatagatatgttaccatttaacctgcccaatttgaagaaaggcaacatgagtgaaaatctgtggaataatccaaatcagctctctgaagagatggtgctctccatgaaagatatattccttaatttatctacatcttccaagatgtcaccagaggagcctttttctaattcatcttcatcagcagagcatctatctggttcaacattgactactttgtcggattcatctgtaatagcctcagtgcagcccagtccttcaatgtacctgaaccacgatgatggtaactttgacccgtacaatgttaatggaaaggaagcacagagagacattggcagctatagttcagtagctgaagtgtcttggatgtatattggcaatgaacaacttgaatatgcatctggagctctgagaaagttcaggtttcttgtggagcaactatcaaaggttgacacttcttgtatgaactgtgatgaacggcctatttggcatacggtgtccctgaaaacgacattaagcttttcgcgctaatgcaaaaggcctgttacacgatctgtgggcagcctgtcagtgcagctgaaatagagtttgtgattctgaaggtgaagactccagtgcaccggccacaactctccttgatgctggcccttcacaaatttaaaacatcagagaatctcaagaaatattcaatcgatggtactgagcctcgtgtgctctttgcactctgttgtgggatgttctcttcgcctgcggtaaggattttctctgctgaaaatgttcgagccgagctacaagaatcaatgagagactacatccgagcatctgttggtgtcaatgacaagggggagcttatggtccccaagttactgcagagctatgccaagggcattgtggaggactctctgcttgccgactggatctgccgtcatctaacactagaccaactcgctgcagtccaagatacatcgtcgtcacatacacagcgccttcttggagtgcgcagtttcagcgtcatcccattcgattcaagattccggtacctgttcttgttcgacaacagtagatgacagaactgcattgctcaatgtgcacaaagccaagagtgggc

SEQ ID NO: 38344 - DNA, 2113 bp, Zea Mays
cacggatccaccaatcagacgccgtgcgcttttgcgccaaagcacatctcgcaaagcaaagcgttccgccttggattttagccgtttcgcccgtcccgtggggcggttggcctgttgctaccttgctataaggggaagccagccagggcggtgtgcaggacggggtgcacgggcgcggccctcatccagcagggtggtactggactgtacactgtactgtggagtgagtgcatcagcggtctcgagccacactgtgagccactgattatataccaggccactgattgttacgctgacacgcatgcatcccgcatccctgctccaagagagatgggtctcgccggcggcattgtccggagggtcttctccaagagcccttgctcgtccgccggcagccgtggccacagtactgacgcttgcatgagcacggccgattcgcaggagaaggggtctgctgaacacaggaggagatggggctcgctacggctgtacctctgcggcgaggagatgaacgcggccgcagaggaggaggaggacggggacggcgacacggtgtccgtcaagagcttcgagacctgctgcgtgatgccggaggaggcgcacgtcgtcgtcccggtgcatcatcgtctgatgagcgccgcacacgatggcaacgaccagagcagggtccctggtggtgccgatgaagagggagcggcgacgctcatccagtccgcgttcagagggttcatgtcgaggaggcagctgcaggaggcgagggcgaggacgaggacgaggacgcgcggccgagagccagaaccggacggcgccaaggaccaagagcccagcagccccacctgggggccgtccgtcgcgacgtcggtgctggtccaggtaggcgacgagtcgtcgtcgctgggcaacctccggctccggctaagcgaggagagcgcgtcggtgcagcagcagcggtccagcagccagaggtcgtcgtcgcgcccgccgccagcgttccgagtcaaggaggagtgggacgacagcacggtgagctccaacgtgtccaggatgaggatccagaacaggatcgaggccaccacgcggcgcgagcgagcgctcgcctacgcgttctcgcagcagcttcggagctgcggcggcggcaccagcaagaagcggtcgtcggcgcgcgcggaggggcagggggagttcaacgtggggtggagctggctggagcggtggatggcgacgcggcaggcggagcccgcggacgactgcgcgagccgcaacgcggacacgggctccgccacggggcggcgggtggtggtcgtcaggaggcggagcgacctcgccgtcgaggagaaggagagctgcgcctccaacgacgtctcggtcgtcagcttcgacgcctcctccggcctcgcctgccataggcccacgggcaacaagagccggctcaagggcggccggagcttgccgcgccggaagcaggtggcggcgtcggcgtcggcgtcggaccaccgcttccaggaaagatcacacaaggtgagcaagaagggacaccagcgagtggagcaggagccgcacaaggaccgattcgacgccgtcgccgccctggacgacgacgcttgccagcctcccacggattactgagacgacctgctctgtacatagatttggaaggatttgcagcgctagctgacgatttgtttcggcttgcactagtctgaaagactgcacggttactgtctgctgagtgactgtacgtgtcgtgtcggtcatgtaaaagttcctcgctacacgtacgtcgtatcaaacgtcactcactgtaaaacgtcacggccacatacacgatgacgagttccggttccctagacacggcaaggagaagcaatcagtgacagtatttgtgatatcatatccatccaggcatccagctccgtttgttttgcgttagcacctaaagtacgactgcactgtaccgccacaacagtttacttatggtgtgtttcgttttaagtcaatgtatgatgagacaggaggacaccgttctctcgattttttgtatcacgtcgctatcaaaagttacttcgttgttcacctcgttcctgcgtgactcttatccaaacactataaaaat

SEQ ID NO: 38345 - DNA, 740 bp, Zea Mays
ggcacaagtttgttgttcctcttatccgcggaggaagaacgttggctcgacaccatgctcccaatggccgtccaccccacgagcacgccgtccctgtcgccgcgcgcccgcgtctccccgcccaggccttccacctctctggccgccacctcgtcctcgccctgctctcgcatcgtcagtttcaagagcaggaggctgccacttcgctctgtccgcagcgtcgtcgccgctgccgctgccgccgctgcagaggaagaagaggtacaactaggtgcaggtgtggatgcggtcgactaggaggaggcggagaataaggtggtggtacctgagaggcaggacccgatgctggtgctcaagttcatctggatggagaagaacatcggcatagctctcgaccaattggttcctggctatggaagcatcccgttaagcccatactacttttggccgcgaaaagacgcgtgggaggagcttagagcgaagttggaagagaaagagtggatctcacagaagcagatgatcatccttctcaaccaggccaccgatatcatcaacctctggcagcagggtggcgggagcctctcgacatgacttgtgttttgttggttaattggtttccttacatgccctctctgttgttaattttgaagttatggtacataatgtagatcagtcgaatctgttctcacgtatggtttttttacatggaaatgatcttgtgatttatcttaaaaaaaaaa

SEQ ID NO: 38346 - DNA, 1510 bp, Zea Mays
aaattcacgtaatctgttgcaatgatatatttttttagttttattgaaaaatagggaaaggcagaaaaaacgagaaaagattcgagtttctaaacccgtcacggcgtcttgttcagaggaattccattcctacgaagaaagtatttccttcctcctgaatcctgatctctcacggagttcccctgtatggcgacgcctcgctcaccgagccccagcgccgccgcgcgtctcgattctgcgccgctgctgggcggcgcctccggcggcgggtcccgtcgccgagatggagcgcttcgccggccctccctccgcggcgcggcgcggctgctgcgtcgcggcgggcggcgggccatgcgggagccctcggtgctggtgcgggaggccgccgcagagcacctcgaggagcggcaggctgactgggcctactcccgccccgtcgtggcgctcgacctgctgtggaacctcgctttcatcaccgtcgctgcggtcgtgctcgtgctcagccgcgacgaggactcgcccatgccgctccggacctgggtcgccggctacgcccttcagtgcgtcgtacacatgatttgcgtcgcaatcgagtacaggatgcgccacggccagcgcggcagcgccgtcgctggcgcagcgcctgcagacgtggaaaggggcagcgacgcatcgtcctcatccagtgacgaggatgacagggagctcgatctccatggtcgccgcactgattacgccagtattgcgaagcacttggagtctgctaatacaatgttctccttcatatggtggataattggattttattggatatcagctgggggtgaggaggttattcaggatgcacctcaactttactggaaggagcatctgaagatgacattcgtcaaatcccaagatacaaatttcggcggacggatgagcctgagaagcaagatgttgaccccatgggtccttttggtggaataatgatagagtgtggcaccaatcaacctattgagaaagtgcttgcagctgaagatgcagagtgttgtatttgcctatcggcttacgatgacagtgcagagttgcgcgaactcccctgtgggcaccatttccactgcacctgtatcgataagtggcttcacatcaatgcaacatgccccctgtgcaagtacaacattcggaaaagcagcagtagcagtggaagtgaagaagtatgaatgcagtccgcttgacaatgccaatctgtttcaacttctgttccgttgctaatgtaactccaggccttgatgagtgtaaatttttgtatccaaaaaaatgtgctgatagagtcagttatttatcaaagttactcaaagtgctgtcaatatgtcatataagttaataaacagttgggtatgcttctgtatttactgtcaggaatatattattagttgcattgtaacttgtgtccttttgaatgatccgggtgttttcctgcttggttaatgatgacaaaatgtcttgcatggtttcttatgacaagaaa

SEQ ID NO: 38347 - DNA, 1235 bp, Zea Mays
cataaaggagttcaacagcaacagcaagtggcggaaacggggcatctcttgcgtgcccctcattttcaaagtggagccaagggcggccccaggaagggtttccgtgctcaaggacggctccgtagtggtggaggttggaggaatcgaaatcgggcaaggtctgtggaccaaagtgcagcagatgaccgccttcgctctgggaagactgtggcccgatgctgatggcggcggcgaatgtcttcttgggagagtgcgcgttctacaggctgacaccttgaacttggtacaaggtggactcactgctggcagcaccgcttctgaatctagctgcgcagcgaccctccaggcctatgaagacgatgtcgatttgtccgcgagtgcgtactgggtacctggtcaagcttctaacaagtaccttaactacggagctggtataagcgaggtggagattgatcttcttacgggagcaatcactataataaggggcgatcttgtgtacgactgtgggaagagcttgaaccctgcagtggacttaggacagatcgaaggctcgtttgtacagggaatcggtttcttcgtatacgaagagtacaccacgaacagcgacggcctgatgatcagcaacagcacgtgggactacaagatcccaagcgtggacatcatcccgaggcagttcaacgccgaggtgctgaacaccggataccacaagaaccgtgtgctctcttcaaaagcttccggtgaacctgccttggtccttgcctcgtccgtccactgcgcgctgcgggaagccatccgagcggcgagggtggagtttgcggacagcaccgtgtcatctggacactcgccgctggagttccagatgggtgtccctgcaccgatgacactggtgaaagaactctgcggtctagatattgtggacaggtacttggaaggtctgtctacctgtgaacgtgcggctggtggggcgtagtcttcttctaatctaaactcatgttatctcatacaagggagtggtatcagcctattgtttgcttgtttgtacgtgtatatacaataaaacgtgctcgcggcgtggtggtgtgtgtgtcattgtgtgtgtgagtgtgagcacaatatctatctgaatgctgtcaaccatgtgtccttattaaaactgctggagtggtcatgtttcagtaatctattgttactacttattggcctcgtgcgtctctacgcacatctaaaacttaaac

SEQ ID NO: 38348 - DNA, 1720 bp, Zea Mays
ccgagctaggttgatgaacagaagtggtatcctgctgcccctcctgcccctgctgctcatgaccatcatcgtcatcaaggaaaatgagtggtgctgagagattgattgtcgatgcggcttgtcagcttgctgcccacgatcatgatgttcatgtcttcacatcacatcatgataaaaaacgttgctttgaggagactctttctggtttgtttccggttactgtacatggggatttcctgcctcgccatgtgttctaccgctttcatgctgtttgtgcttatcttcgctgcatttttgttgcgctctgtgtgctactcagatggcccttctttgatgtcatattggtagaccaggtttctgttgtgattccactacttaaactaatggcatcatcgaagataatattttactgtcatttccctgatctgttacttgcacaacatactactatgcttcggaggttatatcgcaagccaattgacatgattgaggaaagcactactggtatggctgatttgattcttgtcaatagcaagttcactgcagcaacttttgcaaggaccttttctggtttacatgctagaggaatcgagcctggtgttctttatccagctgtctctgttgagcagtttcacgaaccccatgcttataagtaacttcatgcttgcatatctccttacatttaggtctaacttattcagtttatagactaaacagatctttttaccattatcatattaatatttagctaaagtagacaacaatcttttgtacaggttgaatttcctatcaatcaaccggtttgagaggaaaaagaatcttgatcttgccatttcagcatttgctttgctccgttctgctgcttggactctacctggtgatgctctacaagaagcaacattaacagtggcaggtggctatgataagcgtctcaaggaaaatgttgaataccttgaggaactcaaaagactcgcattgacggaaggggtttctggacaggttaattttgttacatcttgctcaacatctgaaagaaacgagcttctctccaactgcctctgcgttttatacactccaaaggatgaacatttcggtattgtacctcttgaagccatggccgcccataagccggtaattgcctgcaatagtggtggcccagtggaaacagttgtgaatgaagtaacagggtttctgtgtgatccctctcccgcagaattctccaaagccatgctgaaacttgtgaatgatcatgatcttgctgtcagattgggtgaacaagcacgtgaccatgtggtgcaaaaattctcgaccaagacatttggtgatctcctcaacagctacgtcttgaacatctaccatgagaggatggaatgatctataatattgggtcagccatgccatatgaaaacaatttgttcaatacaaggttttttttgcacctttacgtctaatctgattttgatggacacacataatgacaatgacattccattgaatccctttggcatactgtagtcactctatgatctgtatattgttttcaattataacatcaaatttggcttggtccatcctagaatctgaatggagctggagtagagatggcaatggggacccgatttcctgcggggaattcttctgttagagcaacttcaaaagaacgtgtaaactaaccccaaaacagatattagtcaagaatagtgatttttttactccaaca

SEQ ID NO: 38349 - DNA, 1905 bp, Zea Mays
cgcttgctctagccgatctatgtgcatggggctcaacgactggaacaaatcctcgtcgatgctcagggatggttttagggtagatggagcatcccctacatgtgtcttccatgggatggcccaactgcagatctgttcctgggatactacacaatgactacattgcatactcggagctgctcgacaggagcgtcgtcggcggtgctgtaaacatctcctagagtcctcgggcacaagaaggtcaggcggtgatgccaatgcagatcatccaatcagatccagaatgcctgccactgtatacttggagctgctcgacaggagcgccgttggcggcattgcaaacatctcctatagtcctcgggcacaacaaggtcagccaatgacgccaacgcagatcatcccatcggatccggtattcttgacgaaaatccctgaagatgggaaacccacgctgctggtgcaaacaccgccggtgatgccagtctcctgacatgcagttgtagcttggctcgaggcgggcatcagcgacgacaaacatcctgctcaatttgttgtatgataaatactgcgaaacaatgctggtgtttcataagatgaccgtgcagctcatgaaaatccagagggtggagtcgagcgagacgacgtggccggcgcggcgccaggtcgtggcgtgcgccgctgtttgctggtcgtggcgtgaggtcaccaaggaggtggtgaagacgctcaaggagtgcggcaggatcaccttccccatgtcccttaagcagaggcttatgattttgaagatctagaatctatggttgaagaaatagccaaagcattcaagacaaagataatgtttatatatgttgacactgctgaagaaaaccttgcaaaaaccattcctcactctttatggcattgaatcagaaaaggcctactggtccagttcttgaaagggtgggaatgtgtccaagaagacaaaggcatcgacccgccaattcttcgctacaaattaaaacagcactagggtgagatcagtgggcttgagagtagcatcatccttcaaacatgatgatgggtttctagctgatggtgtctctatagctcactggtatccttcaaaaagaaactaatcttcacatctttcaaagcatttgctagggccccttcggtgagcaatagaatacgacttgcgctaccaaagcgtccatagctgaatgcaaaccattgagatggtccaggttgaggacctccatgacacctatgttggtgtgggttgtgccgccccatcgtgaccgtcatcgattgggcctccgagtccaggagaagacctccgatgaagaaagagacatgctgcacatgcacgagggtacttgcagatagatgtcggctctatggacgaacactcgaccaagtcagatgaggagtatgagggcctagccatgcgagacatgatggctaccggtccaacaatgagcagcaagctgtgagttaaagatgaactcacctgtcctggagagcaacatccataggagtgaggcaaaatggcgggtaccaccacaacatggacccgttcctgaagatgtccaaggaggtggtagccgacaccataatgtcttgcgcgtcattgtgtcaccggccggcaacacgctgcgctggtaccggcgggtgttatgtttcttaggcgtatgtttctgtgctttgagctgtgctatagactggttgtgccaactactgattttaaaagaaaaaggtgagctgaaaatcattgttgaaaacaaacatgtaacggttcgttctcatcagttgtgccaactaccaatcatttcattgatcagaatctgtcgttgctcatgagaaccaaaagtaagacacttcttaataacattggatgcaaatttctgctagcttatcttcact

SEQ ID NO: 38350 - DNA, 1803 bp, Zea Mays
atcttcacctgcgtccgcgtgtgctgtctccctctttctctctctgcgacgactgggtgggctaccgccgccgccgccctacgttagataccgaggccttcgccggcgacgaacacccgccagggatggcgaccacagcactgctccgggctctccggcggccctcatccgaagccgcgctgcgattgaaatccatgaaggagttcagcgagaaacttgatgtggtgaaggaagatctcaaagtaagaactaagaaaacgactgagacaatatacaagcgtgttgatgatgtttggagtgaagctgaggagacatctaaaaaggttactgcaaatatcaaagaaaaaatgtttgctgctaaagaagaggtaaaggaaagttttggagttggaaaagaagagagtacaagttgcagggatggtttgcctgaaggttcaaaacatgagaaaactgaggcatcctcacattcagatggcacgactgaagatgccacagacagccatacattgtttactaaattgaagtcaacaatctcatctgcttcaccagtagtatccggtgcgtttgcaaagttgaaggacacaaaagtctcaactttagctaagcagggatatgaaatcgtcaaggatgaattaagctctaactctagcagaaagaaaaaacaccaagctaggcatgcttctgctaaagtagaaaagagtacaagaaccgatttagttcttacgccaacaaaaaagacagtattgggtgaaaaatgggaagaatttaagaataagatccgaggtcacccggtctacagaagagtggatgaatacaccaagcctgttgtaaccaagggacaagaggtagctgaagatgtcagggaaagatgggagacaagtgacaatccagtggttcagaaaattcaagacttgaatgaatctttgcttgaagaaacctcagctgcggtgacattcagggaaattcggcaacgagacccgtccttttctctttctgattttgttgctgatgtccaagaaatgatcaagccagttttaactgcatattcaaagggtgatgcggagactctaaaaaactactgcaccaaggaagtgattgagcgctgcaaaggagagagagaagcttatgcatcacagggaatattttttgatcacaaaatcctgcacatttcagaagctgatgtattggaaacaaagatgtttggatcttcacccataattatcttacgcttccaaacacagcagatatactgtgttcgagatcgagaaggacaagtcacagaaggaggacaggataccatccaaaccgtcttctattcgtgggctatgcaactcatggacagcgacgaggtgccagaagaagaatcctattacccagtctggcggctgcgtgagatgcaacaagctggcatcaaagctctcatatagctagctgttcaacgagcatgcaagaacgttgatattctttcttttttatttttggctgatttgatgcatcttctcgcagagttagcttgtagcagcgtatactgatagcaacttggtgaaagtgcattatttaatccaacttataagcctcaacaaatttgtaatgacaagagtagcttgaaacaggaaaaaaaataccgatgagcagctttagcctatctcattagtctttctatctcacattctcactccttatccactgcaatgtcctttatctgctccatcagcacaatcctgcttgctgtccaaaatatttcttgacagttccgtagctgcaatgcaaatgacaggaatattgaaaaggtcgctgttatta

SEQ ID NO: 38351 - DNA, 1025 bp, Zea Mays
agcgaatcggctcaccacatctcaattcgatttggtagttgcctgaacgatgacggccttcagctgaagtcctcgatcgaacatctagcgagcgtgaccgacgagctaaggctgatggcgaacgaaggagcaggggcaggtccggcgtttgttaggaaaggagcttgacacccggtctcgtgacgagctgctgggtgaaagacgacgaccaaggctgaggcgaagctcgacgacgaggtcgaacagggaatggcgaacgtgagtgcacgccggggcttgccaaaaacacgaagacgacggcgtggtgtgcacacgacgtgaagagaaacgaccacaactccatgacagcttcacgaacacgatgaggacgcagagcgcagcgactattcttcaatggcgagaatactggaattggaggctggtggtccggacagaggagcgtacggcccggaaagtttcgatggcacagacagcgagggagctcgacgcgcgcagatttttgtttcgttgctccatgcatgatgcgtggacagacggcaagcagggacgcgcgacaaaatcccgggcgcgacgcaggggactcgacatggtgtccaagccggaccggggcgattcacttgcgtaggggcgagctccgacgtgcagggaaaagctccgagctagagcagcgcgcatggatcagtgcgcaccaggaaggacaacggcgaccaacatcatggggaagaagaggccgccgagcaccatggcaaggagcaaggccgagcagagggagctagggagggagggccgcggcacgcaggaaagctagacgccgagcgccatggacgagctcatggtggggtcaggctctgctgggcgcgcgcgtcaggaaagtgagcagagttgagggagagaggaagcaggcacggtggccagggggtccagggcgcggcgacctgtgggccaagcgccggccatggaatatgggcgcgtagagaacactagtacacagaagctctgtagtggcggttgaaaacgtatttata

SEQ ID NO: 38352 - DNA, 1172 bp, Zea Mays
ctaaagtatagggttgattagttggggccatgggctatatatatatatgcactttggaggtcaagaaagatattagctctaatctcctatctccctgtcttcactaagcctgcagccgaggatttacctcgccggagaagacgaccgacggctacgaactacatagctgcggtccagctacccgagggaacatcatatacaaaccaaccatggatctgtatctgttgccatatatggtgaacatgataagcctgctcttattacctacccagatattgctttgaaccatatgtcttgcttccaagggctactcttctgtcctgaagcagcttcattgctgcttcataatttttgcatttaccatatcagccccccaggacatgagttaggagctgctccgattttgccgagcacacctgtggcatctcctgatgacttagcagatcaaatcgcagacatacttgatttttttggactggattcggttatgtgcttaggtgtcactgcgggcgcatacattcttactctgtttgcaacgaagtatagggagcgagtactaggacttattctcgtttcacctctatgtaaagctccctcatggtctgagtggttttataataaggtaatgtcaaatttactgtattattatggcatgtgtaatgtcgtgaaggatattttgttgcagcgctactttggaaagggagtacgtggaggctcagctgaacctgaatcagatattgtgcaggcttgcagaagttttctagatcaacggcagtgtgtgaacgtgtggcgatttatccaaactatcaacgagagaaaagacttgacagagaacctgaagcagctacagtgcaggacactaatttttgttggtgagaattcccagttccatgctgaagctgttcacatgactgcaaagcttgataggcgatatagcgctcttgtggagtacaaagcttgtggctcggttgtgacagaggagcaacctcatgcaatgctgataccaatggagtactttctcatgggatatggactgtacaggccaagccagataaactgtagccctcgtagccctctgaatccgttttgtatatcaccagagctccctctctcctgagagcatgggggtttaagctaagcccattcaagaacgcgaggctaaccttaatgca

SEQ ID NO: 38353 - DNA, 2180 bp, Zea Mays
cacagtccacacccgccgaggccacccccgtcctcccccacgcgccgctcgcgtgatgctcgaatctacgctcgcgatggttatgccccgccgctcgctgccccagccccctcccctgcgtgcgtgcataaaaagggagagcgacgatggaaatattccgagcatggcttgaacacctggtcaatgctagatgatctgttggttgaaagactagcaagctgtccaagtggaactacgacggatcgagcaccggccaaatcccagctgacacggtgtggacacgagttctgcgctactcctgtggtcattgtttggagaagttttcctaaagcttctttatgtatattcttagtctttttttagaacaatgtcataacctactaatagttgtttatcactatattcttttgttcctactattccttgatatgccagatctcaacttttgtgctaatatacatctctaggcatgttgtatgtgcatcatttcaaaaaaaacacttaccaaaagagtggtctgtaccaaacattttgccttcaagacttcaactcataaccttgtatagtctgaaatccttaggattggttctgaacctcagtttgatggaggtgttacaaaacttagaagggatactaaatttctctttgtagtatgagtgaacagaagtaggatttgtcacaatctcactattttaccaagctaaccaaataacaaatttggccagtatgtatgtgcatcatttcaaaaaaaactgttaccaaaagggtggtatgtaccaaacattttgccttcaaggcttcaacccataaccttgtacagtctggaatccttaggatttgtactgaacctcagtaggtgttacagaacttagaagagatactggatttctctttgtagtaggagtgaacaaaagtaggatttgtcacaatctcacacttttaccaagctaactaaataccaaaattcggccagttacagacagtcagacactgatcttaacttgctcgaacagtcttaaacctttttgtatcaaaggctcatagcatatcaaacgcttctaatgaaaccttaacacaccgcaagaaaacaccaagcatcgaatttgttcagtgtgtgtgaagtagtagtgtatgatcatgccatacatatttttctacacatctcaaattctagatttaatttggttacatgttatacatgtatcttagatttttgataactggtcacagagcggttcaaattgaatttgacatggagttcagatgtcctttcatattctgttactgaggttatttccaaatagtgattcagatctaatgattttatgatgcaatttattctacaacatttaaatgccagaacgctcattagaggctgaacatttaatggttataggattaggcctaaaacggcgttttgcagcgattaaacgctacattttttgtgtttaaacgctttaagctagaaatgctgttgattttgtgtattatatttagagtatgacatttttccaagatctatgttttaaatgcaaggatattgagattttttagatattttattttaaatgctaattcatatatttttttccttgccgaatgtaacccctaagaagactgaagagactgctttgatatctgatgttgttgcaaattcaccacaacaaggttttcatagtgggcattgctggagtgatctcatctgagatggtccattaaccagactaaagtagtgcatattttaaattgaatatttttcttcttttcggtgagaagtgaaaagtggaagacatttcagttctgcactttgtagttgaagttatcttcctgattggaagataaggaaggtttgaggagctcatttctgaagttgtagctggaagggagaagagctcatgttaatggtattttgactgctccaaaacactttcgacttgtgatattctttaacctatatgcgttgaagaatttttggagacaaagcatgcaagcacagagtctgctctggtggtaagataagtgaggtgacttctgaagaagcctacagagaatgtaaaaataagtgtgttattttcactgctttgacacagtctcaattgtgcaatgatttattatcacattgtaatttgacatatgctacatgatcctaaattatgttgtaatgaatgttctactcccta

SEQ ID NO: 38354 - DNA, 1191 bp, Zea Mays
caaaactttgctgttttgttaaataaggaactccagtgtagtgattggtcatgccgccccttaagtgaagggcaaatacaatatgctgcgtcggatgcctactacttgctagacatatttgatttgttccaaaaaaggatcacaatggaaggaaaatgttcatctacaacagaacttacttcagacaggcattgctcatcagtggtgatagaatgctcttcttctggatatggcatttgctcgggtagttgtttgatgtccatagtaaccaagtacagtgagaagataatattgacagaatctgatgcaaaaccgcgtacctccagacgaaaagaaaaactgaagattcctgccaatgccaaacgcaaagataatgtggattgcagtagtgaatggcagggtccccctccatgggatccttccattggtggggatgggtacccaaagttcttgtgtgatgtgatgggatctattaaatcaaacatacaaggaaggaagaatattattaacacgggatgccaagctcttgaaatatcaatatttagctggtaaccaggtatacagagtgaaaagcctgctcaaacatgatcaactagctgaggtcattaatatcttccaattaaagatttctgaggaccaacttatgtcgaggtgcacaaaatgcaatggtagctttattcagaaaccacttaccctagaggaagctgttgaagcctcaaaaggtttccagattattcccacgtgcttgttcaaccgaaatctggagttctggaagtgcaccgattgcaaccaactctactgggaggggactcagtaccacaatgcagtccaaaggttcttgtcagtgtgcaacattagtgactaagcagcacgtacggccttggtactcatttgtaaaattgtaaggtactgagataccatcacctccgaaagatcgaaaataatctgatctttggcatccactcgtgcacgatgaggcatgccatccatttttagtggtttgctgttcgtcactgagatgctgttgtaaggaaaatagaccttgacttatttgattaatggactttgctccatgcacatccaagaggaaaggttctagatacgtagagttataggccaagtgctatgactgttgccctgcccccgaaaaggattcatgctatctattattaaactaaaccttacgttcct

SEQ ID NO: 38355 - DNA, 1988 bp, Zea Mays
ggactcttctagagcctccgcatcgcaactcacaggctcgactcttccagcctccgactccgcatccgcctccccggcggagcctctcgccaccgcacagcctagatccgcccagaggagctcaatctccccctcgaggccccaaaacgagatcctctgcattcctgcatagatgcagacggctgcttcgtttgggtatgcggcgggacggggacctcggaagcgagctacaacgacgtccccccccccccccccccccccccccccccccgcaccgatcgccgccgtggccctggctcgggtggccaccaggagatctgtcctccctccctcaaacgacgcctccatctcctcgcatttccttctccttttccccttttcaaacattcaggagccgaaggtgccagccaccctttgctcggcgcgtgtcccggcgtagctcacgacgcatcctcacctgcctgcaccgagccaaggagagtcgttggctatgcgcgttagctccgctgctgggtggtcaccatcgtccgagcacaacacagtgggtaccatcctctcactgaattacttataggaagcctcatcatgtagtttgtgcgctactagggcgagatccacctgttgtgatgatgctctatggcgcacatgtttcttttttatgggaacctcttcttagtaagtgggatggagagctttggtggagtttagcaggatgcagacagattgaggattctttgtttgtagaacgccatggatgagaggctgctcatgtttgatgtggttgatgacgtgtggacagtgctaacatgattgttcgagttggatgcacacgagagccttaggtggtttggacatgtcttcgagccaagagttgaaatcttgatgggattatgttggggcagatcttaactggaatacatatacggaacccggttggcagcagaggtagtgccccggtgcgccgcgcgcaggggcacgcgacagctacaaatattcggtggaggactggcttaggaaccttggatgcaaggtgattggaaggaaatttgttgaggtggagatggactagaccaaggctaatatcaaggggtacctgtgagggaacaggactacactggatttggctcccgtctcaagagtaaagtgtgtttcagcaacctgctagccggccaccaaaggaccaattatctatttttgttgatgttaatatattaaaatctggttatagtaaatatacataatatgctgtcatctagatcaatacacatatatgcctttgagacataaatatgtgtcatgattcaactttcatgaatagtttttctcaacgactcgcatactaatgatattagcaaattatttaaaataataaccatgatatacaacttatataaattattatgttatatttgtacattttagctaaactatttgacatctaatataattgtaagttcataagcgtagatatattttctagatatgagcttagcggtaggtaattttgcttatctattaccgtaataagcttgatgactgaggtagacatctgatttatatttaatctaactgtttctctatgtgaatggatacatatattaactcaggtagcactacaactagcaatgtatggatgaattgaaggaagtaaaagaaggcagacaatcttatagaaactctgcatattgaaaccgccatgattggcaaagaagttggatgcatctttgcattggtgtgttcttatcaccaagcagtaatgtgaagcaagttcatttgttgactaagaacggatcaacacaaattagtgaagattttgttcacaagagatgcaggatggagaggtggtagatttcaatatggctttgatactattttttccacttacaatattttgtatggaacaagaaaaaacaatgtatgtggttactattgtaattcaagaatttatttctaaataataaatatatttgtttatattttgtttatga

SEQ ID NO: 38356 - DNA, 2871 bp, Zea Mays
ccgaccggcatcacctatccacatctttctccctctctctctctctcctcttccgtccctcctctctccctctctacgccacgcctccacctccacacctgcacgcctctcgctctctctcctcacctgtcgagctgcccacagcccgtacgtacctgcccccagtcccagtccccgccgccccgcctgcccgacccgcggcttatccaccacgtccgccgctgggctggatcgatcgggaccggtatcgcgccgccgccgctgccctcggcactcgcgggatcctgttcctaccatgcagcagcgctgcgcccttgcccgaccgcgccggcccgccgaaccgcgcgttccgctccccgacgatcactccctcgtcgccgtcttctccttcctcttcatccccacctaaatcaacctcctcgccgcgaaattctgctacaatttcttcatcttcccttcccgccgggagcggacggatcgccgcttcctcggccggcgggatgagccgggaggcgcagaaactcgactgcgccgccggcgccggggggatcggggtcctgtcgctggacctactgggccaggtgctggaacacctgcgggagccccgggaccgcaagacgtgccgcctcgtcagccgcgccttcgagcgcgccgaggccgcgcaccgccgcgcgcttcgggtgctccgacgcgagccgctcccgcgcctgctccgcgcgttcccggcgctcgagcggctcgacctctccgcctgcgcctcgctcgacgacgcctccctcgccgcggccgtcgccgacgccggcggagggctcgccggcctccgcagcgtgtgcctcgcgcgggccaatggtgtcggctggcgcggcctcgaggcgctcgtcgcggcctgccccaagctcgcggccgtcgacctgtcgcactgcgtcaccgccggggaccgcgaggccgccgcgttggcggcggcgtccgagctcagggacctgaggctggacaaatgccttgccgtcaccgacatggggctcgccaaggtggctgttgggtgccccaagctggagaagctcagcctcaagtggtgccgtgagatctctgacattggaattgatctgctggccaagaagtgccctgagctccgcagcctcaacatatcctacctcaaggtgggcaatggatcccttggatcaatttcgtcacttgagaggcttgaggaattggcaatggtttgttgttcaggtatagatgacgaaggcttggaattgctgagcaaggggagcgattcgctgcagagtgttgatgtgtcaagatgtgatcatgtgacttccgaggggttagcttcactcatagatggtcgcaattttcttcagaagttatatgctgcagattgtttgcatgagataggacagcgttttctatccaagttggcaagactgaaggaaaccttgacattgctgaaactcgacggtcttgaggtctcggactctcttcttcaagccattggtgaaagctgtaacaaattggttgagattgggcttagcaaatgcagtggtgttactgatggaggaatctcatctcttgtagctcggtgtagtgacctaagaacaattgatctcacatgctgcaatctcattaccaacaatgcgcttgattcaatagctgacaactgtaagatgcttgaatgtttgcggttggaatcatgctctttgataaatgagaagggactagagcgaattacaacttgttgccccaaccttaaggagatagacctcactgactgcggagtagatgatgcagcacttggctaaatgctctgaattgcgaatattgaaattaggcctatgctcaagtatttctgacagaggcattgcatttatcagttcgaattgtggaaagctcgtggagcttgatctctaccggtgcaactctattactgatgatgggttggcagctttagcaaatgggtgcaagaggattaagttactgaacttgtgttactgcaacaagatcactgatactggtttgggtcacctaggctccctggaggagctcacaaaccttgaactgaggtgcttggtccgcgtaacaggcattgggatctcctcagttgcaatcggatgcaagaacctgatagagctggacttgaaacgatgctattcggttgatgacgctggcctgtgggcccttgctcgttatgctttgaaccttagacagcttacgatatcgtactgccaagtcacggggttgggcctgtgccacctgctgagctccctgcgatgcctccaggacattaagatggtgcacctctcatgggtctcaatagaagggtttgagatggctctgcgagcagcctgcgggaggctgaagaagctgaagatgctctgcgggctgaagaccgtgctctcccctgagctcctccagatgctgcaggcttgtggctgccgaataagatgggtcaacaagcctcttgtctacaaggactagacagactcgtgttcctcattgtgtgtgcagtgtcagcatcagcatgtattgtcaagatcttgcaggtttgccctggctcacgttgtgagtccgcaataatcgttgggggcgtaagctcccgtcccccagatgtggttatggtgcctttggggcacttcttgcgccatttgtcactctctgctccggtgtatctgtgtatgcaaacggaggcaccggtaatgttcatgtgtatatagcgtgcagtagaatgatcccattttatgggattagttagtgtgtaattgttacctcatttcgcatgattcgaatcttgagatgaaagaatcataaggggtatgatcgatgcattgcattcaccggttcttacttttgactggcattatcttatttgacaat

SEQ ID NO: 38357 - DNA, 1509 bp, Zea Mays
cgcgacgtggcgtctggcgtggtcgagcctctagagaagcgagccgtgcccgtctctcccaatccactccgtactcggcgctcctcccccgtcgccgccggaaatcaggaagcccaagtgctctcttgggtgcgctcgtcgccggtggcagtgagccagtgatgcatcttcatctccggcttccttattaggatcagcccgtcgatcgatcatggcgtcgtcgagctcggctgctactactagtggtgacagtcagggtctcaaggctcgagatgcctgcatcgtcggcgtcgcccgcacgcccatcggcgcacttctcgggtcgctgtcgtccctccccgccaccaagctcggctccatcgccatccagggtgctctcaagagggcgaaggtcgacccggcgctcgtgcaggaggttttcatgggcaacgtcctcagcgccaaccttggccaggctccggcaaggcaggcagcccttggcgccggcttgcccaactccgtgccatgtaccaccgtcaacaaagtttgttcctcgggaatgaaggctgtcatgtttgcggctcaaagtattcagctggggatcaacgatgttgtggtcgccggtggcatggaaagcatgtcgaatgccccaaaatatgtggctgaagcaagacgaggatcacggttcggacatgatgtccttgttgatgggatgctcaaggatggcctgtgggatgtctataacgatttcccgatgggaatgtgtgctgaattgtgttcagaccagcactcaatctcaagggaggagcaggattcgtatgctatcctcagcaatgaacgtggcatagcagctcaggacagcggtgcattttcttgggagattgttcctgttgaaatttcttctggtagagggaaaccaccagttgttgttgacaaggatgagagtcttgcaaagtttgatccagtaaagctgaagaaacttgggccaacttttaagacgaatggttctgtaacggctggcaattcttctagtataagtgatggcgctgctgcaattgtccttgtcagtggagagaaagccaagaatcttggccttgaagttattgcaaggattacagggtatgctgatgctgcacaggcacctgagctgtttacgacagctccagcccttgccattccaaaggctatatcaaatgcagctcttcaaacttcacagatagattattatgaagtaaatgaggctttctctgttgttgctatagctaatcagaggcttcttggtatcccttccggaaagctaaacttaagtggtggtgctgtttccctgggccatcctatcggttgcagtggtgcacggataattgtcactttgcttgggattcttagacagaaaaatggaaaatttggtgttgctggagtttgcaatggcggcggcggcgcttcagccctcgttttggagctcatctgttcggcagcaagaaaaagttactcctactgctacaaattttagttgcacaatgttcaacaggg

SEQ ID NO: 38358 - DNA, 3085 bp, Zea Mays
tcgtcttcgcgagcagtcgcggtggctgtggcggcgtcatcgtcatcactcatcagcgattccaaatacaaactcccacagcttccacagaaaaccctaacactagatccccaccatggatctcctccagtcctcttacgcgccggacgccgcctcgtccccggaggactcggcggccgcgtcctcgccggagtcctcgccgctccgccttccgtccaagtccgccgcccccgccgtcgacgacaccgcgctcgcgctctcctccgccgcgtccgccgcccgcccgctcgacccctcgctccacctcgtcgccttcaaccccaccgctgaccagctctgggcgcccatcctagggccccagcacccccacgccccaatctcctccgcctcaggcaatcgcaaccacaagctcggccacgtcgaggacgccgcggtcctgcccttcctattcgacgagcagtacaacaccttccaccgcttcggttacgctgccgacccctccggcctccacatcgtcggcgacgcccatccccaggcgcctgagcccgacaccgtctacaacctcgccccctccgagcacaagcgccgccgcctcctggccaaggcggacaaccaggaggagcccgcccctccggaggccaagaaccccgcctccgaggaatgggtcctccacaacaagcagagtccctgggctgggaagaaggaagcgcctcccgcggagctcaccgacgagcagaggcagtatgcggaggcgcacgctgccaagaaggccgagaaggaggctcgcgccgaaggaaagagcgagagggcagaggttgtggtcaagaccaccttccacggcaaggaggagaaggactaccagggacgctcctggatcacgccgcccaaggacgccaaggccaccaacgaccactgctacatcccaaagaggtgtgtccacgagtgggtcggccacaccaagggggtctcggccatcaggttttttccaaagtatggacatttgctgctgtctgcaagtatggattgcaagattaaaatctgggatgtgcttgggtcacggacatgtatgcggacttatatggggcactcaaaggccgtaagggatatatcattctctaatgatgggactaaattcttgagtgctgggtatgacaggaatatacagtactgggatactgagacagggcaggtgatctcgaccttctcaaccgggaaggtcccatatgttgtgaagctcaatcctgatgaggataagcagcatattctccttgccggaatgagtgataaaaagattgtgcaatgggatatgaagtcagggcagattacacaagagtatgatcagcatttaggggctgtgaacaccataacttttgtggataacaacaggagatttgtgacctcgagtgatgacaagtctcttcgtgtgtgggagtttggcatccctgtggtgattaagtatatcagtgagccgcacatgcactcaatgccatcaattgcactgcatcccaactcaaattggctggcagcacagagcttggacaatcagatactgatatacagcaccaaggagaggtttcagcttaataagaagaagagatttgccggacatattgtggcaggttatgcttgtcaagtgaacttctcacctgatgggaggtttgtgatgtctggtgatggtgagggtagctgctggttctgggactggaaaagctgcaggagatttaagactttgaggtgccacaacggagtttgcattggatgtgagtggcatccattggaaactagcaaggttgcaacctgtggatgggatggtgtaattaaatactgggattgaagtttggcagagagattgcttgagctcctgggggaggttttgtaacaatccaattcacaagggctgaatgtcatgagatactgtaagttaacacgcccgacgagagaatcccggttcaatggaggagaaaaaaagttgtacttttgaggttaagtatatgtatgttggagaaataagaaggggattttagcctcattttcccctaggacgcgtggtccccactcagcgctgtcgtcgtccccatgctcgctcgctgcacaagacggaccagtgactggacgacctccgacatgggcggcctgaattctggctcaggttgcgcaaccggaaaccgaccaatctgcaacaccgcacaaaatggctggagacgggaacagcaactaaacccgtcaacagcttacctggacgcagaggacttcgcgtggcacagcccctccagcgtcatctggtcgatgtcgtgcagctggggcgacgcccactggaccaacgatagctgggaccttgcttgagagctgcaacagtcatcgtctttgtttgttgcagggtcaagtgtcgcagcgctgtacttgctcacctgtcgaacgctttccggccagtcaggagctcgctcttttgagagtactggccggacatttccacctccggaactctgtatccggggctgtcatctgattcctgaaggtgtcaacgtgcttgtcagtgggggtcattttcttcagctcctttgcggtgggtgagagtgagacagcacggatgggcctcagttctgaagtacagcaaccaataaaaaagatgtttgtgtagtgcagcagcattcaggtccgtcggtgaggacatctatcgtaccggtaaatttgttgtcctgcaaataactgaggatatagcaccagtcatcattgtgatttggagttttcagtacttattttggattgtgagcaatggatttgtaatgattaatgaagaatagggagaatgttctcacagtgtgctcaaacctgtcaagtagctgaagccatttgggaaatggagtaaggcaaagctccaacgaagtcgtttttctcaagatttctgcaggtcaagtgttctgtcagcacttcaagaaagattgattaacaaaaggggaaaaaaggcagtcctagagcatggaggatcgagagactgtaaaaggggaaaaaagtgttgagtgttgatcgagaaactgtaaaagtcaggtgagtaggcacggtggctgatacctagagaccttgttca

SEQ ID NO: 38359 - DNA, 6060 bp, Zea Mays
actgccgccgccacggcccacggcgccacgccctgttgcccgtttcgtctcccgtccccttcctagtctccccccaaaacaagaagcgggctggcggctgcagtttcccgcctgctcgcacattggcgcgaaatttgccgagctaccttgcgcgctcccttcccgcatcccagcaataacactatctacagtgtaagccaaagttcctagtccccctcccctccgctcccttctctctcctcctcacggacgtcagagctccttccccattccggcgttgccaagaaggccggtttccgggccctgtcttccgctacctcgccggccgcctttcaccgtcatacaaggaaataggaaatatttttctgtctgtaccattgctttccagacccacaatgcctgcttctgctcacaaaaatctcgattctggttgtcctaggagatctacaaggtttaaggatattcatgtagtttatgaagattctgacagggatccttcttcttttaagaggatcaaaactgaagtaattgattctgaactaagtgttggttctgtcagtgacaaggatagtgaacacaattgtcatgatgtattactcaaggatctcaggactcagtgtaaagctaagaatcggaagatttcaaaaatcacattggaaggatgtggcattaagaatcaggttaaaacagaagatgacattgatcttgataagcctattgttgcattgaaacagaagaggctgaaaacatctcctgctaaggctaatataaagatggatgcgctaagatcttctccatgtgctgctaaagagaaagatacaacatcagccagagacaagattcttagttctgcacagactttcctgctgaaagcaacaatgcaagaccgaggattagagaagcctggaaggagaattgcagaactggagcagtctaaagttgttattgattctgctgaagaaatagttggggagcaaatttattgtgctgaagtgaacaatacagctggagttctagcgggttgtgtaaaacctgatgtactatatgaaataaaaactgaagatacaaattattctgaatttggaacttctatgtgttccataaagaatcctgatcattcatcctttgagctgcaacagaagctggtggatgatgatgactgtgtgcctccattttgtttcatgacccgaccagctcaattagctgatgtttctgatcattcctgcgaacaaacctgcagttccaaagaaaacaattctgatgacattacagctgcaaaggcaactgatgttgtttcttcattggatctcactgatgaagtgagaaatcatcagaaaacatctgaaaatataactaatttagatgtggataagtcttctactgcaaatggacttatggcttctttcagtgagtcctgccatgaccgtatagataaagatgagcaatggaatttatttgcccatggggaatgaacctgcaaagattttggaagagttgtctcctattgatgagtctagcacagatactcaatctgatttgtgtagaagcacagaaatgaatttcacttcacttgagggggttgtacggatggaggctgagggccaattggattcaatagtctgctgtggtgtaagaccaaagcatatgttactagatatggaaattggacatacagccactggtacattcacctttgacaagactatcgacttagctcatcctgccaattttgttgcacaagatggaaggctagaaagtatagtatatgatgttttgaataatcatgcacaaaggacaacctctaaaagtaaatcttctgttggacttccagatactgctgtgcttcagagctcacttattgagttcactgacaattgtctggaagataaaagggcttcagatgataaattttcacatcccaataatgtggacttgccattgaaggatacgttaaattctacaatagactatgacatttgtagatctattaataatgaaggatcagaagaagaaatagtgcctcaacatcagttataccagtcatgtagtgataagttcaaccttagcagtgtcatgccagagatctctaatgctgaaaaatcacaaaaattatctgctggaactcaaaattcttctgctacttctttggaaactgacggacgaattaaaaggccaaatttttttgtggatgaggaatcaattgaagaacatgctccaaaagtattactgtccaagagaaagattatgtcaccaacgtctcaggagaagctttacagtgctgtgactggtattgatttgtgtgatggagtccaaagatcgaatagcaaaatcattattgaagattgtgacaaaactacaatatcattgcctcagccagcacacatgcaaggcaaatcaatgttccacacagacaggagacttaaggacaggacatctgtctcccctacaagcaaaggacttctgaagtcaacaggatccccgcccaatcaacagacttgttcttgcatgagaagttcgccagtggtcttagacactgagaaagctgttgagttttcacaaagacagatgcatgatatagaaaatattgctgcaaagcttatcaggagcttgaaacacatgaaaagtatagtggatgaaagtttgtcaacagaagcatactctttacttcctaattttaacattgcccagagcagcctctgaggatgcattagaagtggagaggactacgaggaaatggctgtcgataatgaacaaagactgcagtcgcttttgtaaaatattgagcctagcaaagaagaatgatgtttctcatcctgaagcgccaaggaaacaaagaaaaataacgtttgcagatgaagctggaggaatgctctgccatgttaagttttttaaggatggacaagcctctctttctgaatgccagagtgatttataggcactaagctggtcttcatcatgaaatttgatcagaaaggaaaccttgttgacaacagaatataatcaaacaagctgctcagctcagatggaccaaaataatgaacgcacgcacagtatattgaaccaaaatagtgaacgcacagtagaaaacagacggagaagttagcgcatgttgaacgcacagtatgtattttactgtaaattaattgatgacattgttgtcccaactcaggtattatccttgtatgttgagttcaagagtccatgtaaagcggcaatttttacaatgttcgctgaggccacaagtatttgtaacccagaattgtagcctctgtaatacaattattggatactgttggtccaaagtgctttatttgaaggaactatttaagtttcagtaataggaatattctcttttaagttatactaagttttagattagtacgtaataaaaataaatctctactactaattataagcataacgtaggcgtccacacccccacggtggtgcacgttctgccgcccgcgcatcccgcccgcggccgcaccttgccccgcatcacgcagtccaggcgcaattcctgctcgcgaaggtttcgggaaaggttgaacaccgcatttcgcctccggtgtctgtctgcctgcctggctcgtgctcctcggcgtcgccctcacccccatctcgaggccgccaccccgccgccatcctggctcaccccacgacgcaaatctgtgtgccgcccctcccctcccatatcgccatctctcctcccctccccggtcaccacccatacctcagccacctcggcggttgtgctaggggcgatggtggtggaggctgcggtcgcagctgtgttagtggaggagatgtggtggcggcagctagacagcatcgtgagcgcggtgtcgtttgggctcatgtccatgttccttgccattgccatcctcgagcacttcctccgccccctggcccacacgctcgagcacgcgccgccccgggggatccgccaccgcctcctcctcttcctcagccgtggcggtgagcgcagcgccgcccccagtttagatcttgaggcggcgacgaagcttcaagcccacgcgcccctcgagatggggccgatgcggacgcggatccgaaactggaccatggggccgacggggtggccgcgtggtgggtgtgggtcgcgctcaccgtctgcgttgatgtcgtcggcgtcggtctcgcgctcgtcgggttcctctactgaacaaggtttctagggattccccggtttctaggaattccgtcgtcgcttggcgctgccctgttatcgtaggtgtcgccagctgccggtcctgtggcccgtgcaggtgcagccatgcccttccatggtgtgccacaccagctctcggaggtgcacaagaagcgcacgctctaccatcccgagttgccctctgcctccaggtacgcacctcctcgttacggcggtcgaaatgttcatgaacgcgagctctcagaggtgtagaagaagcgcacgctcagaggtgcagaacagatacgcacctcctccagagcatttcgtttgttactcatccatcggacatgcatttggtcccaaaaaaagggtcaagctcctatcactgttcatcatttggaatctttgagaactacaagtttgtagcggctcatttatctcttcaaaatcctaccagcacgtggtagtaaaatatagatgataatttagttgtttgtcaggatgaagcttgctaacgaacaaaactagatatctccgccactagcactgatggcgagaccgccccggtgcatcttaaggggcgagagggcaggggaaaagcagcagcagcaaaactggtcaggggccagcacaccgagatccaagcatttcactatcgagcagcggagaaggacaacgataaatgacaggtatgcatcttgactagctcgctgagggggatggcttggtggatctaatgttcgtttgcttgtatcgctactaggcctgctgttgatcgaaaggagcaagcgagcaacaccagtggactacccttgaaaattgtgacctggcaagtctagtaagtgatgcttgcatcataatacattcacttgagactacatgaatgccccctaatattttagggatgaggcgacagggaatagccctttcactgtcttcatctacttttgttctccagatgacacgatggccatcttcctggcgctgcggtcgccgaagctggaggtgttgggcctcaccactaccttcggcaacgtccacaccgccctcgccacgcgcaacgcgctccacctggtgccgccgcctaccttccttcctctctctcccccaccctgctcgtctgttccacccactccgaccgcggctcacatttgcttctgatgtgtgtgcttgagctggaggctgttggcaggactgacatccctatggcagagggatcccatccaacgatcaagaaagccaccaagctgaggatcgcaagctttgtccacggttcagacggcctgaggatcgcaagcttcgtccacggttcagacggccactgtggatcgaggtgcggcaggtcggggcgccgccgcggattgtaggctcgaccgagactacttcgtcaccaacgtcctcgtatgcttcaatgttaaacattgtcacaggttctcatatatgggtggaagataaagatttgtcctgggttgatggtgaggtatttcgaattgatggccaaaacgcccatgttcgcacaaccaaggggaaggcgggatggcgtattgtggcggctacgagggaccgatgttcctgtgtggcagtgacaacgataccgtggagccaaggcaatgtcagcaagctgatttttcagattggaatctatggttctttttaaagatcgaatatgttctagcatcttaaaaagatttgtcagaatgtaaacatttgttctgaggtcatttaggcctcaaacagaatttcttggacttatttcgttggagggaatgggacatcttgagatctaaatgtgtatagaagatccaaatgtgtatagaacatatatttttatgggtatcaaacatgattgtgtgcaaagcacggacatggtactataacaatgaaac

SEQ ID NO: 38360 - DNA, 2099 bp, Zea Mays
gaacagacaggggcgatcagaaaagacaagcagcgtcgtcacaacacaattcagaaatcgtcaagtcctatcgtgctcgccgaaagaccgccgcctcgaacggctcgacacgacgaccttcgctctctccgccaccgaatccaccacaaaaaccaccatatccacttgttggccggccggtcaagaagaccaaggacaagggagaaacgaggggtttagttgggcgcgcgggcgatctcttcagtaaggcgttgtgtggtggtggtgtttggacggagcggagatgtcgtcggcgatggtggagcgggcaaccagcgatatgctcatcggcccggactgggcgatgaacttggagatctgtgacatcctcaaccgcgaacccggacaagcaaaagatgtggtaaagtccctcaagaaacgcattgcacacaagaacccaaaagtccaacttcttgctctcacgttgctggagacgatgataaaaaattgtggggacgttgtgcatatggttgttgctgagagagacatacttcatgagatggtcaagatagtaaagaaaaggcatgattatcatgttaaagagaagattctcacgctgatagatacttggcaagaagtttttggtggtgcacgtgcaagatatccacaatattatgcagcatatgaggagctcttgcgtgctggagtggtatttcctcaaagattgaatggttctgtgccaatcatcactcctccacagactcagcctctccaaaactatccctcatctttacacatttcacagcaggaggaacttgaattaccagtttcagatttccctgcattaagccttacagaaattcagaacgcacgtggcatcatggatgttctttcagagatgctggatgctttagatccaggtaacagagaggggcttagacaggatgtcattgcagaccttgtggatcaatgccgttcttacaagcaaagagtagtgcagcttgtcaacagtacctcgaacgaggagttgctcaaccagggtctttctttgaatgatgatatgcagcgtgttctggcaaaacatgatgctattgatgcaggtctagcagttcgagtggagaagccgaaatctctgcagtcccaaattggaagttcttcaacaagaaagccagataccatggaagaaacaattcagaggcacaggtgatcaaaatggagacattccaccagcaccatggggaactaagagatccactaacccatttgacgacgatcagcttggtggaatggcagtgcaaccaaaaggcatgcaaccccaaccagtgcaacccagtcagcatgggaacaaattcatgtcagcaccaccaatgccgaggggacagccaggaagaatgcagttgcaacaggtgcctggtgctcagcttggcgctctacaaccaacacaggctacactgaacatgcagtacaggggcatgcatccatcgatgcaaatgaatcatggaatgggcatgtattcccaaccaacgttcggaggatattatggaatgaaccaaacacagctttacggcgttcatatgtctggttatggatatggtcagcaatctgggggctactatattccgaatgctgcatatgcctatactagtgcaaacgaacttgcccagaggatgaatgacctttcagttcaaaacggtgatccaaatggagccgcagcaaataagcagagcagacctgaggatgcactctttggtgatctcttgagcatcgccaagatgaagcaaaacaaacctgcagctggcaaggttggcggctaagtttgagtaaagaaggtacataattttatcttaattgccagcagcagaaacctttcctgacagcgcatataattattttgccacgttctatgcaatgccagatggcttctcgatgtaagctcatttggtagaaattcatattgggaactggagattaggatgcttgtggggagcctcatagcaaatatgtctataactctactatatatgaaattcttgagttctcagtagcaatatgtattgtcataatttccctctgcaaatattaaggcagaatcagagattcctgttctccctagccatata

SEQ ID NO: 38361 - DNA, 1350 bp, Zea Mays
ctaacatatcagtacagtttaatatataattatatatacacaaaagccactagaactacattactgtggttccattccatcgttacactacaccactaagagcaataaggtataagtaaaaatgcatttgtttgtagatcatcctggcaatttaagactacaagaagtgtggtgcttacaattaaggtaccgcaggtgctttgaatcaagaaaaaaactgcatacttctttttttcaccatattgctgttttattgacttaaagctaaattaactgaaaggaggctctgcacttttttctctcttcatccaagcaacagccaacttgatcagtcccttcacttgtgagcagtcgaattcaccacccaatctaaaaatctacaaactctgctatccagaaaagttgatccccgtccaatctgtaagaaatcatcttgatgagcgtcttcagcgtcacatgcaaccctctcatcttcacgtttgaccaaatcgaaaagccgtgttcctgacactagttcaagaggctttgcgcctccgtctaggcgcgccgcacgacctaactccccgccgtgaagaaaggagaaacttcaaacaaggccactcgtgtttttgattcgggtggaaacaaacatctcgtggagaaacagctgaaccactcgtaacattccacctgcaacgagaccaggatttgtagcatagaatggttatatggtgtggggttttgcaggaacacttgtggggctcctgtcagtcctcaccaggtaataatttctcatgaatgaacttcttgactgagtttttttagttttcttccctttcttgaccacactgttgttcatcataacaaaacaaaccagtcacggccagttcctctgaatcatcatgatgtggacatatgtcgacaacactgcttatgacttgtagatttcatggtcttgggcaggactaattggcttggatcaggtaacacgtccacacaggtctagatgcgatgcccaattgtgtctcctacatgacaatcgaatattccaaatccagtctggttaggtgctgcctccaggttgtgttgtgtacatactacattctgggcgaattggggctttgagcatccataggtcactatcaccagacatctcgaaaggaaaccaaatgtgaatttcaatccctagatttctgctgttcaacgtggtgggactggaaacgaagatgcaaccgaattccatcgaaagactcttgtgggaaaacagaaaaaaccatgtacacgcgcacccgcgtggattctgtatggggcgagggaggatttctgggagcaagagagtagcaggcagagcagaggcttaggagagttatg

SEQ ID NO: 38362 - DNA, 1010 bp, Zea Mays
aactctttactcgctcactcccccgcgccactgatctctccttccgggaccctaattccgcaggaggccgcgccgggggagtgacgccgatgcagcgccgggtgggcatggcggacggcgaggctaggtgtcggacgctcggcgccgtcatcaaggagaaggatgaggagttcgcgctcttcctcgagatgcgccgacgcgagaaggagcgcggcgctgcggccgccgcggcggaccagcttctgctctccggggacgtcgcggcggagaacgggatgctgctcctcgacccgccgccacccgctggtgggagcttcatttcggcctcttcttcggagcccaaaccggcggcgtacaaggtggctggcggcggatttaggagggcgcctgggggagtggacgacttcctcaatgcagacgccagcgacaagaacgattacgactggtgagtgcttcggcagtagctaccaactttccactaattagctagtatcaaatttctgctttttcggttgtgggcagcatagccattggtgtgacaatgattctagccaaaccacattgtagcattgtgaacttcaattttgttctgctcttttgtcgtttaaggcttcagagaatttggtgaggtgttaagttttaaccattttaaggcttcagggaatttggtgaggttttaacagtgtaatatttagtacgggttccctaaatcttgattcctcattcccaatgctgaatgcaaagctgcaggactgacaaaactgagaactctacagcttcataagtttcaagctaaatcttcattcttcagttgccttgctagaagcggagcgatgagttccatttttctgtaattttgccttctgtgcatacagtctatctgctgtccatgcattgtctgttaagttgacggtgtaccataaagtttgtctttcgtgaaacttgatgttagttagaattcagctggtgttgctgggaaggatgggtcatggacatggtggttgttggag

SEQ ID NO: 38363 - DNA, 1833 bp, Zea Mays
atcttcgcagcattgttgctgtccgaggtcagccgccctctctctctcctcgtgctccgattcgtgggctcgagctccggtgactaggaacagcggcaaggaaacaatgcttctttctcccttcgcacctttgtgatgcactgaacactagtcaggagctctagtaatcctctaatggccgaatgttcattggcaacgctgagagtgagaggccagtatcaagggagatggacctggtccaacagcaagttgaatatgccaatcatggatccaaagaggaactacgccctcaagattcatcttccatgccaatccaaagcagcaagagaatggacaagtgttgcatttaccccttttggttttcatggaagggatcacagggtggaaacttcagttaaatgttactgtttgcagccactcatggattcggagagcatggtctcaccaaatctaatactgatttcggatgaagctcttctcactatcagcatggtttttgcatatttggctggagttgtaccctctgggcagacatctcctcgtgtcagaaatcagaatgtttctcaacatattccagagccaagctcctctcattctggtagggacctaaagttcttgcctgaaaggaatgctgcatttgaccccaacgatatgtggagtgaagtaagaaatatctctggaagttctgaactcgatggaatcaggtggttgcaagtatcgactaccttgatagatagtttaattcaaccagtatttatgaaatggattgaagaagaacaggccttggaaaatggacaaatcaacgaaaaacttatgaagacgataagcagcaaactaaaggagggcaataagatcttgaggaggtttaacagatttgggaaatctgaactctatttggatatgctctttttcctaagatttggttctgcaaggtgtgacagttattttaatgtcaaatttcttgctgaacatggagaaagaattttagaggaccttgttatttccttagctgatgtgattgctagtatttatctggagcttatgtcagtggatggtgatatgtctgctgaagttgttggttccagcttggttctatgttctctatcaaccagagaactccaaaagctgcgcaatgaggtggcaattaattggtggttgcaccaatacttcaagtcagttgtttcaatgtatgaggacaggttcgagttatatgttctatgcagcaaaaaatgtgaaaaaacagccgacaatcaagctgagagggcaaattggtggaggattgcatctggcaagcctaatgtgcttactcttgattatgttaacatcagtccattttcccttccagcaagaaggacaaaggaattaagagctttgattggatggaggtattacttcagcttattcttagagttgtcagatattgccatgcccttcataagggttgctatcagcaaagtgagctctgcggtgtcctacttctgggtgtcaatgattggaaggtctcttgggctgattttctcagggattagacaatcactaggctggaaataagcttatacggtcatacctgttgagttttgagtctgacttctgggactgaatgaatgtctgttaggttatgcattgtaaatctttgagatggctgtcatttttctctgctttctttttcatcttagtgtgtaagaaagtccattgatttcgtggacggaatatgttaatctgtggattactgaaatccatccacatccagtctttctcaaaacagaattcatgtacacgaaatgtctagatgcatttttgtttttttattcaagagggacggaacatcatatt

SEQ ID NO: 38364 - DNA, 3318 bp, Zea Mays
agaaacggagcaaagtcgaaaggggaaaaatgagttaaacccaaatcgacaccaaacccactccaggaacacccgcctccgccgccgccgccgccatcgccggcggccactacaagcgcggcgtccggagacagtactgcgctaccaacccctagagcctggattctgatgagccctccatggcctgtcatatctgtcccctcttcaatctccgactcttgctgctgctcggcgcggttctcgggaacggcggcctcggccggggcggcggagcggaggcttcagatcgggcggacccggacccgtactcgatcctgatgtggcacgactactcgccgccgtcgcccccgctcccgcccccggacccgccgtcgccgacggcgacatgtgagggggacctccacgggaagggtgacttccacacgcgctgcgaggtctccgaggaagtggagctggacggcgacgtctacatcacggggaacggcagcctcgtgctcctctctggcgcctccctgacctgcgagaagtacgggtgcgttatatccgccaatttctcaggcgaggtgcgcctcagccgcggcgtccgcgtcacagccggcagggtctcgctggttgccaccaacatcacggtcgccgacacggtcgtcgtgaataccaccgcgctcgctggtgatccgccagaccggaccagtggcgttcccacggggacgcacggcgacggtggcgggcacggtggtcgtggcgccagctgcttcgtcaaggaagggcagacgcaggaggattcatggggcggcgatgcctatgcatggtctgacctcgaacacccctggagctacgggagcaaagggggctcgaccagcgttgagaaggactatggtggtgacggtggtggcatcgtgtggctgtttgctgaggacctggtcatgaatggcacagttctcgccaacggtggggatagcaatgagaagggtggtggtggttctggagggagcatctttataagggctgcatcgatgcatggtggtggcaagatcagtgcctctgggggtgatggtttggctgggggaggtggagggcgagtttctattaacgtttttagtagacatgatgacacccagatttttgttcacgggggaaggagttcaggctgtccagataatgcaggagctgctggaactctttatgaagcagtaccaaaaagtcttattgtcagtaacaacaatctgagtacacaaacagacactcttcttttggagtttccaaatcaaccactgtggacaaatgtttttgtaagaaatcgtgccaaagttgctgtccccttgctctggagtcgcgttcaggtcgaagggcaacttagccttctttctggtgctattctaacttttggtctcactcgttatccatactcggagtttgaactgatggctgaggagcttcttatgagtgactcaacaatcaaggtgttcggtgctttgagaatgtctgtaaagatgctccttatgtggaactccagaatggaaattgatggcggtggagattcgatagttgcaacatctttgttggatgctagcaacctgatagttctgaaggaatcatctgtgatacactctaatgctaatcttggagttcggggccaaggtctcctaaatttgtctggggacggagacacaattgaggcgcaacaccttattctttcgctgttctacagcatacaagtctgtcgtgttgaagatattgatgtctggggtctcgtacaaggaactgtaattcatttcaatagggcaagaagtgtcactgtgcatacatctggaaccatcagcgcatcaggcttgggctgtcgaactggagtagggcaagggaaaatgttaagcagaggtatatgtggtggtggtggacatggtggaaaaggcggggatggtttttataagggaaaccttgctgagggtggagctatctatggcaatgctgatctaccttgtgaacttggcagtggcagtgggaatgactctaccgagttgtccacagctggtgggggtataatagcgatgggctcatgggagtattctttgccaagtcttgccctctatggctcagtagaatcaaatggtggtagctatactaatggctctgttggaggacctggtggtggttctgggggcacaattcttctatttgtgcatactttgtccttagctgaaagctctgtcctctcaagtgttggtggcttcggaaatgctggtagtggtggaggtggagggggaaggattcatttccattggtctaacattcctactggagatgagtatgtgcctgttgcagctgttaagggatcaatacttgcaagtggaggagtcagcaaagggctgggatattctggtggcaatggaacggtcacaggaaaagcttgcccaaagggtctttatggaacattttgcaaggaatgccctttgggaacatacaaaaatgttactggatcttctaaatctttatgctttccatgccctcctggtgaactccctcaccgtgctatatacataaatgtcagagttcttagtggagggtctgttcttttttttggtggtcatgggtgtcatgagctcgcgtccgtgctgggcacgctgagcaacgtggaagggttcgcgttccagcgcgacgtgtcctacacggcgttccttgaccgggtgcacggcgaggaggtggcgctcaacaagctggggctgtggcgggtgccgcacccgtggctcaacatgttcgtgccgcgctcgcgcatcgccgacttcgaccgcggcgtcttcaagggcatcttgcagggcaccgacatcgtcggcccgctcatcgtctaccccctcaacaaatccatgtgggacgacggcatgtcggcggcgacgccgtcggaggacgtgttctacgcggtgtcgctgctcttctcgtcggtggcgcccaacgacctggcgaggctgcaggagcagaacaggaggatcctgcgcttctgcgacctcgccgggatccagtacaagacctacctggcgcggcacacggaccgcagtgactgggtccgccacttcggcgccgccaagtggaatcgcttcgtggagatgaagaacaagtacgaccccaagaggctgctctcccccggccaggacatcttcaactgatgatagcccatgcatgcatgcatgttttagtttcttgggacaataatgtgaataactcccagctagcggctattaattaatctgtatatagattgatcactgcactgattgtatgtcaaggtcattatttacgttatggtaaaaaaaataccctcgtcgtata

SEQ ID NO: 38365 - DNA, 1238 bp, Zea Mays
gtctgaatgaccactttgatcatcttcataataaagggtgcatggagacaccccttgagtggagaccaggaagcacggaggatctcttcccagatcatgtcaaacacgttgatgcgggcaagactatttggagcaagaagaagaaggaaaactcgactctccacaaggacattcatttgatttccgcccttcgagagaacgatcgtccgggacaatgagttaaggtacttatagtacctatgcatgttggcagtggtccaaaactcccgctccaaagagacatgaataaattcaatctcttcccgcatgggcagcctaatgtcatggactttcatgttgctgccctgaatgtatgcatcagagaagcccaagatatgggtaaaacaacggtagctaactttatgccagaccccctggataaagaagtacatgactgggtagtcatacccatcagcttcttcatcaactttctttacctagagagtggcatagaactgagccaccacttcgtcgttccagggttattccatagtcattatgttttttagcccctttctctctaagttgcggagagatgacatcatgtcaacatctcccatattctcacatccttcccagtcaataaaacgatgtctaacgactgtgtgcttcttagtcatgatgactgaattataaaaaatcagcatgaaagaggttccagaaccgagggtcctggacaccaggatgtctgggtgtgagagagggattagtgaaccttaagcgttgaagggcttccacccccttcaacgagaagtcgactgaaggttcattcggcccatgggacacagtcgccggatgcatgtggagtccgatgacgaggggagtgtcggatgacggaggttcgacctcgtcgtcaaaagctccatcctcctcctggcaaggagcgtatacagcggaggaggtgcttcgacggggacgagtggcgccaaccttttgacgcccttggcgcgcaggttgcaagggcatcgagggtccctccccttccaaacggccagagcctcgtcctcacttggagagagaacgacgaggcggaggagaaggaacacgcgattcctcctggatttcgtcggagtcactgctgaactccaccaccgaagggttgcgacgacgcaccatcttgttgagaagctccgaggagatgaacggttgaaatgtgagtgtttgaggaggctcaagaggctggaggactgagggcttaa

SEQ ID NO: 38366 - DNA, 1224 bp, Zea Mays
agggaaagcctcaaaaggcgacgcgcaagggccgaggagagaaaggaacctgaggaaggcacaccagtttcaagcaatccctaggccgtggcgacgtgctgggaaggattcaaatcaggggcgaagcctaggtgacggcgctgttagtcgcctctagtagctgcgcgacgcgggctggcttgtccgatcggtttgcctcggccatgtcgactaagaaagttctttgcaagttcttcatgcatggagcttgcttgaaaggagagtactgtgaattctcccacgactggagtgatcaagcaaataatgtttgcacattctaccaaaaaggtgcatgctcgtatggtagccgttgcagatatgaccatgtcaaagtttctcgtaaccccacagtgccaccaccacgcccaacgtcaagtacttcaagacgtgcatctacttctcttcaactttcaagttacaatcatccacctcatatggtgcaccaaacagattcaagcaaccaaagacatcagatatctgtggatgtgttggcacattctgccagtaagcctgcatggagaaatgattttcagcatgatattgtttcagatgatggaattgactggtcttctaatcaaaatttgataaaccagacatcattgaaacctgtggatctccctatttgttcttttgctgctgctggtaattgtccttatggggaagggtgccctcaaatgcatggagatctgtgtgcaacctgtggaaaactgtgcttgcatccttatcgtcctgatgagagggaggagcatatcaagttatgtgagaaaaatcacaaacgccttgtagctctgaaacgcagccaagaaatagaatgcagtgtatgtttggatcgtgtgctttcaaagcctactgctgctgaaaggaagtttggactcttatccgaatgtgatcatcctttctgtattgaatgcattagaaattggcgtagcaattctcctgcatctggtatggatgtgaactcagcattgagggcttgtccaatatgtcggaaactttcatactatgtcattccaagtgttctttggtacttctcaaaggaagagaaagaggagatcactgaaagctacaaatccaagctcaagtctattgattgcaagtacttcgactttgggactggctcatgccccttcggaacaagttgtttctataagagcgtattgtgctcactgatgtcctggatagctg

SEQ ID NO: 38367 - DNA, 1431 bp, Zea Mays
aagtgagacaaggccacaagggggatggggcggcacgcgccccccggccccgccccgcgctacgtggtccatttccagtccagtctccaacaacgccggagcgcaggcgaggcgagcacgccgatcgattccgattcgcatacgcccgcccgccgcgaatggacgatgcggagtccgcctcgagggcggggaggaggcgggcggccgccgccgcggggatgaggttgttctcgccggagtactacgcgctgtgcgccggcggcgggatgctcgcggcgggcgccacccacctcgccatcaccccgctcgatgtgctcaaggtcaatatgcaggtgaatcccatgaagtataacagtatattttcaggactaaatgttcttgtgaaagaagagggaccttcgtcactttggagaggctggggagggaaattttttggctatggtgttcagggtggctgcaggtttggcctctatgagtatttcaagaagaggtactctgacgtgcttgtagacagtaacaagagcaccatatacttccttagcagtgcctctgctcaaatcatagctgatgttggcctgtgtccgtttgaatcggtgaaagtccgtgttcagactcagcccatgttcgctaaaggtttggttgatggctttccaagggtgtatgcaactgaaggcctatctggcttttacagggggcttttacctctttggggacggaaccttccatttattcaaaagaaaaaggaggactgctcaacgatccagcaacttggtgctacttgtctggctggttatatatctggtgccgtcggtactgttgtttcgaatcctgcagacaatatcgtctcatccctgtataacaaaaaggctgaaaatatcatacatgctgtgaaaagtattggatttcgcaatttgctcacaagaagcctgcccatccgaatcgctcttgtcggacccgtcataaccatgcaatggttcttctacgatacaatcaagatattaactggattgccaacgactggaggacttccgcgcgaactagaagaggctaacatataatctgaccagtttgagataggcttctcgacgcactttttggtatcgtatggacaagtatttgtctatggttctgacttactaggggaagagtatagttggtagttttcagggaagagccaattgacctgaatacatcatgcgtaaggtttctgctgctggatatggaagactgcctcgtgtcgtatgtttttccacgtcttaaacaaccttgagcttcagcacccctccaggtacagcattgtggccaggtggtgctttagtaagtgtgtttcgtaagattttgatgtatgagaaaaatgcacttgtgatgtatacacgcgaccttgaaagtaaataatccctctgaaggaccgagatttgaagtgaaattctg

SEQ ID NO: 38368 - DNA, 4304 bp, Zea Mays
atcgccgttgcggaattgcggagcgcgccgccaaaacaaacgcgtcctgctgccggaatcagaagatcccgaggggttctgatctgagggcccaccatcctctctacacggcacaggaacccaactactactactacaatcgttgccagggagctcaaccgactcgggaccaaaatcggctgctgttgctggctgggacgaaatcggaggcatccgcctttctcgagagatcgagctccgcgccggagcaggcgggccaggcggtgccgctgctgcctgctggtgggtttacaacatagggatggagtcgagatccatccggattcgacattcgaggtcttctgctttgctgttttaaacctgtagaggcagaggacttgggaatgctgaaaaatgtgcctgcaaaccgacgggggaattttttgtgcaaacaagattcgacctctgttcaagcagatattgttggcttctcatgagtatgggcttcatgctgatactgcccttattttcaatgatttaaagcacagtagattgaaggcctttatatttgttggccatcaccttggagacgacggttaaaatcttctacattctttgataagtggtgtggcgcttgttcattattctatcgttgcatagtttgatacgatggatgggaggaggacaattttgatgggacgatatgaaattggtaaacagctgggacaaggaacctttgcaaaggtcttttatgctcgtaatcttactactggcctggctgttgccataaagatgattaacaaggacaaggtcatgaaggttgggctcatggagcagataaagagggagatctcaataatgaggttagtgaagcatccaaatattcttcagctttatgaggttatggctagcaagagcaaaatttattttgttctggagtatgctaaaggtggtgagcttttcaacaaaattgctaaggggggaaagctcagtgaggatgctgcgaggaaatatttccagcagttggtcagtgctgttgatttttgccacagtcgaggtgtctatcaccgtgacttgaagcctgaaaaccttctacttgatgagaatgaaaaccttaaagtctcagattttggcctaagtgctctagctgagtccaagaggcaagatggtctcctgcataccacatgtggaactccagcttatgttgctcctgaagtgctgagtagaaaaggttatgatggtgcaaagtctgatgtgtggtcttgtggagtaattctttttgtgcttgtggctggttaccttcctttccatgacacaaatttgatagagatgtacaggaagatttccagagccgagtttagatgccctcgttttttctcaactgagctgaaggatctgctacataaaatccttgttccagatccaagcactagaatttctatctcgaggataaagaggagtgcttggtacagaaaaccggttgaagcacatgcaaagaaaaatgaggcagaaacaagcgagaatacttgtacgggtgaaggtacaacttctgtctcaacagagtgcagtacgtctgagggaaatcaagggccattaagcctcccaaacttgaatgcatttgacatcatctgtctctcaacaggttttaatctttctgggttttttgaggataagtatggtcgcagggaagagagatttactaccagacagcctgtaacaacagtatttacaaagctgaaggagcttgccaaacgcctaaagttgagggtcaagaagaaagaaaatgggaccttgaaattggcagctccgaaggaaggaaagaagggtatgcttgagcttgatgcagagatttttgaggttgctccttctttgctcttagttgagttgaaaaaaaccaatggggacacgctggagtatcaaaagctagtgaaagaggagataaggccggcactgaaggatattgtttgggtttggcaagatgatcaacaccagtgctcacaatcaccagagtctctattatcaccaccggagacacaggatgaattgcgattatcattgcctcagcaagagggtcaagacttcttagaagccccattgccatcactatcgcttgaccagttgaaatcaccaactgccccagagcaagcagagcaactgccacaaccagaacagttgcaaacgccaatcgctccagaggagcaaattaactagctctaacagccagctgatgccaaaaaagcaaaggaaaaaggtcccgacaaaaaagaaaggatttgcatgtacaatatcagcagtggagtgttgagttaggctcaactcgtgtcatttactatatttctcctttcaccttgcaatccgaaaatttacaattcctgtaccaaaatgcatctatctgttctgtttttttttttgctttctttggattgctgttatccacgaattaaacaaatgatatgaataagttttcattataaattgccattttttgtttctttatagaaatatgtgtggattgtgaagaaaatgataacaaaaatagttgatacttctttgagggaggtggaaatttcttgaggtattcgtgctttgaaatgattcagtaacctcttttacaaacagatcgtagtacacttgctgtccatgtcctgcagaggaacgtctctcctggagacatacaaaggcatccagatatgtccccatcgaagaaacagttaacaaacaacaatgattcgctgtactggtcaagagcgctctcccctcttcctcttgtagctggtgtggaggctgagctgcatccggtctctgttggccataagagcatggatgcagaaatgaaacagccacttgagggatccatgtccctgaacatcgacagcgaaggtgaaccccacattggaaatggatcgatcgtcgtcgagaaccctgcatctgacctggtgaagtcagaatctgaccgaataaaaaccttttaccagacggtcctgtcggctatcatggtgttcgtcacggcagcgctatcaagctacaaggacatgaagcctctttactcgaccacaagccacggcaaagctcacctcagcaacctcctagtcgacgagggcctattcatattcatgaccttcttgtgtgctatggtcctaatgatgtctgagttcgtcgtgcaccagcatggccggcggggccatgtctggtgctgggttcgcaccattctcgttgcagtcaccggtgtgatgctaatcgtggctgacacaatcctcctcatcgtgacgaaccgaagcaacatgttgctgtcagttcttcttgtaccggaggtgttgcttttcggcgtggccgtgagcgttggagcatggatgcaagagagtttacccagctcggagcttggcagcaggtacgattccgccatgaagggaacctttgatatagctacagttggcaccattgtctcgttcacgcttcaggggggcatcgtctttggctacctgaaaaccccagacagtaatcaggtcaagcatgacccgccgctggacctcgctgcgtgctacgccacctcgacgctctccctgaccggaatgacaatgtgtgccatgccgctggcatatctccccaacggcatgctggaggttctcgtcagagtcgtcgagaggcttaggagtgctgtgctggccgctctggcgatgatggcgctggtcgtctcagtggagttcctggatggattcgtcgtggtctccttctttcccgacgccgtcacgattgccctgtactacgtggtgaagctgttctcggcatgtcaaccccgagaggagatctcacagctggacttcaccttccggatcgttgccgccgcggggttcacgctaatgactggactctatgcggcttttacggggacagatcactatggcttcaacctcaagaccgctatgttcatcctgttgcttgcagttgtgtcgagcttgagccgtctggcaatcccacttcacatgcctgaggcgggagtgggaggagtcatcgagttcggcattgttagtatagctctctcttttcccctgctggcgcttctggctgccattccattggtgttcaaggtcttcgtcgaccattacatcaatcgctagtctttgggttgtctggcgcaattcttcctgtggtacagtgccagtaatgaatgatgcgtttttaaactaagggcataaatttaaaaatcttatttttattactgcatttactcagtctaggttgcttgtttggaagagcaacagcaagagactagccagatcctttgtaaggataaatttggctattattagaagaaaaatgtctttaaa

SEQ ID NO: 38369 - DNA, 3657 bp, Zea Mays
attatctcaaaaaccaaacggatgagctccacccgacggtcgcccaagctgaaatcagcaataagcagtcactgacgatgggcctaaggccttgtgtcccagcttgacggcgtgacaggcagcaaacggccgcccccttctccttccctccacccctcttcgtctcgtctcggcctctttccttcctctgttcctcatcttcgtctcggcctcacccccgacgaccccgcaccgatccctccacgcgctcgcgcgcagcacgggcggagttgggcgaactccgtgctcgttcaacccgtactctagtacctccagggttcgggtcgggtctgccttcctcttcgtatggcttccgccgccgcggaaaccctcgcctcgttcccaatcgcatccccgtcccgctcgctcctacgccccttccccaggcgaccagccggcgctaggacaggcgcaccgtcgatccggatatccgccgtgccgccgcggggcctcgggctcgcgctcgtacaccgccgctgcccgccagcggcgcgcgcgaatgttgagcgcgacggcgacggcgcctccgggaacggcgagccgtcgtcctcgtctggggatggcgaccgcgacgcggctgcggagtcggggggcgatagcaccagcacgagcaccacgagcacggccgcgacaccgccgccgccctcgtcgaagaggaacgaaaataagtggcggcggaggctgactaagggaggcggcgtggggcggtggctatgggagcccatagtccagggacgggagatgggcttcctcctgctccagctgggcttcgccatatttgcgctacgcatgcttcgcccagagatcgcgttgcccggttcagagccccgcccacagacgacgtacgtcagtgtaccatacagcgacttcctggccagcataaacaaggaccaggtgaagaaggttgaggtggacggggtgcatatcatgttccgactccgcccagaggtggagtcccaggtccgtgttgagcagacaccgacacagcgcggagcagattatgtcattgataatgctggagtttcaaggagaattgtgttcacgacgactcgtccagtggacataaagacaccatacgagaagatggtggaaaacatggttgaatttgggtcaccggacaagaggtctggcggcatgctcaattctgccctggtaggtcttatctatgttgtattgattgcggtagttttgcagcgcctgccaataagcttttctcagcaatcacccggtcagttgaggaataggaagaattctaattccggcggagcaaaagtttctgaaagttcggatatagttacatttgctgatgtggctggagtagatgaggcaaaagaagagcttgaagaaattgtggagttcttaaggaacccagaaagatatattcgtctcggtgctcgccctcctcgtggtgtcttattggtgggtcttccagggactggaaagacacttcttgcaaaagccgtagcaggagaagcagaagtcccattcataagttgctctgctagtgaatttgttgagctatatgtaggcatgggagcagctcgagtacgtgacctatttgctaaggccaaaaaggaatcgccatcgattatttttatcgatgagattgatgccgttgcaaaaagccgtgatagtcgatatcgcattgtcagtaatgatgaacgtgagcagacattaaaccaattgctcacggtaggacagtgccctttcttatttcttgagcattcaccaaattagcttcatcgcaagttgggacccaattaaagcttatacttgtatttttattggctgataattgattttttgctcttggtaaaacttaaaaggggtttgagccacactctacttcactactaaggatactgctttatcatgcaatatttgtttttgagaaagggcggaaatggtattattattggtttagctgccttgattttgggttctccccaggaaatggatggctttgataccaactcggctgtcattgtattgggggcaacaaatcgagctgatgttttggatcctgcccttaggcgccctgggagatttgaccgtgtggttatggttgaagctcctgataggtttggaagagaatcaattctaaaagttcatgtgaaaagaagagagcttccactgagtaaagatgtagatctagccaatattgctgcaatgacaactggttttactggagcagaccttgcaaacttggtaaacgaagctgctctgttggctgggcgattaaataaagaaatagtggaaaaggttgacttcatccgtgcggttgagcgatctatagcagggatagagaaaaagcatgcaaaattgaagggtaatgaaaaagctgttgttgcgcggcatgaagtaggtcatgcactcgtgggaactgctgtagcaaacctccttcctggacagccacgtgtggagaaattgagtatattgccaagatctggaggtgcattaggcttcacgtacacccctcccgtcacagaggatagatatttactctttgttgatgaactacgtggccgtttagtaacactactgggtgggagggcagcagaggaagttgttttagcaggacgggtttcgactggtgcacttgatgacataagacgtgctactgacatggcctacaaagctgtagcagaatacggtcttagtcagcgcatcgggccaatatcacttgctacactgtcaaatggtggtttagatgactctggtggctctccatggggaaaggaccagggacatctagttgatctcgttcagagggaagtaaaagcgcttttacagtcgtcactggaagtagctctttcagttattcgtgctaatcctgcagttttggaaggcctcggagcatacttagaagagaaagaaaaggttgaaggcgaggagcttcaagagtggctaaaatcggttgttgcatcaaaagagttgacctcttttatcagaggacagcaagagcaagttcttcagctggaagcaggctcctagcgtcaggagtatgcaccgggctcttaaaattaattacttaacaaaagtgactcagcaattagaacatacaatatgagacacaaggtatgcaatggaaaccttcatatactgggaagagacctgtggccatgtgtggtgggttgtatgaacccccacccattcatgctaagacaaaccgggtctgctaagacaaactggtcggatgcccaccctttgttcggtgaatcatgagatcgagccctatacgagaattcaggaaaaaaaaagaaaatctacatgcccgagtgaccatgtaaatatctatcattgcagttcctgaacccttgactacaaaaaaagaaatccagagatgattcatattgagctgtaacattgtacgatcaacctcaggaatattgtaagtgattcagcttcacatgttgttccatagattaggtcggtgttacacatgtaaaagattcttttttggcaatatattcttgtactcaccctattggaagttgttttcctctatataccatcctagaaatgatcaataggataatgcttatacggactatggttcctgtattgagaattgttcttcagaaatcagaatagtgatcgctttttgaaagaataaaa

SEQ ID NO: 38370 - DNA, 2290 bp, Zea Mays
atcgttcccaacattcccggccggcgctgtcgcttccctacctcgtcgagagaatccgctgccacctacgcctacgcggccgcggtcatgagttccaccgccgctgtggcccttaatcgccgcactcgcagccgcccgccgtcggccgcatcctcccgcaggtccgatgatcccacggccgccgtcgccagtaccgccaacggcaacggcaatgtccccaccaaggccgcctcccccgatcacgcctcaggggagaggacggtcaagaagctgcggctgtccaaggcgctgacgatcccggaggggaccacgatctcggaggcgtgccggcggatggcagcgaggcgggtcgatgccgtgctgctcaccgacgccggtggcctgctctccggcatcgtcaccgacaaggacatagctacaagggtcattgccgaggggttgcgggttgagcaaacaatcatctccaagattatgacaaggaaccctttatatgtcatgggggacacacctgctattgaggcactgcagaaaatgatccaaggtaaatttagacaccttccagttgtagaaaatggtgaggttattgcgatgttggacattacaaaatgcctctatgatgcaatatcaagactggaaaaggcagcagagcaagaaagtgcactggcagctgctgtagaaggggttgagcgacagttaggtggcaacttctcagctccacacaatctcatagagactatgagagaacggatgtttaaaccttctttgtcaaccattatcacagagaacacaaaagtagcaactgtttccctttcagatccagtttgtgtagcagcacggaaaatgcgtgagttacaagttaattcagtcattattactgctggaaatttgcttcatgggatctttaccccaagggatgtgctgatgcgtgttgtggcccaaaatctttctcctgagttaactctagtagaaaaggtaatgactgcacaccctgactgtgctacattggacacaacaatccttgatgcactacatatcatgcatgatggcaaattcttgcatattcctgttcttgatggagatgggcgggttgctgcttgtttggacgttctgcaacttacccatgctgcgatttcaatggttgaaggaggtcctggtgctgcaactgatgtggcaaacacgataatgcagaaattctgggaatctgcacttgctctagagcaacctccagaggaggattttgatagtcacagtgaattacctttagtgatgccatcagatgccagggatggcagtagtagtatttatcgtcctgctgttgataatttatttgtctttaagcttcaggacaagaagggacgcatgcatagattcacttgtggctctgaaagtttagatgagctgatatcgtctgtaatccaaaggttaggcatggttgatgagaagagggtgattcaactgttgtatgaagatgacgaaggcgacaaggtgctgttgacaaccaattctgatcttactggtgctgtgttttgtgcgaaatcatctggattgaaggtcttgaggttgcatattgacaactcagattccagcaatgaagtagtaacacagccattgccagagctggcatcatcccagggaagtcagtcgatgcatgttcattatggttatggattgatggcttgcgcgattgctctgacgggggtagctgtgatagtttacttgagacactcgaaagcgtgatgaacttctggaggatcaacaaagaattttgcatagcttatatatacgactaatacgcatagaaggatcacacacttcttcggctcatgagaaagttaagtaatcatgggccgatgacgaagattacattggtggtccaagaaaaatatgctgactgactgtcatgttctccagttacctgacgaagtcggttcttatggtggcagggaagcctatgatatggttcttatggttggcaaccatgaattcagtgatgtctcaagtaaccatgtatatgcatctctgagcatgaaaaccaagaatgaatcacatatcccaagtcgagattcttctttaacttttcactatttattgatcagtggcggtgctgcatgtaaaataacatgcatcgactgacttccctgaggttgccctgctggatactggatccgctccgaagatgagccgatcaggtgcaagatagaattagaaagctagctagcgtcgcttgcactcgagacccgcagagccgatcgatgagaatggaacaaattcaaaaaaaacatgaaggatg

SEQ ID NO: 38371 - DNA, 1037 bp, Zea Mays
gtccgtttccttcctctctctctctctctctctctctctctctcttctggggcttgcagcagaatcgcagcgaccgcgtcgtccccacgcggtgcggccgctgcgcattgcgggccgggagagcgagaacggagtggggaagatggagacggtgaagagccttctgaagccgaagccgacgccgcagcagcagctgcgcgagtggcagcgccgcctccgcaacgagggccgcaacatcgaccggcagatccgaggtccaggctgtcgccctcgacctcgatgtgctgcagatgtgcagagggaggagaagaaggtggagaaggccatcagggaggccgccaagcgcaacgacatgggatccgccaagctacagctaggacagtaggccacttgtccaagagcactgaagtgatgaaacttgtcaacggcctcatgaaagcccccgaggtcgcagccacaatgcaggaattcagcaaagagatgacaaaggctggtgtgatggaagaaatggtcaacgatgctttagattcaacgctggacagcgaggacatggaggaggaaattgaagaggaggttgacaaggtcctcactgcaatcgctggggagaccgcctctgagctcccggatgctgtcaggaaggaaaaggagaagatgaagcagccttcaacaagtgtacctgaggagagaactgctatagcagaggctgttgatgacggtgagctagaccagataagggaaaggcttgccagagtgaggtcatagaagatagctgaacaaggtcagatcattgaggtgttacggcacatgacatctcacttgataatgtatacacgtatcacacacaatcactgtgattagcagaccgatttccccacatccagcaatgtgattttgtccaggccctgttgtaacctgtatgggtcatgatttctaatatatatcacgtattatatgtttggaagcaccgtgtttaatactctgaataatccatacatttcattgcactgcgacgaagtggaaagagaagagaagtgggg

SEQ ID NO: 38372 - DNA, 1989 bp, Zea Mays
cgccgctggtacctctgcgtcccctccggaccgtcctcttccacatcggtgtcagcggcgtctctgtcaaggacctccacctccgccgcgttgtccctcccgctgccggctccctcgacacctctccccgcccccatatcctgcgccagcgctgctcatcccgctagcacacgccactgtggatctagatccgacactggctgtgcgggattagtcggcgtgcgtgcttagcagcgtctgccgatggatggagaatggtggaatcgagaaggccggtgtcacccacaagatcgacatcagcgatggccccgtgctcccagtcccgtccgcctcgaatccattcgtttgcctgcacaggagaagaaccacgcgtcgttcgacttcatcttcatggacgccgacaaggacaactaccccgagcgactgctcaagctggtgaggccgggtggcctcatcggctacgacaacatgctgtggaacggctccatcgtgctcctggacgacgcgcccatgcgcaagtacatccgcttctaccgcgacttcgtgctcgccctcaacatggcgctcgccgccgacgagcgcgccgagatctgccagctccctcgttcatgtggtgctgtgtatcggaagaaaatgcgacatcaaacttcgccgccatcgacgcaagcttgggagatgcgacgggggaaggtgtggcggcgcgggggcttgcgacgagaggcgcgcgcgcggcgagctcggccgtggcactgggcttcagcggggaggcggagaagccccgcgaggagggcaagctgatgttgagttcggcggacgaggggcccggcgacgacgacgcagttgaagagccgactccacggacggtgcaattgcggatatattagtgcagccgatgggtgaggagcggctgtagccctacaggaacccggcaaggacaggccaccgtcccaactcgccttgtcttacctcatcagtcatccctgccctcaccttctcaggcatctccagatacttggaggtatttgggctgataggattggtgatctaggatgcaagtcgttgtaaaagaataagaactatggaaagccatcgcatgcgtgtaggtgctcttgcatggagttctttgctttcttctagaagccgtgataggagcatcctccaccatgatatccgtgctcaagaagattatgttagcaagcttaccgggcacaaatctgaggactatggcgcatcacagtgtatgtctgcaattgctggctcctatggctatattgctccaggaatgcatatacccctaaggtcaatgagaagagcatgtctacacctttggtgtcgtgcttcttgagctggtcaccggaaagaagccagtaggtgagttttgggacggcgtcaacattgtccatcgggtcaagtcgatgacaaacacaaacaaggagcaggtgatcaagatcattggccctaggctgtcgaccgtgcacacaaggtcatgcatgtattctgtgttgcacttctctgcgtcaaggagcagagcgtgcaacagcctatgatgcggaagatggtgcagatgctcaacgaacttcccaatccagctgcaggcaaggagatgaggttcccgacggcgacgatttttccactacacaatcggattcttcagcagcagatggatctattgaagcgtcgtgtgacgaagtcaccaaagagcagcagcaaacgagatctttgctatgtttccttctccttgctaaccactgatctcatcaagcttggtttttctcattgctatgtttccctctcctggtgatgttaagatatttggacatttctagcttattagggccttgtgtggaacatgtttgaacaattatctcatttaaacaatgtcaacatgtgtgatatatagaaaccgtagcaacgcacgggcacctaattagtagagttttaaattccaaaacttgtaaaatccataacttttgcatagagactccaact

SEQ ID NO: 38373 - DNA, 1131 bp, Zea Mays
aactcgccctggcctcgcccggcgcccacggcgcgcgtgagtacgtacgccgtaccacgcgctggagccgccagcagcaggcgtcgtcatggcgctgtgctcgcggcggccggcacggaggaccgtgcgctctgacatgcatcgcctggatattttgtccatcgggccgggggcgggcgagagcgcgaccgaacggatggttggtgcaggtgcagcggtgccgacatgacacgaccgccatgggcacggcaacggcagtgcgcgcgcgtgccgccggacggcgaggcgcgcacgttctagctcactactcagtactcactagtcgcggcgccgacaggtcgggcgggagatggagcggtcgacagattggccgggaaccgtgggcgtacgagacgtacggccgcaggggcgcagggatgtacatgtactgctcggaaggtggaatttacgaggccgtgaccatgcatgcatgggcatctctgtcaccgtttccgtgcgtgctgctgcggcccgggatgggcagaagaggcacggaccttggtggagagtactggaggaggtcgagtgaagtcggaacagagcatgttcagaaggacggtccgtgcacctgtttctgcaccggccacagaggtacgtacgtacctgtggaaattggggcacacagaagaagaagaagaaataaaaaaggaaggacgcggacaagttctggtcgcagagtccaaggatgaactggccggccgccgggcggctccatacatgtctggtcccaagcagcagcagcatccaaagtctcatctaaaagctaaaggggacagggagctccatcaatagagctggaattcgatggctgttttggagcactgtctctagctggctttaattgggagaggactttggcatatgatgtgatggcgacaagtgattagaaaagctagcgtagcataaaaagcaagcaaagacatgttcacatgcatatggccatgcaactaacaagaattctctcacaaagcccccctgatgaacattaccaatgcataaccagcgggaattcatctaccttccttagcacggtttgcaggctctttccctgggccatggctgcatgtatacagcaagaaaaacgcgtctcca

SEQ ID NO: 38374 - DNA, 537 bp, Zea Mays
gctgctcatactcttaagaccgatccgacccaaagccaaacccgattgccctcgtagtcgtttgtcatcgcgcgaccgattaccccgccgccgccgcgtcggcagcggcgatggcgtcgtcgttgtcgcgggcgctgctccgccgcgtcgcagaactggctagaggacgcctccgcgccaaccaccgcatgctctcatccgcgtcgtccaccgccgccatcgagagggcttcgcagttgccggcggaggcccaggccgtgcgcatgacggagggttgcgtgcggagattaaaagaattacatgctaaaaaaccatctgctgaaggtaagatgctgcgcttaagcgttgaagctggtggatgttctgggttccaatattctttcgctcttgatgacaagaaaaatgcagatgacaggttttttgagactgatggtgttagattggtcgtggatgacatctcatataatttcgtaaaaggtgccactgtggattacgaggaggaacttatacgttcaacatttgtggttgtatgagtgg

SEQ ID NO: 38375 - DNA, 2901 bp, Zea Mays
agtaatctttgcttcccctttattgtttttagcactaattggtcttcaattcgaattttctctttattatcagttttctggatatctgaacttatcttctgtagataccctaatattgtgtccaaaacatgctgcagtggtagcgtgtgatggaaaaatttcagcttaaagaacttaaattgcatttcatagttattggattgcatggtggtgctttacttggtgtcacataccgtacatctcgtagaatcagtcctttgacagcaacagctatatcaactgttcaatcgatgcccttatcaggttttggtggaagtggatcatcttttgcatctgatgatccattttcctctaaggaagggcctccacaaaatttccaactgtacagctgggagacctatcagcctgttagtggcctacttgcacaacctgagtggactgtgtgggaccaaactgttgagtattgtgcatttgcttatcagcagtatatagtgatttcttccttgcggccccaatttaggtaccttggagatgtttcaattccctttgcaactggtgccgtttggcatcgaaggcagttatttgtgtctacaccaacaacaattgagtgtgtctttgttgatgctggagtggcagcgattgacattgaaacaaaaaggataaaacaagaaatgaaagcaagagaagctcagagtcgggcagctgaagagcatggagatttggctcttatcactgttgaagctccccaggttactgtgagtgaaaaagtatcattgaggccaccaatgttgcaggttgttcgtttagcctcctttcagtacgctccatcgataccaccatttatagtaccaaagcaatccaagttcgatggagatgattcagtgtttcagaaagaactggatgacagaaggtatgctgaagttgctgtcgctggaggaggtgtgtctgttgcagtaactcgcttccctcctgaacagaagagacctatcggacctcttgttgtggttggtgtaagagatggagttctctggcttgttgacaggtatatgtgtgcacatgccttatcactcagccatcctggtataagatgccgttgccttgcagcatatggggaccctgttagtgctgtgaaatgggcaacgagacttggcagagagcatcacgatgacctggctcagtttatgctgggtatgggctatgccactgaagctctccatttgcctggaatatctaagaggctggagttcgaccttgcaatgcagagcaatgacctgaaaagagcacttgcttgtctattaacaatgagcaatagccgagatgtgggacaagaaacagctgctgctgatgccactgacgttacccagattcttagtttggcagtagctaagcaagctaagcaggaaagtcttacagatgccgtgcagggaatagtgaaattcgtcaaggagttttttgaccttattgatgcagcagatgccactggtcaatctgacattgctcgtgaagttttaaagagattagcggctgcagcttctgtaaagggagcactccatggacaaatgctgcgaggcctggcactccgtcttggaaatcatggggagcttactagattgtcgggtctggtaagcaatttgattacagctggccatggacgcgaagcagcatttgctgccgcagttctgggagataatgccctaatggagaaagcatggcaggacacaggaatgttagctgaggctgttttacatgctcaggcccatggtcgtccatcattaaggaacttggttataacatggaacaagatgctacaaaaggaactggatcacacaccgactgtaaaaaccgatgccgccgccgcattcttggcttctctcgaggatccaaagctcacaagcttgggggaaactgagaaaaagcctcccatcgaaatacttcctcctgggatgcctcccctatctgcacctccgatcgtgattaaaaaggctggagcaaaacctggtctccctaatgcagcaaaggcgtcaaatgggcctataggtgctcctatggctcaaggtgctcccatggctcatggtactcctgggccacaaggagtccccatgaatcaagttactccatcacagggcagtcatgacgaggcaaggccatcagatgctacagtggctgatgcagctgccgcggttgcagaaggtacagcagctcccccggctgcagaaggtacatcagctcctccggctgcagaaggtacagcaactcccagcagtgaggaagctaaagcagcacctggtaatgaggaaggcacatcaaatccaatcaacgaggaagccacagcagctgcagtttcagttgctgcaggcagccctgactctgctgctgctcctgcagctgatactagctcggacgcacctgctgttaatcccacggaagataccgtctctgccccctcaacggaggcaccaccagagttgacggataagccatcttcagcagaggcatcgttgccacctccacccagtgtttctggtgtataaatatttctgattctcttttagcagtgtgccgaattttctgtattctggttcgttcgttccaccacgcgcgctggtataggtatttgttgcctgtggtatacagatttcgcagacgccaggcagtatgtgagtagctttgtacatctgctgtctgcgtctcacgagaacgtgctaccgttgtgtcactgacactgtgtggccatatcttatgttgttggtgaccacagttcaattcttgcttgatgagttgatcgagctgcaccaccaatatccctgtcttggacgaccgattcgtctcttgcggaatctaacgtaactgctgaggttcgcaaaatgtcttgttgggtcatctaacttgggaatctgtgcg

SEQ ID NO: 38376 - DNA, 3968 bp, Zea Mays
attggtcagaaaaaaaaagatgaagccatttgtcgattgtagctctccggcatctgtctcagaatctttgcgcccgctgccgtccgccgctcctcctcccacaccggcgacctccgcccggtgttccatcctcccgcaccgcctcccgacgtccgcgtcgcccccacgcatccttaccttttgtcgattgcgcggtaccgtctaccccactaggcaaggcggtaccctccgcccagcgtagaggcgcgcctaagcgagcgcgtaagagctcctttttgaacacccttcctactgccgacggcagcggcgcatagaagagccaatccgccggtttgatctgaagcatggacaaacaatctgatgcccaggggtcggagaaggttgctgaggagaaggttcgtgtactcactcaccacacttgtttcatggaaaaaggtccttcgaggcaacttgatgagaaagagttagaaaggaagctgaaaaaagatcaaaaggcaaaagagaaagaagagaaaaaacttaaggcaaagcaaaaggaggcggctaggctccaggcacaagcaacctcagacggaacaaagaaggctgagagaaaacaaaggaagaaagctgtggaggatgaaaatccacaggatttcatagacccaaacactcctaatgggcggaagaaattgctcgcgcctcagatggccaaacaatacagtccaagtgcagttgagagatcatggtatgcttggtgggaatcatcaggatattttggggcagattctgcaagcacaaaaccaccatttgtcatagttctgccacctccaaatgtgactggagctcttcacatcggccatgcacttacagtggctatagaggatgctatgatacgctggcgtaggatgtcaggctacaatgctctgtgggtccctggagtggaccatgctggcattgctacacaggttgttgtagaaaagaagcttatgcgtgaaaggaagctcacaaggcatgacatagggcgtgaaaattttgtttctgaagtactcaaatggaaagatcaatatggtggtacaatattgaatcaattgcgccggcttggggcttcacttgattggtcccgtgaggcttttacaatggatgagcaaagatcaaaagctgtaactgaagcttttgtcaggttacacaaggaaagcctgatatatagagattatcgccttgtgaattgggattgcacacttcgaactgcaatttctgacattgaggttgatcatattgatcttaaagaagacactatgttaaaggtccctggttatgccaatcctgtacagtttggtgtattgatatcttttgcctatcctcttgaggaaggactcggtgagattgttgtagcaaccaccagaatagaaacaatgctgggcgatacagcaatagctgttcaccctgaggatgaaaggtataagcatctgcatggaagatatgcagtccaccccttcaatggacgaaaactcaaaataatctgtgacgcggagttagttgatcccactttcggtactggggctgtcaagattactcctgctcatgatccaaatgactttgaggttggaaagcgtcataatcttgaattcatcaacatattcacagatgatggaaaaataaatagcaatggaggtgcacaattcgatggaatgccaagattcaccgctagagttgctgttatcgaggcactgaaggaaaaggggttgtataaggacacaaagaagaatgaaatgagcttgggtgtttgttcaagaactaatgatgtagtggaacctatgataaaaccacagtggtttgttaattgcagcaccatggccaaggcaggccttgacgctgtaaggtcaaaaaagattgaaattatcccccagcagtatgagcaagactggtacagatggcttgaaaatatacgtgattggtgtgtctcaaggcaactttggtggggtcatcgtatacctgcatggtatgtgacactagaagatgacctggataaaaaccttggttctaacaatgaccgctggatagttgcaagaaatgaaagcgatgcaaaacttgaggcacagaaaaagtatgtaggaatgaaattacgtctagatcaagaccctgatgtactggacacatggttttcatctggtcttttccccttaacagtacttggttggccgtctgataccactgacctccgtgctttctaccctacatcggtactagaaactggacttgatattctcttcttttgggtagcaaggatggtgatgatgggaatgcaacttggtggtgacgtgccatttcagaaggtttatttacatcctatgattcgggatgcacatggccgaaagatgtcaaaatcacttggtaacgttgttgaccctcttgaggtgataaatggcatgtcactggatggtcttctgaaacgtttggaagaaggcaatctggatccaaatgaattaaacattgcaagagatgggaagacgaaggattttcctgatggcatagcagaatgtggtaccgatgcgctccgcttcgcactgatatcgtacacctcccagtctgacaggataaatcttgatatcaagagggtggttggatatagacaatggtgcaacaaattatggaatgccattcgttttgcgatgggcaaactgggtgatgattacattccgccggcaactgttgatgtgtctcttatgccaccaatatgcaagtggatactctcagtgcttaacaaggctgttggaaaaactgttacttctttagaagcatacaaattgtctgatgcaacatctgctatatactcgtggtggcagtatgagctatgcgatgtatttatagaagctatcaaaccttacttcagcgattctcaagagtttgaatcagcaagagctgcctccagagataccctgtggatttgcctggagacaggtctgcgtctgctccatccgttcatgccctatgtaacagaagagctctggcaacgtcttccacagcccaaagattctagtaggaggaaagattcgattatgatttcagagtatccatctcttgttgaggaatggagtaatggcggggttgaaaatgaaatggacattgtcttggatgctgtcaacaaaataaggtctctgaagcctccaacagattcaaatgaaagacggcctgcttttgcactttgccgaggccaagaggtcgctgctactatccaatgctatcaatctctaatcgtgtgtctttcttccatatcacatctcaagatcctgacagagagtgatgaaactccagccgattgtgcaactgctgttgtcaacaaagacttgtctgtgtaccttcagctccaaggagatttaaatgaagatgctgagcgtgaaaagctaaggaagaaaaaagatgaaattcaaaagctacaaaatgcactggcacagaaaatggacgcctctgggtatcgcgagaaggctccacagagcgtgcaggaggaggacatgagaaagctcaccgctttgttggaacaactagaggtcatcagtgaagctgagaagaaattagactcaaactgagcctgtaccgaagttggtccccacatttttcttgtttgcaaaaagctcctgtttgctcaggttttcaattgatggttcagatggaagccacacttttgcagcgtgtaagaatattcactggctgtacagaaccatatttttgggtgttcgattttttcaagttagaaacttctgatgatgcatatgggaagtctgtcagaatatgcagcagccgaaatctgttaatcaaatttattagaatggtctcaattgtctcattcctcatgctacacaatttagcttgcttattctttctacgaaaaaaactagagtcagatgacgatggtccactttatatcacaaaccaaacaccctatctcttctattaaaacctaaaacctgaagtgaattcaggcgttgtcc

SEQ ID NO: 38377 - DNA, 2073 bp, Zea Mays
ccggtaccggccggcatgagctccacctcatcgggccgccgcgccccctcatcttcggcggcggtcgcctcgtcgccgggacagaagcgggcgagggatgaggccagcagcgggtccccatccgaccccgacgccgccaaaaaccctcgccgcgcttttgcctcctccccgttcgccgacttcggcacctacatggctgcgaagaacagcaagctcgctgcgcagttcgatgccgacgccaacacctcaggcacggacgccggcggtctattcgatggcgtctccatcttcgtggacggcttcacagtcccttctagccaggagctgaaagagattatgctgaacaatggaggccggtttgtcaactacttttccaggcacacggtaacacacattgtttgcagcaacctgcctgatagcaaaatgaagaatctgagagcattcagcagaggacttcctgttgttaagccagcatgggtggtggattccctggcagagaaccggctcctcaactgtgctccttatcaaataaatcagaatagttcttcaagccgaaagcagatgaagctttcttctttcttttctgagaaacaaaatgaaatatgccacaagggggaacaaaacaaccaaaataaggatattgagttccaaccttcatctgctcaggagggatcacagtatcaaagtggggattgtgaaagtgaagcttcaatggatactttggagctatcaaaggactcgttgtcctcagatgaacagaaggcatcagcatttgaagaaagagagagcggagatttcacggttgatgagggtgaatacgattatgaaactgcctgttcggagagccgtaatgacacagatggtaaccttggtgtgcctcaatcccctaatgcaaagtcaaggtgttcaaacttattcagtacaagatctacaggcagtcatttgtccttgtcattggagaaaagtgcagctaaaccttctggccgaccacattcaaccctaacagatccaaattttgttgagaactatttcaagtactctcgactgcacttcattgggacatggagaaaccggtatcggaagcgcttctcaaatttgctagaagctaaaggcattaagttgagtgctgatcattcagggaagaagaaaacaatcattcatattgatatggattgctttttcgtgtctgtggtcatcagaaatatgccagagctgcatgataaaccagtagcagtttgccattcggacaatcctaaaggaacagcagaaatatcgtctgcaaactatcctgctcgaaactatgggataaaggctggcatgtttgttagagatgctaaagctcggtgccctcacctaatgatcgttccttataactttgatgcatatgaggaggttgctgatcagttctatggtactttgcacaaacattgcagtaaggttcaggctttgagttgtgatgaagcttttttggatatgactgaatgcttacatgacaatcctgaggaagtaacacagagaataagaagtgagatttttcatgcaacaaagtgtactgctagtgcaggaattgctgaaaacatgctcctagctcgattggctactagatctgcaaagccgaatggacaatgctttattccatccgaaaagaagatggcccaatgtttcttagagcgatcaacactgagggaatatccaagaccaaggagtatattgcagagaagatgttagcagtaattgatgaggttggggcacaaaatgttgtgcaagtgatcactgacaatgctgccaattgcagagccgctgccgtcataattgagcagaagcaccctcatattttttggaccccttgtgttgtgcatactttgaaatcttgctttgaagaacatatgtgctgctagggaaattgaagatgtgctttatacttaattccagtggattagcgaagtcattggagatgccagcatgattaaaaattccatcatgaatcactccatgaggttggctatgttcaatgagcaaagcaacctgaaattccttgcaattgctgacacaagatttgcctctgctattgtg

SEQ ID NO: 38378 - DNA, 4117 bp, Zea Mays
cccgtcttcctacctggctacctccggtctccagacccgaaacgctgacgccaaatcaaatcaaaccttgctgccttctgcatccggtagcagcaagtcgccgcttgtgcccttcctcctcactttccctcgctgacgcccgatccccatgattcgattacgcgacccgccttgcaaaccctagcttctcccgctctctccctttccaatgcgccccaaaccctagcttcccgcccgcccacccgccggtcatgcgcgcctccgcctccgctgtccccatggaggcctccgcctccgcccgcagatccgccgctagccccgaccccggcgcgaagaagccgcgcctcgcgcagccgccggcacgggaccccagatcttacgccgctgccgccgccgcctccaatggcggcgcaagcgccgccgagcaagcgctggttgacgagctgctcggccagtaccggaccgcgcttggggagctcaccttcaattccaagcccatcatcaccaacctcaccatcatcgctggcgagaacctccaggccgctaagcccatcgccgccgtaatctgcgccaacatcctcgaggttccaagtgaacagaaactaccatcgctgtatctgcttgacagtattgtaaaaaatattggaaaagattatgtcaaacatttctcagcaagattaccagaggtgttctgcaaggcatataaacaagttgatccttctatacatcatagcatgaggcatctttttggaacatggaaaggagtgtttcctctacctcctctccaaacgattgagaaggaacttggttttcagtcatctaccaatggattatcaggtgctgcaccatcaaggactgattctcaatcgccgcgtccatccaatagcatacatgtaaatccaaaatatttggaagcgaggcagcagctcaatcaaccaactaagacgatgatattgagagggctaataggctaggtactgaaagaagtgcagggagacgattggatgctcctaatgctagacctaacatagagcacattcagagggacccttttagcaatcctattcatgaaaaacttgcaggtagagatgtgaggggccttggattctccaacacttcacagcaggctgttgtgggaactggtcaagttcgctcaaaacccagaggccaagatggaattgggggaccctattatgcctctggtgttgtgtcttctgaagaaaaaattgacaagcgcagcaacttttatacaagcaaggatgttcggccatcaggatctgtacatttcgatagtgctcttcttccaactcgatcaattaatgctaatagagttggtaggccttcatcaaacaaaagctggaagcactctgaggaagaagaatatgtttgggatgatgtaccctctaaaacaacagaatatagtggtacccataatataataaaaggagaatggatgtctgatgatggcaatgctaagtttgcaagcctccaaagtgctaaatgggcagatgcaggacctgtggaatgtatagatcccaagacacataaagttgataatgtgtcaagatttggatttgcagcaggtcaagaaagaagaatttcagcatacatggatcaggaagagtaccttcttggcaagcgtgaggtggaagctagaattgatagggaaattaggccctatggacaacagttcccagcagctcgagattcctctctctgggtgtcccaggaaaaagcactccccgacaatgggttggacccttgggtatcaaagttttcaaatcagccagcagagatgtccatttgtactggcaccatgccagcaagtatcatatcatctgtacctgttaggttatcaggacactatgctggaaggtcaaacctagatactacaaatagtgtgccaataagatcaactgaggcttttgggcagcagaagcatagatattggtcatcttcccctccacaagctcacccaccttcatctactgcaccctttgcacgtcagggttctccaaatcatgacgagtctgatttttatccttctggatcattttctcaattgggccaagatcctcaagaagaatatagccagagagcattgcctgtacttgctaaaggttctcatgttgtggttcacaatgatgaacttactcagggccaacctagtctacaggcaaccctgcagacacaaaagtaccctatcatacagtccaagtcacatattaatccatctgatcaattgcaagcaagctttttgtgtgaaaattctccatcactgttcagaccttccattcagcttggagaagtatctttacccagtgattccacccctataagctcagatctgacaagtgctagtaatttgttggctggtctcataaagagtgggttcaaaccaagtaaccacagtgatgcacagcctcttggtccgagtggctcacttctagtggcttctttatcacttcaaaatgctgctggtgaaaataccattttgcagacacagacaccaaacacttctcgtccaccattgccaccaggtctaccaccacctccatcaacacagagtgcagagaaagctgcgccgctctcgagtcttctcagttccctggttgcaaagggattaatctcttctcctgcctctgattcatctgatgctgtcatttcacagccaaataaagaatcaagcataaatggtaaagatgtcgcagcttcaggtgtgcctttgccagctctgaagtcttcatttggtaaggtgtcatcatctaattctgattcatctgccccaccaaacgcttcgttacccaaagctatcgaaattgagatgggtgacctcattggcctggagttcaagccagagaaacttcgcaagtaccatgagcatgtaattagctacctcgatgaccaaagccatcagtgtaaaatgtgtggtaataggttcgggcttgaagaactgagtttgcacacatcaagctgtgggccaagggagtcaaggactatctatactggtatcgcacctaagagatggtatcctagcaggaacatttacattgatggatcacatgaaattgaggatagcgctgaggcttctgatgcaggtttaggttctgcagaagtgtgtgagtttatggtccatgcagacgagaggcaaattatctgtgcactgtgtggggaaccatttgatgacgtatattcttttgagaaggggaactggatgtacaaggatgcagtattcttggattatgccaagggtaaaaatagctgcggaaacaatgttaagggtgaagagcatgtgcctatagtccatgtaagatgtatgccaagaggctcaaacgatggcatggacgttgactagaatggttgttcacagaagccaagttctcgaggggcctagaggtggatgaggctgaagctggtgtttgcacgaggcaatgtgcatcatcaggtggtctgcggcaactgggcttaagacatacatgtaagatgcttggtggaggtggcaggcgttatcagaaacaaatcttgcgaagatctgcaaccatccatggatttaaccatgccctttacaaagtgcttacacaaagaataaagccccagaggagcacttcggccatgcggttcagaattatcaaaatcttcatatttttggtctccatctgagaaggggctgggtctttatgttgatacaaagagagctttgcaagaggatgtcaaaagaatgtatgatttctttacgtggaaaaggggtatgatatcccgcatgcgcaacgcctccttgctcgatcgactacatggcaaaaagcggaatatgtcagaagggattcaagcgaagaccaaagagcgtgaagactaaagagcgagagctccactatggagggagtgcatagagtgcgcgaaggcttgagtactccctccgtctcgacgtgtcagaacgaagaccgccgagaattccgaaggctgagcacgtggaacgtgaagaccatgtgttgttacccgctcgttattgtaataaggggccacgtataaccggcccatgttacagggtcccacttgtaagccgctataagggtagagttgttagtgtgtatgtctatgcttgtaattaatcacgctgtaa

SEQ ID NO: 38379 - DNA, 7729 bp, Zea Mays
caaaactctgctcctcgcttaaacccgcgagcctccggacccggatgttgttccggttccgcccggccccctcgtagccatcgcctccttttagcgccgccatcccacctcgccggcggccatggcgaccccgtcttatgcggcggtgaagtgcctcaacacgtcctcgtccagccgcaagcgtttctcgtttaagagcttctcgcagcgggtggaggagatcgacatcgatgtgtaccgcagcctccacacactgaaggcggagccatccagcggatcgtccttcttcctcgacgcaattgtggagtggagggagcttaatactgcagaagacttcatctcattttatgaggagatgataccattggtacaaacacttcctcaaattgtcttgcaccgggacaagctcttttccgcacttctacaaagggtaaacatgagtgcaagattgtccctggagccaatactcatgttgattgcagctttctccagggatattctagaagattttttgccttttttaggaagacatgctagtgcacttttatctcttcttaacgacggaggtgatcgcgaccctgaaatcttggagcaggtcttcacatcctggtcgtatataatgatgtacttgcaaaagtatctagtgaaagatactgtccaaattcttaggatcacagcagcgttgagatatttcccgaaggactatgttagagaatttatggcagaatctgtttcatttttgctgaggaatgcacctaataatcagctaacgcaaggtctactgaaagttctacttgaggctgctaaacaaccatcacctgcacggatagacggggtggtctctttgctgtggcatgtcatgaaaggaacttccacaaagctacactcaaaagctgggcaggtcttgaagttcttgttgagcaagtcaattgtttccactctccgtgataaatttcctgatgataaggtgaagatgattaaacttgttgaggatgttccaaccattttgggcaatttgtccatcatatcacctttctatgccccagtgttcaaacttaaaaatccgagggtgattgtctttataaagaaacttttggtaaaaggtccccaagttgcacaacattttgaaagtcaaatattaagagtatcatccatggaagtgacaaaagaatttgatccacaaaatctcttggagctgttctccatctttgctttcaatttgagcagtccaaccaaggatgttcggattttaacattgaggattctatcatattttgtgaagatggatcaacgtctaatcacagatgaggagcgaccacacaagaggcagagaacagaagtttctggagaggaagctgttgctaaatacgctaatgttgtggatattcttttgattattgagtcaatgccaatttcagtatctactagccgtaaaattgctatcttcatttctcggatacaaatgagtttatcttccaagatggttcatgatgattacatacctcctctcttacatggtattattggcatattgtacaatagatttagtgatctatggccacaaacactggattgccttgctgttctcattagaaaacacaaggagcttgtttggggtcagtttgttccgttcattgcaattcaccaatcaaaaggactgactgtgaaaaatcaggagaagctggaagctgcaacccaaccacagtctatttttgactgcttcaacttgtatcttgctatggactttgattgcacaccagctgtgaccgtggctaccttattgcttcaatcgctccaaaggattcctgatgttgctgaatcccgctctcgacaacttataccgctatttctcaactttatgggctatgatgatagcagcatctttagtgctgattcatatatgcctgaaaaatgtaaaggcaaacaatggaaagcgattctaaaagaatggttaaacttattgaggttaatgcacaatgcaagatcgttatatcagggcaattttctccaggaagtactaactaaaagggttcttgatgacagtgatcctgaaatacaagcaaaagcattggattgccttttgaactggaaggatgaattcttgatcccgtacagtcagaaccttaaaaatctgattgatgtaaagactcttcgtgaagagctgaccacatgggcagtttcacatgactccttgtcaattctgaaagaccatagaagtcgtgtggttcctctggttatccgcgtgttggcaccgaaagtaaggaaactgaagctactaggttctcgaaagcacacaggtgccagtcatcgaaaggcaattcttcgtttccttttgcagtttgattcaaatgaacttgagctttttttttctttacttctgaggtccttgatccctggcagcctccagcttaaaatgtttggttctcagccagacaaccttcttggaagtttctctgacattgttggaacttcaacagaaatttgtgtagagaattttacatggaaaaaggcaaatggtttcattcatctggttgaagaaatttttggtacttttgatatgccacatataagcccatttcttaatgttttattaatcattgtcgctcgcttgctggagagttgcatgaggaatcttagaaatgagagtgatgggaaatatccttgcaaccaaacaaatgaccatggtaatggttgttccataaattctgaagtgggcaattctgtgaacgtggatgaatgctttaaagaaatgcatctagaaggccatatggagcaacctcactctatcacgcagacaagtgtatccatcaagcagttgaaggatttgaggtcttcatgtattagagttgtctcgtcagcccttagtcactatgaaagccatgagtttggagaaaacttctggggtgtttttttttcttctgtgaaacctctgatagactgctttacacaagaggcttccagtagtgagaaaccaagttcattatttgcttgttttatggctatgagccggagcccaaaattagcaccactgttggggtcaaataatcttgtaccagctattttttctattttgactgtgaagacagcgtcaggatccatcaccacctatgcacttgagttcattgagaatctgttgaggttggatattgatttgcagcagcaagatgaacatttagtgaagaaagttcttcttcaacatatggatgttcttatccatagtctccatgattttgttaatcatcgcaaagagctcaacaggagatctggtacatggcttgggcaacgtgaacttaggctgttcaaattattgctaaattacatcacagatccctcagctgctgataacttcatagaccttattcttccatttttcagcaagaaagatttgaactccgacgattgtttggaagcactatgtgttgtgaggggaataattcaaaatctgagatgcaaagtatctgaaaaagttctaaatgcactgaacccattacttgcaattgttggattggaactgcgactatgtatctgtgatatttatgctgggttgtcattgaatgatccttcgatgttgtttctggctgggttaataggagatctgaatgcagtttcagcttcagaacttggtgaactagattatgacacaagacttaacacctatgataaggttaggccacaattgtttcttggcttgacagaagagcatgtgggcgccatattatctcattgtgtgtatgatatgtcatctgaagaattaattttgcggcaaagtgcatctagggctctgcagtcgttcctggacttttccgcctcagttatgaataatgatgtgtccaaatactctattgatgataaatttagagagaataataccagaagcatttgcacgatgggctgtattcagaagatattggaaaaaacttatctgcacaatatgggagtagcaatgactaaagatgtatcaattcaaaaggaatggattattttacttagggagatggtctccaattttaatcatttagcatccttaagctcatttaggcctctctgtaaggtggatatagaagaggattttttccacaacataactcatttacaggctggtaaaagatcaaaagcactgttgctttttagacagggaatcaaggaaaacaacttttcagaggatatcactatgaaagtctttgttccactatttttcaatatgttttctgacgtaaaagctgggaaaggcgaacaagtcagagatatatgtttggatacactatctgctgttgctgccaaagtgcagtgggaacactatagaacaatattgaagagatgcttccgagaattaaaccttagacctgataagcagaagatcatattgaggctgatttgttccatattagatgcattccatttcatgaaacctgcaaatgatgcctcaggaaattctgatgctttgagtgaagatattgattcttcccttacattctctttggtcacagtctcttctgataagcaacagtacatgcaaaaggtagtgtttccacaggttcaaaagttgttaggatcagatccagagaaagtcaacgtcaacataaacctggtagcactgaaaatacttaagttgctaccggtggattattttgagtcccaactttcaagcatcattcatcgaatctgtaacttcctcaagaatcgtcttgaaagcatacgtgatgaagctaggtctgctttagctgcttctgttaaggaactggggattgggtatttgcagtttgtggtcaagatattaagagctatacttaaaagaggttttgagttacatgttctgggctacacacttcattatttgttgtcaaaaaacattactgctgatatgtatggtaggcttgactactgtttagaagatttgttggcagtggttgacagtgatttacttggagatgttgcagaacaaaaggaagttgaaaaacttgcctccaaaatgaaagagacaaagaagagaatgtcgtttgagactcttaagctgattgctcaaagtattacattcaagaccgatttactgaagaagataatctcacctgtttctttacatcttcagaagcaacttactccaaagttgaaaaccagacttgagatgatgctacacaacatagccttagggattgagtgcaactcatctactgaaacatcaaacttgtttatcttcgtatattgtcttattgaggatactattacaggaagcagatctgaatgcaaagagaatacacaatctagtcctgatcaagacagtactgtaagaaagaccttcctgggactaggtgagagtggatcacagaattcttatatacttaccaagtttgcacttgacttacttcgtaatcgtctgaagagcatcaagcttgacaaggaagatgaacaactcgtgaagatgttggatccttttgttgaccttctgcgaaagtgtatgagttcgaaacatgcaagtgtcctctcagccacatttagatgttttgccttgttggtgaaacttccgttgccatctctgagggacaatgcaattactataaaaaatgtacttatggagattttacagagagctggaaactccaatggtcatttagtcacatcttgttttaagctacttgctgatctacttagaggattcaggatttcactttcagataatgagcttcagatgcttgttcatacccctatgtttgtagatcttcagacaaacccttcccctgttgccttatcgcttctcaaaacaatagtcaggctaaaattggtttctcacgaaatttatgatatagttgttaagataggagagttgatggtaacaacattaactgaatctatacagcagcaatgcattcaaattatgctacaattttttctgaactatccactttctgagaagcgcttacagcaacatattgactttttcctggcaaacttaaggtatgatgaatatccatagttactttatcatgatatctcactgtatgctaacactctggaaaattgcagttatgaacatccttcaggaagagaagcagtgcttgaaatgctccatgacattcttaccagatttccccagaggattattgatgagcagggtcaaaccttttttcttcatcttgtagttgctctagccaatgaacagcatcagaatgtgtcttcaatgatccttagagctattcaaaagctgttaggacgcattggtggtcagggaaagagttacatttatgagtattcactttcgtggtacactggtgagaagaaaagtttgtggagtgcttcagctcaggttattggtttacttgttggcgatcacacattacaaatgggcaagcaccttaaaagtattctggctgttgttaagaaaataatggaatcatctattattgcttctggagctatacaattaggcttatctgatgaagctgccctgccattgtggaaagagacttactactctgttgccatgatggagaggttacttcttcgctttccggagttgtattttgagaaaaacatggaggacatatggataatattatgcaagttgttgatccatcctcattcgatgttgcgtagtatttcaagctctctggtagcatcatattttgctacagtggagaagaggaaacatgaacagaaattggatgccccatcatggttgcttgttcaaccgagcaggctattcataatagctgtttccttgttgaaacaattgaggagtgagctgagtgatactacggcaaataatctgattgtacagaatgttgcatactcagtctgcaacttgcatatgttgattaggcaatcgacctccacacatcagttttggtctagcattagttctgatcgtggtgctttccttgagggttttgaattgcttggttcaagaaaagcaaaaaatatatttctcctttgtacttcaacatctagtgatgtatctggatctagcctcgacaccaacgaagagcctacatctttgttagtttcgtcaatcctaaagaagatgggaagaattgcaatgcaaatgcaggatacacagataaagaacgtgttcaattgcttcaatatgatttcatcagctcttggtcctgatgaatcactaacctatgctgatcacctcttggccccattgtataaagtttctgaaggatttgctgggaaagttgttagtgatgaagtgaagcaactggcccagggggtccagaacaagttacgtgacctgattggttccgagaaatttgttgaagtctacaagagcgttcggatgggcctgaaacagaagcgggacggtagaaagcaggcacagaagattgttgcagccgtggacccagaacgcaatgccaagcgaaagcagcgaatggcagccaagcaccgggaacacaagaggcgaaagataatggcgatgaagattggcaggtggatgagatagcttggtatttaggctctgcggaattcggtgaatcatataattgtagaggataatttttcgtgctacaagtgctggcataaaattatgtttctgttttatatgctgtctcactgacttactgcccgacgtaattttattgttgagttaccgaaccataccgtaagtaaaaattaagaggcataagcaatgaagacatagaattgattgaattatatttttttggggtggatggataagtaacaatatattattaaatgtgcaattaagagttttctggctgaggtttgc

SEQ ID NO: 38380 - DNA, 2907 bp, Zea Mays
aatttaacaaattcctctcccgtcccctttcccttcggggatggtattcgtcgtcttggcttcatcctctcgcccgccgtctcgactgtagcaagcggggctgctgtccgccgcattcaggagccatgcgtgaggggatgagggagagggacagaggcgggagcccggatgcgtcaggtcctccgcccttccgcggcccggcgtacaagacgaagctgtgcgcgctttggaggggcaggggcggctgcccccgccccaactgcggtttcgcccacggcgaggctgagctccgaaggccgccccctcgcgcctccttccagcctcgcccacgacctgggctttgcatcaccttatcatcttcttctgggttttaccgtacccaaaatgttgtcgattccatgccaatttgtcggattaggttatttggatggtttcccgagcaagagacaccagtgcgctcttcttcaaagagatgcatattcggcctgtttattcatcgagttattgggatgattggttgatgactggagacacagcccaatgtttgaatgctagtggtgcagcaaacactgacagatagcaatgtgatctgaatcatatgatctcaggaggagagttagcgaacagggaagatagttgcaactgcaagaattatataatgttaacaatttgcaagtgcatcctttgaggatgtacaaatggggttgcagatgttaatggctgacaattctgggaggttttatagtttctacccgttgctgagaagactctacccttcaattgcataacagtatgatggtttggcacctgaatcttttctcagtttgtgttatatcttctcatcttatggtgcatatacaccatgattcctgtgtagtggtacttgaactgagtgcttgctgccgcagaacacaaaaatcatcaacaagcctgatttcattgcagataatcttggcattgctggttattattttgattttacaatagatatctcatggacagatttgttgagattgactgcttccagaggatggcacatcttatttccatcctggcctttgtttcagttggcaatcggtcatttatgatacttgaatgcttaacctgcctcagaagaactgaacatggaagatattatacattttatcttctcgatgggattcatgctatggtcagtgagctttaacaatgctattagaagcttttgcaactaattgaaacatgccgtttgaatacactgcatcaagctatatctgtggctttattgttacctgcacttcaagtatcatcttggaacaagatttttggcagtcatatggataacatctgatcaaatgaaattaaatttatttggtgctattcgagttttggaagattttacgtcatggtgattggaacatgacatctaattaattttggtgattccatccaaatttacttcagggagaagggattacagagatcatgagtttagactcaggcctgatagaagacactcaccccatgggaggtattcccctgaaagagatatcaggcgtcgttcatttcatgataagagaccaagttctgaagataggggatctagtcattcaagatcacctattaggaagagtgagagaaaacatagtaaaagtcctgatggtggagaaaccgattcatccgtaagtgttcgaagtcctgataacgaagacagaggaaaagatgaaaggtacttaagcagtgatgagaaaaatggtcatgaagatcaactgaaacaaatgcatctggacatggaagcattgcgtgaagacaaatcaaagctggagatgatattagagaagaagactgatgaagagcacaaactttgtagcagagtagaagatcttgaattgcaattgaacaaagagaaagaagattgccaaaggatgtcctccaaaaccaaaaagctaatcaaagcacatgggcgttatataaaagcacaggaggatttaaagaggtctcaggctcgctttgagaggctagcagatttgcttgcttcagatattttgaagccttgtaccaaggagcagggttccatagggattactgccaatgaagatccatataatgctaatgaaatgagcccaagtgaccaaagacaaaaccatgtttcagcatcgagaaaaagacttatttccctcccaacaagtgaagaagcaaaaactggaaagagacagagagagaatggtgatgatatgatcccaacatcagagaactatagacctgaagatgccctagaacatctccaagatagcaagggaactgatctaccagaatcatttacagtgaagaagttaagggagggtgacaacgatgatgtaggaaacattgtctcttcaagcaatatttttgcggataggtacacgggcgatgatgaggaagttgatgttgattagtgagcggatgctgtcggtggttgataatgatttgagctgtaggaagctatctcaacagacgacatggatgccagcttctaaaactacttttatgccttttgcattgggtaataggggctggtatatctggtagagctatttatgtgcttagacttgagttgtgatgctgtcaaacatatctatacttctttttcttttgtgtctcctggggctcgaagaggatactaatctgtgctcgcctcatgtattattcttagccagtatgagtattatttgagacttttggattggttgtgttattccgcctcagcctcaggttacaaaccatgcatccatatccatctacctatcaggaaatgcatgcgtgatccttaaacttaccgaaggtcttctaagtctgtattctgatactagaggttcatagagtttgtggacttatgttcaaagtgcacaaaaaatgtttacaagtttgacttgtcaacatggaatctca

SEQ ID NO: 38381 - DNA, 2470 bp, Zea Mays
  misc_feature (2469)..(2470): n is a, c, g, or t
ctcgtcccgatcacgcagctatagtatagcttccccgctgcgctccagcagaattctcgcgccgcaacgcgacgcaatgccccacccgcacggtcgcgccgcgcagcgcaggaacccccaccacgcggtcggcgtcggcgtcggcggcggtgctcccgcctccccgccgtcggcgtagctcccgcgcgcttcggccctgggcgccggtgtggtttctccatcacgctctctcgcgcttcctacctgcgtgcgccctgctgcccggtgatggccagccgtctcttcgtgctccgtcggcacacgaggtggtggcagcggcaggcgccacggcctcgctcgctttgcccgccgtctcacggtggggactcggcgtcttcccatgggacgctggagctgctcgcgcgtctgcgcagctcaccatcgtaagagtcagacaaaacccactgatcctcctccccctccccctcattactactattaagtggtcgatgcagattttgtgacctcatgcctagactttgctttcggtcgctcctgtgccgttggtctgtgataaaacggtaaaagcctccacggggcatagtgtgggcatcaagtgtttgctgaaatgccggaggggaaccttcgaacacagtttattgctttcagccacgtttctacgtttgtggtctatagtttatctgtctctgcgcacccataccgacgagcgcattctgatcctcagcggtgcaccagttcattattgaagcacgtctgcagttttttttttttgcacgttctgattctgttatagttatactttccacaaggttttcaaccgagatgctaggttcttcaggttgttgcagagttgtagcattcaagcctgccattgtatccatacgagtccatcagtcaatagcggaaatcaggctactgcagagcctcaacaacagaatccaggagtgcctgtaccggttgatggttctagtgaactaaaacccaagaggacaaagctgaaaggaaggagggcagtgacaaattttttgaaatccttgagatggaaaaagaaaaaggagtttcaaagaatgactgcagaggagaagattttgtacaaactgaagctagctcgaaagaaggaagagcggcttgttgtggcactgaagaaaattgaaccagaggatccatcagaacctacacatgatcccgaggtgcttacacctgaagagcacttctatttcctcaagatgggccaaaaatgtaaaaattatgtgcctgttggaagacgtggaatttaccagggagtgatcttgaacatgcacttgcattggaaaaagcatcaaactctccaggtaattgtgaagacatttacaccagaggaggtcaaggaaattgccatcgagttagccacactaagtggtgggattgtgcttgacattcaagatgggaacacaattattatgtacagagggaaaaactatgcacagccaccaccagagatcatgtctccaaaagtttccctctctagaaaaaaggcactggataaatccaaatatatggaaaagctcagagctcttaggcggtacattcccagacttgagcaggagcttgaagatcttcatgcacagatgaagttagctggagagcatcaaggacaaaatgcagggaaacatgttgcttcaatttcacataatacaaacagtatgccagtgagaaaagaaccttgtggttcaattcgcaacaaaacagtatctgatctcctatcagaaactgtagagggatccaagaggttagaggatgaaagttctgcgattgaagacgactcagcttcagagtctctgtcatttacagagtctgaggatctctctgacatttttgagacagaatcagaggagcaggaagaggacaacaaggatcgccccttatatctcgataggctggataagtttccctcaggaaaaaatgataatgaaccagatgattttgaggagcatctgcggaggatcgcttcactttcagataagactgattcaccttcaaaagaactgaaagtgtcagagctcgatgagattgataaaatctttctgagagcaagttcgttgttgaagaaaaggtgacgcaaaagttcagctgatgcaagaacgatctcactggctgaaagcatggccctgccttttataattacatatgtgtccaacccaagatcaggaacgatgaagtagtcctcgtcgtcgtcgtcaggcacctccatccgtgacttcttgaacaggcgcgccccgttcgccttgtagaacccggcgttactcactggctgcggcgaggcgaagaactccgccatggcagttttagctggcgaatgggcgtggaacaggtcgatgtcctcgaaccactccagctccttgagcccaagagacgagtctttctgcaacagcaaacacaaaacagatggaaaaggaaaactgagataagaataagaacgtgaaaagcttnn

SEQ ID NO: 38382 - DNA, 1159 bp, Zea Mays
aacaatgtttttttcccaaccacttgccacttgtgatacgctgacctctgagcagcctcgatctggctcgttcaaacttgaccgaacggcagccattacctggtggcgcctcctccttgccggtcggagccggctcgccggcgggtggcgacgctcccgccgctgtcacagggctgctcgcaccacgtgcactcctctccagtacacccaccgagacgcgagacctctaaggctctaacccaagattccatgaagatttgtcaactccaattaacagctacacgattttcaaaacagaataattctggcgaggatgacgagctcctttctgaactaaaagataagtgggatgcaatggagaacaagtcctctcttgccttgtatggtgctggagcaatcctcgctgtctggatatccttggtcgtagtgagatctctcgactctgtcccattgctcccaggcatattggagctagtcgggctcagctactctggatggtttgtgtaccgatacctgctttttcaggaaaaccggaaagaattggcgggtgttatcgatgatataaagagaaggattgttggcgatgatgaatagctgtttcctggtttgtaattctatttatctcgccctgtttggttctgaggaattgaaaaataatccaatggtgaagtgagaaagcactttctagctattggttttaattcatggggtccaaacaggctcttgatagaatcttgtaggtttctgttcttaattaatgccagtcagagctacgaggtattggcctttccacatctcttgtgccgtctgcagttgaacatgttatttgcagaatctttttatttagcatggtctagaaaaattcttgtatcatccgtatattccgctgaggtatggccttccacaccaagatgtacctccagtttagcatggtctacaaaaaaaaatattttattctctgcatatgccgctccagttcctctcaaattccctgtgctgccctagccagaagttagccgtcagagcatataattgtaataagatataaaatcatctgaaacataaccggtagcacttttgtcctcacctgctcaaccgagcacctgagtttcggcttttttttaagtaagaaaaaagggaaaatctaaatcgattaaac

SEQ ID NO: 38383 - DNA, 1988 bp, Zea Mays
gtcaagcagaagcagaagcgctgaagcagcgcgtttgcagactgcaaagacccctgtgaatttgtgatgtactgaggtgttgtccagccaacagtccttgctcccaagattcttccgtactcccccctccatcggaccatcctctaccatagatctcccgaactccgccgtaatcgggacgaatcccgcgcgtgctcttgctccctgtcgttctccgcggccggcgcgagctgccggtggttcgttgccgtcgacctcgtctggccgctcctctgccctgccagctgccggattcctgctgctggactggattgctgcgcgtggagtcgtgagtatagctccatctatcctgactgatacggatcgacctctcctctcgtgggtttttgggttttcatcagttctatcagaggagtgcttatggatgattgcatggctgtagctagctaggccctgctttcctgtttgtaaagatacatcatggcaccacgcagtagggctccatctagaaggcctctctggttcattgtcttggttgcctttgtctgtgtagtagccattggagcctatctttatactccacagcattacacagcctgttatctggtaccatcagaagcctgcaattctcggcctcctccagaacctgctagggtatacactgatgatgagattgctgctcgtgttatcatgagagacatcattcgggctcggccagtgcagtcaaagaacacaaaaattgctttcatgttcttaacacccagtttattgccatttgagaagctatgggaaaaattcttcatgggtcatgaagacagatacaccatatacgtgcatgcatcaagagatataccgagtcattcaagtccaatattcgctggcagggatattcgaagcgaaaaggtgatatggggcacgatttctatgcttgatgctgaaaagaggctcttggcccatgccctacaagatcctgaaaaccagcattttgtcttgctttctgagagttgtgtgccacttcataacttcgattatatatatagttatctcatggagacaaacgtcagttttgttgactgctttgatgatcctggtccacatggagcaggtagatattctgagcatatgctacctgaaattgtgaagaaagattggagaaaggtggtttacagtgaaacggcagcatgcgattcttattctcgcggacaccctttactatgggaagttcaagcgttactgtaagccaggaaacgaatggcataactgctattcagacgagcactacttgccaaccctctttaacatggttgatccgactggaatctcgaactggtcggtgacgcatgtcgactggtccgaagggaagtggcatcccaaagtctacagggctgcggacacaagcttcgatctgctcaaggacatcgcgtccatcgacgagagcgtccacgttagcagcaacgcgaagcatgtcgcgcagaggaggccgtgcgtgtggaacggcatgaagcggccctgctacctgttcgcgcgcaagttctacccagaggcgctggacaacctgctgaacatattctcgaacttcaccatcatctgagcgagcggtggatcggggaggggtttccgtcctccctcttgagtgctgcggcatcagcggccgcccgccgtggtaactggtgaggccgtccggccgtctacttggtgacgggaatctagtagctgaaggaagcaggaacacggttaccggagcacgcagatctgggagatcgggattcagatgttgccacctgcttgctcatcctgccgcactcgtgtgatctcgctctagtagatcgctggtgtttttgcaggtgtagacattggctaggctggtgttggatgcacttctgttggtgttgatgaagaactgtgattaatttaataataatacgtacgtactaagttgtactcctccgtcccaaaatataactagttttagactaaccatacatcta

SEQ ID NO: 38384 - DNA, 234 bp, Zea Mays
ggatggcaagtgaagagagtagagggggccgaaggtgtcacaggcacaactagcgagcacgacatggtgagcccctagggatcgaactccatagaacaatggttgtcactagtgaagcgatgaaccaagagaagggaatgagtcagaccgggagcaacaaggacgtcgttaaggtagaatggtcccggaagaaccgatgcacctactgaggtgaccgggagggtggaatcgttg

SEQ ID NO: 38385 - DNA, 831 bp, Zea Mays
ctcttccttctcttcttctttctccccctgtaacagcagttggagagtctgaaaacagggacccttgaatgaagaattcaaatgaagagaagaaacctaaggaaaggagagcagaacaagattggtacctttgctgtgcctggccccactgttagctctctgaagagttaaagctgcgacggaggctacaacgacaaagcctaatctcacaagcatgactccgttcactcatcactctgctggcctcaaccggcaggagggccgagacggggagccccctctactcatcaaaaaatggtgacccggagttagagcagcagggaggaaagaacgcctcttcgtggctgctgctttggcccggccgtgaagtacagagcgaaagacttgtggcttggaagccggtaggcccatttgctatgcacgggatgacgagaatgggtggtgctggcctgctgggtatcacaagaaaaatgacgaggggagttatcaggctcacaggatggagcatgtcgttaccctgacatggatcagtctagatttgtttcatccaaagcaatactggatttttttttcttgtttcactgtatacgctggaaaactaggacagattttgactgggcgtaattggaataactgacctagttaactgctactgcctctttcctgaattataaggtgttctagaggcgcatagaaagagctaaaagcctaaacatcttataatttagaactcatggcactatttacctccggtttaaattcaaatactgttttattatattagaagaatattttgttgcataaactgaattgcttgccatggtaggcgcg

SEQ ID NO: 38386 - DNA, 438 bp, Zea Mays
gctcgctatgcctacgatgatttatatgaggatgacaaagataaggaggtggatcacatgtcagtttccagcaaggtgtttggactggaatgcgcacagtctgttactttgatggcaaaacgcaacgaagtaccatgggatgtgctggagaatgaaagcttctgtcttaaaacaataggatacaagaagcttgcaagtggttttgtgaaggcttttgtgaatcacttgaatcattagttcttttaagaatggttttgtaaagcgttagcaaatatgtgtaaaacacaataagatgtgtggcaaagtcagtgatctagttgtacagttttttatgtttatgtgatatgtggatatttcattgtgcaatgttaatgaactgtgtatgtctatgtgattatgtgtataaaatatatgttttgtggtgcttttgtgataata

SEQ ID NO: 38387 - DNA, 2020 bp, Zea Mays
gaccagatgcccagttgcccaccacggcgtccagtcatgtccagcaccaccgccgctgctttccgcctgggccagcgcgtgcacgccgccggcgacccccgccgcctaggcacggtgcgctacctgggccccgtagagggccacggcggagtctgggtcggcgtcgactgggatgatggcgctggcggccggcacgatggctcgctcgccggccgccgatactttgttgccgtgggagagtgctcggccaccttcgcgcgccccacggcgctcagcggagggatctcgctcccggacgcgctccgcctacgttaccgcgttcaggacttcaccaaggaggaacaggatgagatgtatgtcttctcgacaagccagaagcgggtctcggttgaatttgttggcacagacaaagttcaggagaagctcaacaacttcaatgagttggccagtgcatccgtttcttacatgggagtgagctcaattggagcgcccaatgaactaaacagtttggttccaaatctcaaacttcttgacttaactggaaatctgttctcacagtggcaagatatattctctctttgtcaagcactggcatccctggaagttcttaatttgacaaataataccatggagaatgatgttgtagaaactccaatgctcgagaatatccgaattcttgttctcaataactgtggtgtaacatgggaactggttgaaaagattaaagtttccttttcatgtatcagtgaactccacctgatgtcaaacaggcttaatatgatcatgaccctagatggaaagttcgtacaaggtttcaacacactgcggctcctaaatctagaagataatcatattgattcatgggatgaaattgtgaaactttcttacttaagaagtttggaacaactccatttgaacaaaaacaggttaaagcatgtgaaatatccatctaatctttcaccagatggacctattgatgatgcagctgctgtgccatttgaaaatttgcaagttcttttgttaggatctaatgacatagatgacttttcttcagtggattcacttaacctgttcccaagtttaagggctttctgacaatcctgtagctgatcctgccaagggtggtgctcctcgttttgtgcttgttgctcgacttggaaaagttggaatactaaatggcagtgagataagtccacgtgaacggagggaatctgaaatacgatatgtccgccttgttatgggaaaaatagaatcaaatgaccaagaagagatcagacggcttcaccctagattcgctgaactgaagtcctttcatggtattgaagatgagaagccaacttcaagcatatcagggccacagaagatggcttctggccttataagtattacgttgaaatgtgtgggtccatcaatgggtgagaagcaaccactgacaaagaaactgcctgcgacaacaactgtcgggaagttaaaatctttgtgcgaaagcttcttcaaactgaaggacataaaagtgaaactgttcgtcgaagaagagggatgccctctaccacaaccagtggaggaggacacggcctctctgatggagcttggaattggctcgggcgcaaccattgttgtggacgaagagagctagccagtcgtctttagagaagggccaactgtatggcgcaaactgacgcttcagctgttattaagttttcgaagagaagatagctgatgacgctcttcgttgcccttatatacttctttctgtgggaatatgcacgtgatgaatattggtgcgggtttgggcttcaaaatggactagcatagtaaaaacattgtgaggacggttgtttggttgggagaagttttctttttttattttcgtcaacgcaacgaactacgtcaaatttttttttgattactgtggtgtgtcgctgacgttttccacaactgaaaccactctgtcattgtgccacagataatttttctttttatttaataagcaaaagaaattagggcctccttccataca

SEQ ID NO: 38388 - DNA, 2487 bp, Zea Mays
atcgtctcctggagaggctgccacggcggtgcgagggctcctcttctccaacgctcaacaaccccgcaccccgactccaatcccggcaccaaccctagctcccgaagaggcagaacacaaaatcaacggaccaccggaacaggaagcaacagcagcggggcgccggtgccgtacccttcactcattccgcccctgaaagtgaaacgtacccagatctacaagctactccactcgacttccataaataccactcctgcgattccaccttgcagttggaccggccgttgttgctttgcttcttcgcaaaaaaaaaacaaaaaaacaaaataggcctgtcttgctccgatcaggcgtgttcttaggcttcgctgcccctaccgcgtcttcgccgggatcggtccatggccggcgccgagcgcgcggaggcggtcgcgctggaacaagggctcctcgatccggaggaatccaaccaagtagtatacactggagatggatcagtcgacttttctggaaatcctgttgtcaaggaaagaacgggtagatggaaggcatgtccattcatattaggtaatgaatgctgtgaacgactggcctactatggcatctccacaaaccttgttacttacttgacaaaaaaactgcatgctggcaatgcctctgctgctagcagtgtgactacatggtcgggaacttgctacctaactccacttattggagcaatcctggctgatgcatactgggggaggggatgacactgctgactctttcagcatcagttcctatgctcatgcctccatcttgtgaaggatccttttgcccagcagcaagcccttttcagtatactgtcttttttcttggtctttatctgattgccctgggtactggtggaattaagccgtgtgtctcatcctttggagcggatcaatttgatgatacagatccagctgagcgaatccagaagggctctttcttcaattggttttatttttcaataaacattggtgctctcatatcaagcagctttctggtttgggtgcaagacaatgtaggatggggactggggtttggcattccgactgtattcatggggctggcaatcataagcttcttctctggtacatcactttataggttccaaaaaccaggaggtagtccaattacacgagtatgtcaggtgattgttgcctctttgcgcaagtggaatgtgcctgtcccagaggatagctctctcttgtatgagctacctaatggggtatcaacaattgaggggagtcggcaaatagagcacacagatgaactcagatgtttagataaggctgctacagttaccgaagttgatgtgaaaacggctgacttcaacaacccatggcggatatgcactgtcacccaggtggaagaactgaagatactagtaaggatgttccctgtctgggcaacaacaatagtgttttctgctgtatatgctcagatgtcaacaatgtttgtggaacaagggatggtgcttgacccatccttgggctctttcaagatccctccagcttcactatctactttcgacaccctaagtgtcatcatatgtgtcccgatgtatgattacatcgtggttccgatagccaggagattcactggcaacgagaggggctttacagagttgcagaggatgggtattggcctggtaatttccatcatggctatgtcagtcgccgcagtcctcgaaatcaagcggctagcagttgccagggaagcacacctggtggatcagaatgtcccggtcccactgagcatattctggcaaatccctcagtatttcctgattggtctagcggagattttcacattcattggggcgctcgagttcttctatgaccagtcaccagacgccatgaggagcctctgcagcgcgcttaatcttctcactactgcgtttgggaactatctcagcacgttcattttgacaatggttgcgtactttactacgaggggaggtaaccctgggtggattcctgacaacttgaacgaaggccatcttgattacttcttcttgctcatcgctggcatcagttttctgaacctgattgtttatgtcctctgtgctggcaaatacaagagcaagaaggcagcttgagttgtgaaggccaggggctggatggcgtgctgcgcgccatgttatggtggacacttcagttcaaaatctgtatatatgtttcccgcattaaccaccctagctgaagcaaccatctgcaattgttgcaaagtttatattcttcattgtgctggactaagttgattatacattcgtgcttctactttgtgtatgtatatatctgacctaaagttgctgaacatagacaatttcacttgcctctggtatccagggttttgattgttttttaacctagatatgtgaggtcacgttttaacttttgtatgtagagtaagcatcaatgtgctggttgaacaccaggagggcttggggcgtacttatgg

SEQ ID NO: 38389 - DNA, 2317 bp, Zea Mays
acatcctctcttcatactatctaccacaactagttgccagagttcgtcatggacttctacaaagagttcgtggagacttcgtccgatgacgattccgaagactgaggtcgacactcgacaccatgtacgtttagcaagcccttgagcaactaggtgttggaggttcgagcgggcgtcgtagacgctcttccttgccacgtctagtaatccatagggatcacagtgctagcgaaaatctgataaagctccactacttcggtccaaatcctgtctatcccgcccacattttccaacgaaggtttcggatgcagcggcctttgttcctgcgtatccttagaggtgtgcagcaagtggacggatttttttactgttaggtgtgatgctacgggtttagcgggactcggtccgttgcaaaaagtctctgctgctttgcgtgtcctcgcatatgggttgcctacggatgctgtcgatgagtacattcaaatcggacaaactaccgctagggactgtctcatccgtttctgccatgcaatcatctcatgctacaaccaacgttacctccgtattcctaacagaaacgatgttgctcgcatacttcgtgtcaacgctgataggggtttcccgggcatgcttggctcaattgactgtatgcattgggaatggcgtaactgtccaactgtatggcggggtcaattttgtggccggaactcacgtccaaccatgatattagaagctgtggcgtcgtacgacctctggatttggcatgccttttttggaatgccaggaagtaacaacgacctcaacgtgctccataggtctcccattttcgatcctttacacaacgacgccatgcccccccgtgcactacaccatcaatggagagtgctcgtaaagatatcgagagaacttttggtgtgttgcagtcgcgtcgggcagtactccgcgggccagcttatggttgggttcgcaatcacctcacggagatgatgattgcatgcattatcatgcataacatgattgtcgaggacgaaggcgaaggagcagaaaatgttgattttgttggtgccaccccacctcctgatctttcgactgcaattccgtaagtccggaacgagtggttgaacacgactgcctggtccgaaatgccaaatgaaggagatattgatatcacctgcaagaacacgtacctatctttgcagtacaaccttgtcgaacatctttgggcaaggcgtggttccatgggttgaagtatggctacttaattaagttgtcgagtatcagtgtaatgtgttggtgtctactttagtgtactttagtcgatgtaagcctccagttgtggtcaagataactgctgttatgtgagcgtcttggatgtaactatgtatggtttcatccatacttcaataaaatttagataatgtgtgctttgttcattagcaacttaaattaagggagttctcaaacataacataaacgtctaaaggtaatgagctcaaacataacatatagtggacaagttcaaactgacaattcataaccataagtgacgagaataagtttacaaacataacataatcttgagttcttcaactgaaatgaagacactaacgcagtccaaagtcacacttcaaaaaatgtgattattacagcacgcattactaaaacagaaactcaactagtgaaaaccgtggtccacaattttcactaaacgaacaactcagtttggattgttgacaaaccagtccacaagtgctttcctctttgctatgaaagcaggcctcaaatcttcggctatgtcctccaaatccacagccattgcttccttcaactcatcgttcttctctttgcgttcttgaaacttcagttttgttttctccacttcaatttgttcttgttgaacttgcagcttcttatattcgagatccttgaaaacctcataatgtgcttctttcttctccactttgtcttcactttgtttcaaccgggccatttgcaggtcatgaattctggtcaaatacttcatggactgggacgacgtggacatggccttcttccttgatgcctttgtggagtctcggcctaatggccttttcccagttaaacctagagaatcgctatccaaatcgtttacacttgcagttggtgtggcactgccaaccggtgacatccctgctgcccctcgtagtgaagtgccttgaacaatagcttgccatttgggttcgttcttgagtttagtccaacaatgcatgaaggggaaccctctcttattttcggttgtaaacagtgtggtagccattgaagtctgaaaaggcataag

SEQ ID NO: 38390 - DNA, 14678 bp, Zea Mays
gcttagccctgcttagatcttgtggatagaggttgccttttgcattaatgcctagctcaggggttatcttgaggaaagatggcttctacctgaaagaatattttcattaagagcgtggtgggatcttactgcaaagttccctttgatgctcttttcatcctaaggaacacaaacaatcctaaggatggaaggcctgttgatcaaggactatcttaactagccacatgccctggaaatgggacagggtaagcttgaacccggctattccatacatgaaaagacaatcgtgcactgggagtggagagatggcgagagtggcacgtaccctcctagcaaaggaccgcctaaaaggggtggtgtgctctcgggtggcgcggacctgttcatgcagtggaggatccgtgggaatggtagacatgcaaggtttacgagaaacatatgtcgtgtggttagagatcctcagctgagtaaatcgattcggatcgccgttatatccccggagagtggagacttgatcgctgccctgcaacctaagtcaggatgtgaacctcatgaataaaaatgaagttttattgatgagatggtgaaattagaccagatgcaaacatagtctattaatatttaatctggcattaaaatattgaaagtaaggactcactttagttagctaattctgcaaaagtatctaagttgattcttgctaaaacctctccttgattcccaaatccagcatatccttgagagtcttttctttagtcgggtaagtcttgctgagttattccatactcagggttttatcccctgttgtttttcaggtcatagttttgtgctgctgatgatggtgttaagtgccggtgggctcggccttctataagtctaagtacttcttctatacttcttattgaggatggtcacttgagctagcatatatttcaagcttatacttttgtaatcactccgataaaataatgtaaattttttgtaacctgtaaaatttggtaataagatttccgctgcaaaaatgttgatgtgtgtgatttgtattacttaatcttgtggttctggttgcaagtggtttatccggggtccttggggcactcggacagatcctgttaagttatctggtgcacatgcatagccgtctgaggtctttgagacaaggacaggtgcatgtgggcccaataacttgggaggttctgccacagctggtatcagagcaggattaagtataatacggtcacatacgtattttaaaaaaacaaagttttggttttataaaacctattttcaactaaacacattgtttggctttgaaaaatagttttgaaaaactataatgctagcgacatcctctattaagccctaaattaaggactatcatgtggcttagttcaaaaccactaacccacaaccgggtgggtactgcatatatgtgtattgttatttttgaggccattcagttttgaatggatcgacgcttaaggtaaggtgagatgtgagagcatgaccgaacaaacgtcggtctagggaagagcgtaaaaagcgcttgattatatacatgttccacatatgtatatatgaaggctgcgatatggagtaattatttttttgggaattcagtaccccatggaggtgtatgggtatacagacatgggaatactaagaaatgtaatgtacttgcaacgacgcacctacgctcaggtaagaaggtgagttaccataatgagttgccctatggttaaagtgtggcaacgacgcctatgcgtggctcggtgcttcatgatgagctggcctccatatagcaatatatggagtataaactgtgataaattgccttgtgtgaactgcatcattgggaaattgggctgtgatggaattttctgcaggtacactaacctcgaaaatgtatgtgtagctgacgactagcaaaataccgtgagagtcgtaagtatgccaccgagatagaacgctactgccacattagattggcacaaattcgtgaggacgtataggacgagcatgcatcctaattgttgcatcatgtttgttacctatacatccaaaatgcttctctcatccttattccagaaaccagtgattgtagataatctggtgtaatgttgaattatgaacttcaataaaatagttgttcttcgttccttaggtataatgtttagatgctatatgtgtgctcttgtgcttaatgtgtcgatagaaggttagacacttgtttgcctaaaactaaacctaggccatgttcttagtaggtgaaccatgacccaaagttgaattttctgttatttccccatgaccaaactcatgtaaatggatgtttggataattcctttatccaacgcaaggtgtgcatgggcttaaagctaggatctcgagtccatgttcttgctatttaatttgtgatgttttagttgtcataattccatcttagaccatgcccttgttcgattggcacaagctgatgtcccttatctagtttgcctgttcttaaggatcgccatgttgctttatcaacctaacctaggaaaggaatacccaatctttttcttgaacttgatgcctttggtttcctcaatctatcgaaggcataccaacttcatcttatgattgttttcccttcgcatctagtcagatattaatccttgaccttgtaatctctctgatgggcatagaaatctacttgggactgaattaacagtctcccatcgtactcattcagcaacaagtttaggttatggccatgccttgttcatttcatcgggccatgatctatttggctctctacttgtaaccattttgacaggtagagtctcttgtgtatattgtcacccttactcaattcatttgtgtcgcgtgagatttcttattggttatgtctgataatggtgttatggctaaaaactgatggtgccatgacgaaaccgagggcctcctgtggacgatcgacacacggttgtgctgctcggcacgcgctggtatcatggttagtagttgtgatccattatgagactatatcaatgggttatcttggcacaatctgtttttgctacatgggattctatgttggtaccagttcagtaatgctgtcatgattaatgacttatggtgccgcagcaaaactgagagcctcctgtgaatgcgcacacaggattgtgctactcatcggatgctggtatcaaggtctctggtcatgatccattatggaactaccctaatatgttatcttccgtagatcccttccttgaaacgatttttgtgttgtttatcgaaataatcaagcaacatctatcatctctgttggatcaaaagggcataccactttcaggtgtggtctcttttcttttgatcttggtagtgactacacatccaagttccctttgcatcctttgtgtaaaggcgaatccttgaagctttttagtgttagaagacaactgattagctctcaaaatggagattggctttccctactgctgagatgcaggagtttgttcattcgctcttttatttaatccacgtattccctgaccaagtggataattcatctcgcatgaagaaacggatgaaccccatggccaaatggatttctacccaagtgcatgacctctttttagcaaatgtaaactcttgactgttgtcttaccgatggtactgagagtagttgctcaatgtcaaaagtagttcaacgagttggttttattaacttgtaactgaaatgtgatcaaaggttgagtttagggatcgatttatcgagttgtctaaacccactttggttcaacccatcctaagaaagttcttacaaaaatcaagttaaatcgactaataaccacctaatcatcgctctagtcatgcctcggccgcctcacgcatgcttttccagcgtgtgtgatcatgtcgagccatgcctagtgctggataaaatggactgactgtaaagtctgtatctacaaacccctccgctggtgattctcttgaatctataccctctttcgtggacttgaattctcaggttagccacatgttaaccgcgacagtattcaacatccacactcgtcttgtgtgctacgagcttaccgtgaccacttgttggtaaacctctttctatgtgttttactcaagaggttgcatctgattctgtttaggtaaagtcgcatatccaccgcttgctcaacagactcagatagtacaatgtcatcagaaaaagcaaactgcacacctggaaccctatgtgttcttctggtagatactgtctctactaatggacatttttaaattggcttaagtcaatacatgttatgtccactagagaaacaacattctgagacacttgtcttcgttcaggactgtcttatgcttatcgctgatatggatatggggtacatgcttctctacccttaaaagtctttcgctccgaatctcgggacgagattcttttaaggggggaggactgtaacacccccaggtgtgtatattccgctcgacaacgagtatggatttaagcacgtaatatcagtgggtgaacagacgctaaattttaattatcttcgctgatcgcgattttaatatcgcgtcggtttcgtcgatcgcgagttcgacatcgtttttatttttatctatccgggctcttccgaaattttcgtgatgttcggaatattgctggccatttctgtttcctgtttcaaaatccgagaagaaaaatcttctcacagtgctctctctccttatctcctcacgtacgctacgcagatttttctagtcttcgttctcatccacgcacggaaggaaaatcttctctgcgttcctatcctccactctgatatttcatcgctctgatttttgttgaagttgctggccgctcagccttatctagcgtgcaggctcttcttcaaaaatcccatgcgtacatctcccttccctcgccttatctctccaccgctttctctcttccatctgatatgccgcgtcgctgtattctggaaagcaaaagaaaattccaccgctgttcttctgttgaaattcctgccgtctcttcttatctgctgctaggacttttaccgtcgtcattctcccagctgagcactctctctgctctttctcgcatccagccatggcgcccctgttcttctcttttccagtccggccagccgagcgctccttctcccacccatggagctcccggctgtgcagctcgcccaatccctagcccgaccggagctccctacaactcgagttcccatctccctgtatctcccatgggagagcgtcctgccgaggtctctccatggccggcgctcggactgtgttatttcttccaggctgccgcgccctgccctctgttctgctcgccggtctgagctcacccagctcagccactcttctctactcgcctagtctgcgcgccgtcccatcccctctctgtccggccatggccgctgtgccgaggcctccttacccgcgcgcagtttttccctcgctcggagtccctcccatggcagccgctcgttcgtttccctgatgctcgccgcgcgcttttctattgaccggcgtgatccctttctctaatgttttcctgctcgtccgtccgctgctccgtcgtcgttctcgggccgaccgtcggcagctccccggcttccgtcatgctcggcagcaagtaattcatgtcgaagcagcagctatgatgccttgcgtcacctcgccagacctacagctccatatatgtcactctctcgtatcatcgtcgagcccagcgaacctcattcttctctgctcgatctcgttgaccacgaatcccggactttagacaaaaataagcgaggtccctgtgcatcgcttatcaagtactcggtccaagacttcaatcgaagattgtcgtcattccgtgcgtcatcgaggaatcccaaggattggatgaagacgaaactagcagcgcggtattccccaagcgctcgacaaattgcctgaatcggaaaaatcgctaccgatctcatggattcatgtcagctgtggaaacggtaagccgataaattattcagtatagtccgatcgttgaataagttaatgtgttagtgtgaggctcattagggtgctcgataaattgtgtaagtcacgaacctctagtcgacttcgcagtttttgtgattattgagccaggttcagttatagcgagttatttcgctattccggtcaattagttgaattagtgtcccgagtagaattttagtagacatgtgtgctgatgaaatattttaatcacttataaagatgtagtgtaatttataaaataagggataagtttagaatttaattaattaattgataagttgtgattaggctaattgtatttcatgtgtatagtttgttgttcgtgatgtttgcgttaggttcgagaagcgtaattattacgtgtagtcgtatattaataactagtgtttttggtataaaattgtacaacgcctcgccgctaggtgtttaattcgctatcgcgtagtaatatttaggtttgaaatattccggtctatatgcattcatgtgcataatgcatttcattcaggtacgtgaattaaccacgcgatgcggagaaccataactgagtcgaccataagatggtgctgatgaatggaactggagatggacagacgaagcaagtatcgggacaaaggatggtcgtcaagtgatcgacgcctaacaaacactaacgtagtgtttatcccaggcaagccccggtgcatgcaaccccttccttgtgtttttaaataatttttgcacactttaagtctagtgaaatgtgtattaggtttataggagttgcttggaaaccctttgatgcattgccttccttgatatccagacctttatagatacttcaggtgaagtatcaaaatatggtttacaaaaatgcttagccctgcttagatcttgtggatagaggttgtcttttgcattaatgcctagctcaggggttatcctgaggaaagatggcttctacctgcaagaatattttcattaagagcgtggtgggatcttactgcaaagttccctttgatgctcttttcatcctaagtaacacaaacaatcctaaggatgaagtacttaaatcgggacttgggctaggaacaggtgatgctccgcccaagttagttaaggattggatgcgtatgtaggcctgttgatcaaggactatcttaactagccacatgccctggaaatgggacagggtaagcttgaacccgactattccatacatgaaaagacaatcgcgcattgggagtggagagatggcgagagtggcacgtaccctcctagcaaaggaccgcctaaaaggggtggtgtgctctcgggtggcacggacctgttcatgcagtggaggatccgtgggaatggtagacatgcaaggtttacgagaaacatatgtcgtgtggttagagatcctcagctgagtaaatcgattcggatcgccgttatatccctggagagtggagacttgatcgctgccctgcaacctaagtcaggatgtgaacctcatgaataaaaatgatgttgtattgatgagatggtgaaattagaccagatgcaaacaaagtctattaatatttaatctggcattaaaatattgaaagtaaggactcagtttagtaagctaattctgcaaaagtatctaagttgattcttgctaaaacctctccttgattcccaaatccagcatatccttgagagtcttttctttagtcgggtaagtcttgctgagtaattccatactcagggttttatcccctgttgtttttcaggtcatagttttgtgctgctgatgatggtgttaagtgccggtgggctcggccttcttataagtctaagtacttcttctatacttcttattgaggatggtcacttgagctagcatatatttcaaacttatacttttgtaatcactccgataaaataatgtaaaatttttgtaacctataaaatttgataataagatttccgctgcaaaaatgttgatgtgtgtgatttgtattacttaatcttgcggttctggttgtaagtggtttatccggggtccttggggcactcggacagatcctgttaagttatctggtgcacatgcatagccgtctgaggtctttgagacaaggacaggtgcatgtgggcccaataacttgggaggttctgccacaaatacactgttcatcaagttcatgaagaaggccagtgcattggttagaccgaaagacattacagtaaactcatacaacccatacttggtaatgaatgccgtcttcggaatgtctgaaggtcgaatcctgagctggtgataacctgacctcagatctatcttggagaacacgctggctcctcttaactggtcgaatagatcttctattctgggcaacgagtacttgttcttgatggtgacctcattcagagctcgataattgatacacatccttctggtgccatctttcttctccacaaataggacaggggcagcccaaggcgaggtgcttggccggatgtaacctttctctgacaactcatcgatctgcttcttaagctcaaccaactttggtccagatactctgtaagctctcttaaagataggggcggttccaggaagaagctctatagcaaactcaactttccgctctggtggcatacccggtaagtcttttggaaacacatctgggaactcagacacaaccttgatactctcaattgggtctgcttcactgctatcgacagccatctgataacaacttcctttctttggctcaggcgggactaactcggtcaccacttcctttcctagtggggacaccaacttaattgtcgttttatcacaactgataactgcctgatacttatctagccaattcatccctaggatgacatctattccctgagtacccattactatgagattagcgggaaacgctatctcccttatttccacacttacattcaaacaactgctatcggctcgaattctaccaccggctgagtaaatttgaatgggggttgacatggtagttattgggagattatgtgcttttatccatgatgcaggaatggaagaatgcgttgctccagtatcaaataacacttctgcaatatgggagtcgactggaaacatacctattatcatgccgggggtctcctgaactgcttcagcctccaagtggttcagtctcccatggttataacgtggcatagagcggttgcctgctcctggctgagacacattctgctttgctggggcattagggcctgactgctgttgggcttccttcttcggacattgcatcacccaatggccttgctctccacagtggaaacatgctctgtttccaacttgagctggtgctgcctgactgttctgctggtttgctggggcagaaagacgaggtgcctactgattctgcctctggaactgacctcctcctggctgattattctggcgattctgatgctgatgctgaggatactgcctttgaaactgctgctgctgctgaggtggacgctggttctgcctgaactgctgaggttgattgcatgagaaacgaggacgattgctgcttccaggctggggtccactgatcttgcgcttgcgatcctccatctctttgtgcttcctctctgtcatgattgctctgtcaatcaggtgctggaatgtcgggaaggtatggttcatcagctgatattggagagggtcaaccaagcctctcaggaaacgatactgtctcttggcgtcggtgttgacatcttcaggagcatagcgagacaactgcagaaacctgtctcggtactcactgacagacgatgacccttgcttgagggccaggaactccttcttcactgtcatcagacctgcaggaacatggtactgacgaaagctatctctgaactcttcccaggtgatggtgtcggggttggcatgggtggcgagataagactcccaccaagactgagctgctactctcaacagacggggaccatacaggactttctccctgtcatcgcactgagcggtatgcaactctcgctccatagtgcgcagctagtcttcagcatccatggggtcagaagaatgagcaaacgttggggggtgacctctcatgaattcagcacgcttgtccctgggcatctaaggcatctgaggctgaggtggtggctgttgctgttgctgctgctgctgctgaatggcggccagagtttgaccgatggcttgaactgcctgagtctgcatcaggaacatctgctcgatggacatcgggggcgggggcggcagttgctgttgctggggtacctcttcctgctgagcggcttgctcctgctgagcacgccttcctcctctgcgcctgttttctgacatctgcagaatgcaaccacacatcagaactgatcttacaaatcttgcagcataagaaaagagtatagaattgttggggacttgttctcaaatgctatgaattaagaacaaggcaacataaaatgttaaatgttaatgcccttcgtccgctgaaacattatctcccttaggatataatgaacttcggacgaagaccataagcaaaatatcacgaaggtcttaccttcgtgatcagctttataaaacaatgtaaacaatgctagaacatgaaacattaaagaaatttataccaaagacaaatattattatacatatattttattatacaaacttaagtattaaaacataatatttaggtacatttatacctttgccttggcattccagtgtgatgcgtcgatgattacaggattgcgtgaacagtaaaggagtactgttcatctatttataggcataggacgtagcctgtgagaaattacaatcatgccccttacaaaagattacaattatgactcagacccttatggactaagaagtcatttcatctttaagtcggttcgaaccttcatcttcagatacgttatagtaccgaagcttcatgagtggtagctttggcactacgtttaaacggatttgccgaaggtgtttcttcctgcaggaccttcggcgatgaagcatggccccaacagtagccccttcgtggtgctagatcgtttttcgtaacgagcttgatccgtgaaaaagtctcttaggcttcgggaagccgaaggtccgaaaaacaccttccctgagctcgttgccaggaaacgataaaatttctgagcgcggagtggtcccaccatgcagattcaccttctcgggttttgtggcccaccgttcagtgggtgcgagcgactgttcgtccggtgtaggagacttgacgattcaccttcttacctgcagcactatataaacagacgagtaggtgtgaagttagcacaacattcattgctattgcacttgttttgctgccaggaatttaaacatagccgaagcttgacccttgcactcaaacgaagcaccacctcggattctgcttcgtcacaagaagagctttggaaaaaaggtcattaatttcaaaaaacttctagagattcataatcaaatggctagagtgcgttccactgccagggttgatcgtgagggagatgagaccaaagccactgaaactgtcccaatttccgaagcaatgaggcggtctgggctggcaacatcagaggatacatctgccgccgaagcaaaacaagctgacgttgaagaagatgaatttgaagatgagtacggtgcaatgccatctaaacctagccacttagagtttgggaagtctactattaccgaaggtgatatggctaagttactgaagctaggctattttagtgaagacaaaagggagctgattcgcttcgggggaaaggaagttaccccgaagccagaaaaagatgaggtggtggtttttaagagcttcttcaaagcagggttaagatttcccctgcatgggatgattgcagatgttttagagagatttgggattcaccttcatcagttaactcctaacgccattgttaggcttagtgtttacatctgggcactccgaagccaggaggcagagccacttgccgaaggtttttgccgggcacacgagcttcattaccagacaaaagctagagaagatgggctgcatgataatttcggctactacaattttgcatattggaaagatgccaagtatccagttatcagctatcgtacgaaatggccagctggctggaagagtgaatggttttatgtcaaagtagatgagaagaaggaaaagctagttcagagccctttgagtttaaccttcggagaaactaggccccgatgcgtcatggatccagatagtccatgccagattgcactgggcgaatttcgggttgttgcagagcacattagcaccagggatctggtccaagaattcttagccttcagagtattcccaactttgaaggaatgggacatgccgaagctgaaaggggaagaaaaagaagaaagagcttgttcggctaccttattattataagtttaaaaaacattttaaagcaccttgccaagagtggttggacacaattgagattatgtgcaacgagatccttggcaactattctaagaaagaagatcagttaatgactgcggcttttggtactcgtccgaagtgaagaatgaatcaggtgatggatgccttgaattttgattaccctgactatgagcaattgggcagaggtgccgaaggccagaaaagaaaaagagttgccagcgtccttgacaaagaagctactaaattggctaaaaaggacaaagaaatttttgagaaaagaaaactgagccctgagccgaagatagctacttcaaagaaaaggaaagctacgaccccgaaaccaaaaacatcgggccatgagggagaagctcctgcgacgccttctgctgccgatgtggaagaaattctaaaggtaatgactgaacctttgcctatcaagctaagtccgctggcgccacaactgacgaagctttttcagaaggaaaaggagccttcggcaacggaaagtcctgctaagctgaaaaaacagagaattatccaagtggccgatgttattcatcagacaccgccgccggcatcggcgtcaaaagtaccaattactgaaggcgcttacgctgccaaagctaaagccaccgaagccttaggtgccaaagccgaaaccgccgaagattctgatctagaaaccacacttggtgatattgataacatgcttctgaaaatggctgaggaagaagctgctgcggccgtggtggacacaacaattgagaaaggaaaagagcaaattgaagatactttagaagaggaaaacttcaattttcaagatatactagggcacgagttatcagaaactgaaaaagaagaactgaagaaatatgatgtatcctgtgggtacaaaccaggggcttttctgtttggcggagtcaatgaagggaaattgagatgccttcggaatcgaaccgaggcaaaggtcgttaggactttctcgaagaatgttggcctgccgaagattgaggcggacctctgcaggtaccggcgacagcatgtcgccggtagcctattctatgctaattttaagagtatattactgagtaaagtgctgaggatgcaacaagatctcgaagacgagaaaaacgaagctacaattaaagatctagaaaataaagtcaaagatcacgaagttgctttggagaaaaaggacctcgtcatccactctatggaaggttcgctggcagaagctcaagccaaaattgacagattaaacagcgaattactcataaaatcaaaaaaatctaagcaagaaaagaagaatcttgagacgaatctcaaaaccgaaattgagaagagttcaaatttgcagaaatcattgaaggagcttcaggataaatgtttagacttcggcaatcgatgcttgtagtggctgaaggatgtcttttactcaattggagccagctctgagaagtttacaccttcagttgaagacctgccaaacacctttgaatatattgagggcgaagttgatgcgcttgacgaagttatcgctgggcatgccgatttctgcgccctgttagcttctcgaggcacagctactgctttcctgaagactggctgcacgcacggaaaaattgttaataggccaaactttagtttgtcaccagcagatttgattgacatccccagcctagctcgaagtataggaaacaggtttatgactcaaatttggataaacggcgggcgaaaaatggctggtgacgaagctcgaagccaccttaagccagatgatgaagctaaagaatgatgagctgaagccttaatcagatgttccgaaagactttgctgcagaagattctagagaaaattttgtaatatgattgtaaagaaatttatgtaaatttgtgtgtacctcgtaatatatctttacccctttgtccgtgtacgatctgctttgctgtggacgaaattttctttttgagccgaaggcgaaaaacaccttcccttcttttcgtacacaacgaagcatgaaaatttcttctttctgttttttcccgaagctttatcctcatagccgaagcatctgccttctctgtatgatatgatgataatgatcctatgtatgtctaaatgaatgtttatgaatgcaaatgtcatgatgtaatgtatcgtgcaaatgaatgtacaaatacatattcg

SEQ ID NO: 38391 - DNA, 1359 bp, Zea Mays
tgttctccgcgagacgctccaccgccacatatctgcatctgcaaaatactgcgtgctctcttcttctggttctcctcatcacattcaccgtcgtcgtcatcacataagcttttatctaggcttgcggctacttgcatcggagcaagtcagtcacatctcacagctcagtgagatccagagccaaagggcggggcgtctcccactcccaatcccaagtccagccgccgccgtctcttgctcgctccaaaagccgttttccagagatctttttcagggccagacgccagccgccgtctctcgcttgcctgcatttccgatcctgaggcagtcctcatctcattctcatccaaccgggaggttgggaacgagatcacagctacagttacctgagtagtaggatcctcctcagatcggcttcaaaaatcaaagtgggggggacaacaaggcaggggatgagtgcagctgcaaccaaggtgaagagacgtgtgggcaagtacgagctcggccgaaccataggcgaaggcacattcgccaaggtcaggttcgccaagaacaccgagaccggggagccggtggccgtcaagatcctcgacaaggagaaggtcctcaggcacaagatggccgagcagattaagagggagatttcgaccatgaagctgattaagcaccctaacgttgttcgcatatatgaggtgatgggaagtaaaacaaaggtctacattgtgctggagtatgttaccggcggcgaacttttcgacacaattgctaaccaaggtcgaatgagggaaggcgaggcgaggagttacttccaacaattaatcaacgcagttgattattgccatagcaggggtgtgtaccaccgggatttaaaaccagaaaatctactgcttgactcatatggaaatctgaatgtctctgactttgggctgagcgcgctgtcccagcaaatcaaggatgatggattgctgcacacaacttgtgggactccaaactatgtggcaccagaggtcctagaagatcagggctatgatggtgcaatggctgatctgtggtcatgtggagttatcctgtttgttctgctagctgggtatttaccttttgaggactctaaccttatgacgctgtataagaaaatctcaaatgcagaatacacatttccaccatggacatctttccctgccaagaggttgttgacaagaatccttgatccaaatccgatgacgggttgattttgcgtccatattatagctgagcaactctttcattcctagcagattcatctctccactacaaatgcacttcctagcaaaatttacctaagattagagttatgcatcccagcaccgtttaaaaaagaat

SEQ ID NO: 38392 - DNA, 1464 bp, Zea Mays
cgctcgcgctgtggctcgtggtgctcttctacctcctgggcgacacctaaaggatcacacaattgattcggcgatttgcactccacctgatgttgctttgctcgcaacttttgcttgccacgacggaggctagatccagctcctaggtgtccgtcgtccttccatctcccaccctccctcgttggagcacgagcaccaaaggtgcccagatcttcgtcggccctgcccctgcttccttcaactccaccaccaggtaatgccctggacttaattgaatgggctctcttctcaccaggatcggtgtcctgccatggctccacgccatgattgttgatcccgtgctgtaggtcatcagaaggggagcagaacccaagcaactagccttctctgctgcccttggtatcacgattgggatctttccgaaatattaggagcacctaaaggatcaactacgataaatgttttcagtgagtgtaccaaggccgaatcgtttcttccatttggttctggaagtcgagcatgtgttgggcagaagtttgttgttcttgcaatatcgatgttgattgccagtctgctccgcagctatgaggtatagcctcatccaagtttgtctaaagaaatggacacaacagttacagcagccaccttcatctcccaaaccctaagatcatcctcaccaaaagaaggatctgaagggagagtttggcaaacaaaaatctggcacgtttgctttcactgtattgtttttcactggtgttacatcagtatatgatctttagtttcctaccgtcgtttggaccatgctgaagtttggaaaggcgaccttggtgatgcagaagtgtcttttttcctctggatttttgacagaccctgtgtgcttcactggatctaagtttttgtcaggtttttggagcacccgcagggctgttagatcacaggagacgtatgttgatgtgtataaacagactcattttttcagttggggttttctcctctctgtggagaatgtaatgcccaacgcatgatgtttgtcgtgttgagatgttttttgatagttttttgcgtatgttgttgatattgattttattggatgtgaattcattcatcctttcatagtatatttgaattcatgatagtatctacatatgtacactgcttaaagatactatctacgtatctatatctattacaattttgtataaatactttttgatagtttttaatttgtatgacaaagcagagacacatacactgcttaaagatatgcgtctgagaacatcattgcatcatgccactgggcatacaagggtgttgaggaagactcaaccctagaaggtactactaatactagcaattacttttttaattaatgcctacattcctgttatgtagtatgcacatcggatttgtattgttgtcgtactattgatgcatgattttaacttgagggggcaagaatatgct

SEQ ID NO: 38393 - DNA, 447 bp, Zea Mays
attatgattaataagaatatgattgggtaagaagaagtgatcaagggcataacttgcctgggactcgatattccaggtaccaggatgatcttcagattctcgtgacctcactgctattcgtagcaatacaaacaaacatgatataggcaaatttaacatcacactaaacataagcacaaactgcataataataatctatgcgatgctacgagatcgtgggttcgagaaccactaaattcagagctacggttataaagatatgattctctaaaagtttaggtgattaaataataaaaccatgttctatgttgactataattcatgtgataaagatattacaaataaataacttaattggaccttattataagttataaattagttagacatcatatcttagtcaaattatagccatatactagattaaaatattgttttcactgtaat

SEQ ID NO: 38394 - DNA, 3602 bp, Zea Mays
ctctccctctcaaaactccaaactagagctagaggcctacgaagtagtaggaagctgctgctctcctccatagcccctaccccctcccctacgctgccactctatcgcccagccatacagcagctaccccgctgcctgtcactgagccagcgcggcgcaagtgcgcaaagccgagcgcgagaacccacgaaaccaacccagagcccccattaaggcaggctcgctgcagcacgtctcgcgctccatcgccgcctgtcctcttcctgtaatgtcactcccccgatgcctgtgcgcagctcagtggccatgacgacgacggccgcccgtgctctcgccgccctcgtgctcgtcaccgccgccgccgccgccgccgccgtcgccgacgatggggcggcgctggtggagatcaagaagtccttccgcaacgtcggcaacgtactgtacgattgggccggcgacgactactgctcctggcgcggcgtcctgtgcgacaacgtcacgttcgccgtcgccgcgctcaacctctctggcctcaaccttgagggtgagatctctccagccgtcggcagcctcaagagcctcgtctccatcgacctcaagtcaaatggcctatccgggcagatccctgatgagattggcgattgttcatcacttaggacgctggacttttcattcaacaacttggacggcgacataccattttcaatatcaaagctgaagcacctggagaacttgatattgaagaacaaccagctgattggtgcgatcccctcaacattgtcacagctcccaaatttgaagattctggacttggcacaaaacaaactgactggggagataccgaggcttatctattggaacgaggttcttcaatacttgggtttgcggggaaatcatttagaaggaagcctctctcctgatatgtgccagcttactggcctttggtactttttgactggggcgataccagacaccattgggaactgtacaagttttcaggtcttggatttgtcttacaaccgctttactggaccaatcccattcaacattggtttcctacaagtggctacactatccttgcaagggaacaagttcactggcccaattccttcagtaattggccttatgcaggctctcgctgtcctagatctgagttacaaccaattatctggtcctataccatctatactaggcaacttgacatacactgagaagctgtacatgcaaggcaacaggttaactggatcgataccaccagagctaggaaatatgtcaacacttcattacctagaactgaatgataatcaacttactgggtcaattccaccagagcttggaaggctaacaggcttgtttgacctgaaccttgcgaataaccaccttgaaggaccaattcctgacaacctaagttcatgtgtgaatctcaatagcttcaatgcttatggcaacaagttaaatggaaccattcctcgttcgctgcggaaacttgaaagcatgacctatttaaatctttcatcaaatttcataagtggctctattcctattgagctatcaaggatcaacaatttggacacgttggacttatcctgtaacatgatgacgggtccaattccatcatccattggcaacctagagcatctattgaggcttaacttgagcaagaatgatctagttggattcatccctgcggagtttggtaatttgagaagtgtcatggagattgatttatcctataatcatcttggtggtctgattcctcaagaacttggaatgctgcaaaacctgatgttgctaaaactggaaaacaacaatataactggcgatgtctcttctctgatgaactgcttcagcctcaatatcttaaatgtgtcatacaataatttggctggtgctgtccctactgacaacaacttcacacggttttcacatgacagctttttaggtaatcctggactctgtggatattggcttggttcttcatgtcgttccactggccaccgagacaaaccgccaatctcaaaggctgccataattggtgttgctgtgggtggacttgttatcctcctgatgatcttagtagctgtatgcaggccacaccatccacctgcttttaaagatgccactgtaagcaagccagtgagcaatggtccacccaagctggtgatccttcatatgaacatggctcttcatgtctttgatgatataatgaggatgactgagaacttgagtgagaaatacatcattggatacggggcatcaagtacagtttataaatgtgttctaaagaattgcaaaccagtggcaataaaaaagctgtatgcccactaccctcagagccttaaggaatttgaaactgagctcgagactgttggtagcatcaaacaccggaatctagtcagccttcaagggtactcgttgtcacctgttgggaacctcctcttttatgattatatggagagtggcagcttatgggatgttttacatgaaggctcatccaagaagaacaaacttgactgggtgactcgcctacggatcgctcttggtgcagctcaaggcctcgcttaccttcaccatgactgcagcccacgaataattcaccgggacgtaaaatcaaagaatatactcctcgacaaagattatgaggcccatcttacagacttcggcatcgctaagagcttatgtgtctcgaagactcacacgtcaacctacgtcatgggcactattggttacattgatcccgagtacgcccgcacctcccgcctcaacgagaagtctgatgtctacagctacggcatcgttctgctggagctgctgaccggcaagaagccagtggacaacgagtgcaatctccatcacttgatcctatcgaagacggcgagcaacgaggtcatggagacggtggaccccgacgtgggagacacctgcaaggacctgggcgaggtgaagaagctgttccagctggcgctcctctgcaccaagcggcagccctcggaccggccgacgatgcacgaggtggtgcgcgtccttgactgcctggtgaacccggagccgccgccgcagccgcagcagcagcagcagaaggcgcacgcgcaccaccagctgccgccgcagccgtcgccgccggcctacgtcgacgagtacgtcagcctgcggggcaccggcgccctctcctgcgccaactcgtccagcacctcggacgccgagctgttcctcaagttcggcgaggccatctcgcagaacatggtgtaggggaagacgtagacgttcggtgaggcgccttgagtgaggccgattgcagggggagtagtttgactgacattttgtgggacgcagcgcaggagattaacatgggactcagtagctagggtgttgttagctgtaaaaaaagtcatgtgacgcaagagcagcggagcttcttcctcttctttatcccccctccccatttttctttggtggtctaacttactaggaggctgtattgatccatcatcatctctcccgttcctctgcttgatgatcttttgtgactttcgcggtcctctgtattgatccatgatcttttgtgacctctgctttattttctgggatctttacctcagaac

SEQ ID NO: 38395 - DNA, 1771 bp, Zea Mays
aaaaccccaaaaagaaatatccaaggccgcgccgtgcgcgcaatccccctcgctcgcaccatggcgctgcagctccagctgccgcggccgctcgccgccgcacggccctctatcctcctcccttccccagcccatggtgcctccgcttccgcgaccccccttcacgcccgcgcaggcggcgttgcgttttcgctccagaccaacgtgcgcctcctcaagcccaaccgccgcgtccgccgctctcgggacccctactacgatctcgacgaggacgacgaggaggaggcggagttcgacgaggacgatgaagacgacgaggagggctacgagagcgatgatgacttgtcgggtttggaatatcctggtgtactttattcaaacagccctcgtgcttcaagcaagaaaccaggtatcttaagtgttatgctaaatctatttagaaacagtggtcacttcgtgcttaaactctaatactccaggactccaaactccagtggtaaaagaaaactgggaaggaagacaaaccaaaacccatgacaaatacggtagtccaggaagaagtaagtccatgcatcctaggagtaaagtgggacgatcatcaacagatcttaagaacatggacagagaagttgagttgaaaaatgcaagtatctctcgaagtctgttccagaaactacaagaagaatatgacttcgatgacaaatggttaccactgattgattacttgtgcacctttggactaaaagagtctcattttacttacatctatgagagacacatggcctgctttcaaatcagtcaggcttcagcagaagaaaggttggatttcctgctaaatgctggggttaaaagcaaagatatgaaaaggatactggtgaggcagccacagattctggaatacacccttggcaatctgaaatctcatgttgattttctcgtgagcattggagttccaaatagacgaatagggcaaattatttctgctgctccttcgatgttctcttacagtgtggagcagtctctgaagccaacagtaaggtatctgattgaggaagtaggtattgaggagagtgatgtggggaaagtagtgcagctaagcccacagattctggtgcagaaaattgatagtgcatggaaatctcgatcgcttttcctgtcaaaagaactggatgctcccaaacatagcattgttaagatggtcacaaaacaccctcagctgcttcactacagcattgaagatggaatcttacctcgactaaatttcctgagaagcattggtatgagaaactctgacattctcaaagtattgacaagtcttactcaggtgttatctttgtcattggaggacaatctcaagccaaagtatctttacttggtcaatgacctcaagaatgaggtccaatccttaacgaaatatcctatgtacctgagtttgtctcttgatcaaagaatccgtccccgccatcgttttctggtttccttgaagaaagctccaaagggcccatttcctctgagctcctttgtgcccacagatgagcgtttttgccagaggtgggctgggactagcttggaggcataccatacattcagacagaggttgctgctaacaagtttcgcagagaagtctggaaggaaaacactagtctcaagacggtagatgcctaggtggtgggagtttgtttctcttgagcccacgctcctaacaggaggttccagttactgaagttatatgaccagtagggaggtcgagcctcgtctactgccttcgtgc

SEQ ID NO: 38396 - DNA, 1352 bp, Zea Mays
cgaattcgcccttgtttcataaaggtcagttggaacttagacacgcttggtgatttcgtgattatgagaagcaatggacagcctgtgtataacttttgtgtgacagttgacgacgctaccatgcaaatatctcatgttatcagagctgaagagcatctaccaaacacattgcgacaggctttaatttacaaagagtaaactgtctaaacggcatggagctacttctgtcgggcagtataaaaatatgggctatctacctcaggcaatggtcaattatttagcactactgggctggggtgatggcactgagaatgagttcttcactattgatgacctagtccagaaattcactataaaccgtgtcaataaaagtggagcagtctttgatgcaacaaaattgaaatggatgaacggacaacatctaagatcatttccccatgatgaactcatcaaagcttttgaagatcggtggacggacacaggcattctccaggaatctgaaagtggttttgctaaggaagctgccgagcttttgaaggatggtatcgatttgataacagatgcggacgcagctcttacgaatctgttgtcatatccccttcatactactctaagcagcgaggaagctaaacctgtggtgcaagacaagatctccgaggttgcttggagtcttatttccgcgtacgacagcggcgaactcggccaagcgctagctgagggccgtgatggctggcagaagtgggttaaaggtttcggcaagtctatcaaaagaaagggcaaggggctcttcatgccgctccgggtactgctgaccgggaagcttcatgggcctgacatgggtggcagcatcgccctaatacacaaggccggcgtctgctgcgctgtgactccgcagtccaacttcgtgactctagacgagcggttcaggatgctcaaggacgtcgactgggagtcgctggcgaaggagcaggaaacccctgctgtccctgccgccgcttcctagactgccaggaggaggacgacgttgcgcgcaatgtcgctcttgagtttttttttaaaaaaaaaatccattttggcgtgtttttgtcaccgttcgtttccatggagtaggagaggagctcagtggtttggtcataggtcgttggtgctgtaatgtgggcaataatattgaattattattattagatgatgatgatgatgcctgtaatctgcgtgtctacagcttctcgtttgctgaatacttcatctttttttttgacaagtgaatacacgattattacaggtgttcatacgcatgataaaactgttgggcactcgggcgctgcccgtgatggacatagattgttgggcct

SEQ ID NO: 38397 - DNA, 803 bp, Zea Mays
cccatgttgtatgtctatctctcgaaggcatgatacacaacattgtttcagtattttgttggctcagtgagatagacagaagttgctcttggcttgatacatgaatactacaaaagtaatgctacgggtcttggtgttttctttagtctttactatgctttcgacacatcaagctttgggaaataaggaaaattgtgacaaggataaagatttcattaagcgccaatgcgaaagcataacactagaagagcagctcacaataagcgtcatgaaggttgtggatgttgcaaaggaatgtggcaacccggtgccacctgggaataaatgtggaacttggactgttccaccacaactgctagcaagggtgcatccgtaagggttcaacaaagcgagcaacaaagggcacatggataagagttcaataatggaagcaatcacaggaaaatcttgagataaatgaatgaatgtatgctcaactggcttttggaaaattagatcaatataatatgaggtgtgatttatttatatggccataaatctactcttaataaactccatatgcccatggctctaaacggatccgaatgcttactatggtggggagaaacaaatcagtgaagtttcattagctttatcatcttctagtttatttttatataacagtgggaactgaacaatatgtttgattgagccatcctctttatatcaaattgtaatcatgaagattttgtcttggattagggtccaagcaaagagcttgcatcctttccaaatcatgtttagtgtagcagaatggttcaaaa

SEQ ID NO: 38398 - DNA, 1770 bp, Zea Mays
attgactcgtcctgaatgcctcctcctaacctttggatcaacaatggagggcggggaacgcacgcgttgcaattgcaattgcaacatccgaacgcgtcggcgagctaggcgagcagatgaaccccggtcactgttcccaacatctccatcgacgaacatttccacgaaaatctcgctgctctcgcgaaaaaaggacgccacccgcccttgcttgctctccagtttgcaccctggaggcaggtgcaggggcgctcctcgccagcgggcagtcaaccgcccgcgtcggccatggcggaggcggggaggcggacgcttgcgctggtgaacctggcggccatcatggagcgcgccgacgaggcgctgctgcccgcggtgtaccgggaggtgggcgcagcgctgggcgccacgcccgtggcactcggcgcgctcacgctctaccgctcagccgtgcaggccgcctgctacccgctggccgcctacgccgccgtgcgctacaaccgcgcccacgtagtcgccgttggggccgttctctgggccgccgccaccttcctcgtcgccgtctcagacacctttgcccaggtagcgatagctagatgtttgaatggtattggcctagcacttgtcaccccggcgatccaatctctggtggcagattgctctgatgacaacactcgaggcgccgcatttggatggcttcaacttacgggaaacattggttcaattattggtggtttgttttccctgatgcttgcacccaccacagtcatgggtattgccggctggcgtgttgcatttcacattgttgctgttataagcgttgtagtcggtgtgttggttggcctttcattcgtttctgcattagtacttcactgatcagggcataaaatgtattttatgacatgcaagagtagctctatgaaattcttgagtgctggcaataatgattctatctaatgtgcagcccgatatttgctgagattgtacctgagaggtcaaggacaagcatctatgcattggaccgttctttagagtcagttctagcttcattcgctccaccagttgttgggtttctagccgagcatgtctatgggtacaatcccgtcccctacggagctgcagataacaatgttggcagggataaatcaaatgctggcgccctagccaaagctctgtacacgtcgatcgccatccctatgctgctgtgctgcttcatctactccctgttgtaccggacgtacccacgagacagggagagggcaaggatggactctctgatcactccagagctccagcagattgaactggaaagatgtcatgggcaagcggattattattctggaaggaaggacaaggacggctctactgtcttcgatatggattacagaggaatcgacgcctatgatgacgagaagggattaatcgatcagcaggctaagcagagcggcaatgtcaagtggcacaggagtcattcacagaatttgtgacgtttttgccaaagtatcagtgctctcggatctgtacagaaaacgtgagtgagagtgagttacctctcgaaggacgattacatagggttgtttagatagactcagaagcatcagaacaattcggttatgttcagcattatatatatatatatatatatataataatagtataagacttttggaggaatatggaggtgaatatatatttgtatttgatcagaccgacgaggctactatacaaattatgtaatcagtaaaacaaaaatataaactgcccgtctagctc

SEQ ID NO: 38399 - DNA, 2060 bp, Zea Mays
ctgtgtgagactattgttttcgagattgctagcgaaaagcatctcaatccctgaatcgcacacccagccagaacgaacgccagaaggcccagaaccgctacctcctccaatacactttcgtggctccgccgcagcacgaaaccctagcttctgcatctccgccccctccacctcccctccgcgaagcaggcgagatgtcgtcgggcggcggtggggggcagcagttccgctacacgcagacgccgtccaaggtgctgcacctgcggaaccttccgtgggagtgcgcggaagaggagctcgttgagctctgcaagcccttcggccgcatcatcaacacaaagagcggcgtcggcgccaaccgcaaccaggccttcgtcgagttcactgacgttaatcaggcaatctcgatggtttcttactttgcatcatcttcagaaccagcacaaatacgaggcaagactgtttacattcagtattcaaacaggcaagaaataattaacaacaagagtcctggagagactgctggaaatgtcttgcttgttactatagagggtgttcaagctagtgacgtcaccattgatgtgatccatatggcccatgttaactggagaaaatgtcgttatcaacacctgcaatgggagagataccatgtttgttttgccgcctctgtcttctaactagtacattcaaagttcttatgaactcttatgtctcatcttgaggatgcaactttctaagtatcccccatcaacgcgcttatctccggtgtagggcacctcctgtttattcaagttattcatgaaaggttttctcggcctttgggtatgttcataaaatagccacctttgaaaaggctgcaggttttcaggcattgatccagtacactgatgcagatactgcttcagctgctagagaagccttagatggaaggagcatcccaagttacttgcttccagagcacgtgacatcctgctgcctgcggatttctttttctgcacataaggatttaaacatcaagtttcagtcaaaccgcagcagggattataataatccatatcttccaattaattattctgccatggatggtacattgcagcctgctgttggatctgacggaaggaaagtggaggctcaaggcaatgttcttcttgcatcaattgagaatatgcaatatgctgtttctgtagacgtgcttcatactgtgttctcatcatttggtacagtccagaaaattgctatttttgagaagaatgggggaacacaagctttgattcagtaccctgatgtaaatactgccgctgtagcgaaggaagcattggaagggcattgcatctacgatggcggctactgtaagcttcacctgtcatactcccgtcatactgatctgaatgtgaaggcacatggtgacaagagcagagattatacaattccagctggcgtaatccaaggggcgccacaaccacctggtatacaagccacgtcccctgggtggcaaggtaaccttcaagcagcagggccatatgccccacccggtgcccctcctcaaaatcacagtgccaatggacaagtgccgaactggactcctggcaattcagggtattccccagccccaggaacatatccaggccagatgtactcatctccggcacatatgcagcatcaaggggcttccctaacaccacacctgccgcccctcctggtgctccatcacaaacgccgcacgcttcccagcagatgccgcatcagcatggaaatcattcaggaggaggcacgcccggaactagccaaccgccactgccagcatcatattaccgttaagttggatcttcttttgctattgtacttgacctgtgttttgaactgagtaatcatgtaatactgcaataacctgcggtctgtaactgtgtttagatgtgatagcagatggatacgagtgaggaatacatgaatatgtttggggttttcattcattttaaaaaacggatcagtgttggctcatggcgattactggcaagatcatgattgatgttggattggtggtaatgttctgaacagccgac

SEQ ID NO: 38400 - DNA, 1779 bp, Zea Mays
cccacccccgcgcgcgtcttcctccggcatgcgccagcccccccgagctcgcccgcgcaccaatctcgccgtcgggtatcccgcccgcgagcccgcgcaccaagctccttccccgcgacaagctccctcccccgcgacgcgtcttcctcctcgccctagatcgccgccccagctctctcctcaccccgcaatccccgccgcccatgctccgctctctactcgccccagatcgtcgcccctgttcgcgtggattgggtaccggtcccaactatctccatggattgcgcgtccgcgacaacccaatctcctcccggtctccatggaaggcgcgtcctccccccgtgattctcgattccccgcgtccgcgccccagatccactctcctctctcccacaatccccacggactctgccccgtatcaccaccccggctccttagaacgtgatccactctcctctctcctgcaatccccgctacctcaacccagatcgccgccctcgctctcgatcctcgcccacgctctccatggaaggcgaggccgcgatgctcgcgtggatctatgtagaggctgcgacgctctcccaggaagactactgccagtgctccgtgctccatgcgccgcgctggaacgccaccgtgcggtccatgtcctcgtagtatcgcccagactcgcccatgtagtcccacctgcatccaccgaccaccaagcacactctcactgcagaccagagaggattgccacgaataggtgtgtgcagttctactctacccctgcatcgagccggtgtgcgtccaccagaggccggagttgaaggagagcacgtcggcgtcgcgccatgactcggcgttctcgtagatgtcgtccagcatcagcacctgcttcccctggaccacgtcgatgtccaccagaaggaaattcctgcttgagccaattacagaaggccctgatatttgtcaaattgatggttgtagtgttaaattggaatacaagaggaggtaccaaacggcgcagcagcagttgatgtgcaacccgagtgtactgccgctcgaggaggccagtaagtgccaacaacatgaatagccaaagcagggaaatagggctggcgggggcacatgggtaacttggtcctggagcattggagaaggagcataccacaaggaaaccaacacgcttcttactctagcagagttccttgcttcctgaaggcctcatagctcagattactgggttaacgaacaactcatactttgatggagcacatgaggttcgacattatgtcaggaagcattcgaatcttggtcgtattgtgcttgaagttgctaaggactcgcaaatcccccgccaagcaaactgctagaaatcttttcagaggtggagatgatgaagatgatagtgctgatgccgacacaaatgatcctgttgtaccttggtcattaggtagagtaggagttgggcatatggtgtacatctccggtttgacttgtgccttgagttcaacaaatatgaaagtgctgagagaggtggcatctagaggacgtcatgtcgaacgtgtgaagaatttttttagaaatatgtatatttgtgcgaaactttttagaaacttgactccattttattttctatgttactctcggctttgtttcctatcctttccaatgacttgctatgcatttgcactgtatttggcatgtttaaaactgctacacaaaacttgctatatattttgtccaaaaatactatatccttgttatgattgattgatctttattttgtctgct

SEQ ID NO: 38401 - DNA, 2312 bp, Zea Mays
agggcaggcagaatattacgcacgcgtgttggagtatttttaaaggatctcacgttacatgtggaataacatcaacaaagttgggggggaaatgtcgagaggcaatttttttttggcacagagaaaaaagaagttgcaataggcggagcggagagaagctttagataccttttcggccacccatcatatactctgtctgctgttcttccctataaattcgtcgacctctccatatcacagagagatagagagagagagagatagacaggagagagagagagaggggaagagagagagagagagagagagagatagatgtggtaactcaagaactgttcttatgcatgcagcagccataagcattgctactaggtgccgattcccctcttctttgttttttattcccctcttgctcttctttgatgatgattggctgggaactacatcttggaattccttttttttctctctctcactcgatttctttgtttgattattggccatggtgggtgattcctcgcctgttttatctcgaaactggattagctgcgagtttttttttcttctttcaacccgctgcgttattctaagctcggtctactcgttgcatcaggccaacaatggcaagtggcttccatgaacatggctgtccatgaaaaatcccccgtatgcatgctcggtctaatctcctcaagctagcgaaacgaaatttcctaaaagccggtctggtcctcgaatacagcttgttgcctgagccgctgggagtcctatggagtagtagagttcttcaccttcttctgcgcgcgattactgttagccggcttgaggagaagctggaacgatcttgacgtgcattcagagaatcgatttttccccgtctcccaaggactcctcgtccattagtaatcgattttactgctactgaacagctctttgcgtgcattttctccgagatttctgtggatttcaaatttcaatgcaactgaagccactctgtctctctccctcgctctgtttcgtcagcgtctcctgcacgtgctgtgtcgtttccagggtttcatgcggggcgaagcagctggtctctgccgcctgaacgccgccggaatctgcgaggcctccccgagctgcgtgcgtcgtcggataaggcagccggcacggcaatgccggttccgcttgctccgtacccagctcctccggcgccattcacgccgcccaatggggcccagagccagctcgtctgcaccgggtgccggaacctcctcatgtacccagctggtgcgacgtcggtctgctgcgccgtctgcagcaccgtcaccgccgtgccggctccaggtacgccgtacgcgcatggcatgaatcaatatcaccttcgtcaagaacttgcgagcaaataaacacggcgccgtggagccacatttgtgtgtgcagagctagcagtgcaacactgtccctttcgtctctctgttctttttaaccagttaagaagtagcatttgctgcatccataaagttttgtttgcctttttttttgagatgaaggctttcattcgctacagagacctagctgtaggttccatgatagttcaaggggacaactttggtggtttccctctgaacctcttgcagttctggtgctgtagcagtagttggttactggcctctgaaacgtgaagctgccgcgtgaatcttctgcaggaactgagatggcgcagctagtgtgcggaggatgccacaccctcctcatgtacatacgcggcgcgacgagcgtgcagtgttcttgctgccacactgtgaacctggctatggaagcaaatcaagtcgcgcatgtgaactgcgggaactgccgcatgctgctcatgtaccagtacggggctcggtccgtgaagtgcgcggtctgcagttttgtgacatcggttggaacctcacctggtgcagagcagaagcccagcagctgagctgatagtgtccctgaaagtgctgtgagaccacctatgaaaaggatgctttgagtgcacatgtatagagttcttccctgaagcgattctttcactttcttttcttttgttttcttttgttttcttttcttttttggttcctcctcaccatctccaccccacccgtccacttctgcgttccttcgatggatctcgcgagcccgcggaataaatgagagttttggatatatagctagggcttaacctcgtcgacttgtctgtaaaatcgaatgagacatatatataaacctatgttgttttccttgtttctgaatttctggatgcttctctggctgctctttgatctgaacaatttgta

SEQ ID NO: 38402 - DNA, 384 bp, Zea Mays
cagcgagtctttccgctgcgataaacacaaacgcaacaaaacgttctttcttcctcctcctgttatcttgttccttctcccagtgaaaactgtttgtgtcctcaagctcaagcataccaccatcgccagtctcagcccaacgctctgcctcaacaactcaccttgccgtttacctttttgttctttggtcgtcgtccatagaaaagaatccccatcgtcaggtcatttatccactccaagccagcgtccatgatagggtgaggcaggtatggtctttgggctcatgttgaggtgaatggggcagggtagttgtgggggggaagcgctcgccttatgcttgttgagattcgactgggtgcaggcaaccagaaattgtgcgtcctg

SEQ ID NO: 38403 - DNA, 251 bp, Zea Mays
gcgacaactgtcttggccgcaaagcagtccgcgccatagagttcgctcgaccacggtctcgtcgaactgcgaagttcccttgccgtgcgctctaacatcggctatcgcagattctgccataatgttcacgagcgctccttgctctatttatttcgctatgggcaatttctccatgtttcaatttcgtgctgcttgccccgtgtgcgctcgctcctcatccttcggatttcggcatgttcgcgtttaccgtc

SEQ ID NO: 38404 - DNA, 1566 bp, Zea Mays
gcccggcccgggcccggcccagcccagcgcaggcgtgcgaacacgaagctcccctggacggagctctatcgcgtagtacggagtccacagggcgaggaaagatgctagcaggcgcccccaccggcgatgcgggccccagctccggcgctgggagcaacccacccactcggccacggaggttccccggggcggcgcagccggagatcatgcgggcggcggagaaggacgatagctacgcagcccacgtcacggaggcatgccgcgacgcatttcggcacctcttcggtaccagggttgctgttgcttaccagaatgagataaaattgcttggtcagtccctttactacttgctaacaactggttcaggccagcaaacacttggtgaagaatattgtgatatatctcaggttgcaaccttgcatggacttccacctactcctgctaggcggattctattcattttgtaccaaactactgtgccctaccttgctgaacggatcagggttcagaggccgagttcatgccttgtggcaatgggttcttcagaaatggccttcaatgctgccatatgctcaagattttatacagttggctatccggacaaatctaatgttcttctattttgaaggtctgtattatcatttgccaaagcgagcagctggtattcgctatgtattcattggcaagccaatgaatcagagacctaggtatcagatcttgggtatttttctgttgattcagttgtgtattcttggagctgaaagactccgaagaagtaatatatcgtcaatagctagttccattaatcaaatatcatctggaggctatccatcgactacaggtcggggcatccctgttctaaatgaagatggaaatatcatcagtgacatccgcagtggtaaagctgcagatatagcttctcattcagagacctccaatggcaagagcaaatgcaccctttgtctcagcatccggcaaaatcctactgccacaacctgtggacatgttttctgctggaattgcataatggagtggtgcaatgagaagcctgagtgccccctatgcagaactccgattacccattcgagtttgatttgtatatatcattcagatttctagcaaatcatttcgcacagtaggagtccatatcatacttcactggcgtcaaaatttccagaccatatttcggcaagaaaactgcatgccaaaatggtttcgtatacttaagtgggagaagagtacgagaccatttcaagaggttaaagatcagagagttgcatacgataatttgttgtaggttgaaagtttagattgaattagggaccacaggtagtagaaattatttattggcagttcggatagtagataacttgtattggacaccgatgtgaattttattggttagaacaatgtccgactcgaatcatcgagctatttagcaatatgttgtgtccattttcgtcgcacttataccagcttgtatgttttgactaagttaggtgcaggtatgttactataattttcatttatgtttgagtatagaatataaaatagctgggtggacat

SEQ ID NO: 38405 - DNA, 249 bp, Zea Mays
atgatttcaaataaaaaagttgacaattacaaagtttcataacatttcaagacctacaacttttattttggtggtttttccatccgaggtagtttgaaaagtttaaaattcaaaattcaaacatagttttgcatggcaagatgatttcaaaccaaaacattgtcaactacaaagtttcataactcttcaatacctacaactttcatgttggtggttttttctttcgaggttgttttcaaaattcaaaat

SEQ ID NO: 38406 - DNA, 1886 bp, Zea Mays
atggctgggaggaccgcgcccgccctccctcccctccttctccttcacgcccgactccctcgctgcccctttatcctgggatctcgtcatggatgctaccacgacccaacgattgatatcatgtccaagttcttcaagctgatggtggcttatagtgtgcttgaggttcttcgacctctctataattcccctaagatactggaacaaaagattctagatgatggtacgacaaattattttaggagcgctttgacataatttaaagatcattgcgtctctgcgagctaatcagttctgtgagcgtctccctagccccaatggcgagtcaattgttgattgccatcagatctcaaagatgccaaatcttgcattcaccatagcaaacaagattttcaccttaacaccagagcagtacatagtgaagttggagcaagcaggacaaactatctgcatcagtgggtttatggcatttgacgtaccgcctccttgtggtcctctctgctatgctaaacatatctgtactactcttaagtgtgcaatgagggcgtccaccgagggcatcaccgtgcccccgctcgcccctccacgcccgcgcctgtctgtgtccgcccccttcgtctccccgcaatggccgcgtccctacctcatgtctacgacgacaactagggtaaacatgaagaagtcatcgggctcgggctcggtgtcgttggcgcggagcatcccggagctgtacgaggagaggggagccagcagcctccgggagttcgggttccaggagctccgggccgccaccagcgacttcagccgcctgctcaaggtcggcgaggtggctttgggagcgtttacaagggcgtcgtctgccttcctggcaggcccgccggcggcacgaagttcaaggttatctcattctggcatatctcatttgcctgctgatgaagtgaagcctttggttaaatatgataatgatgaagatgcacactcacctagtggccgtggaaggggtcgtggtggtcgaggccgtgggcggggcaggggcagaggtggacgtggaaatgggttcaatgagtatgttgatgctggttgggaagacgatcacgcccctgcatatatgggcaatggatatgcccgtggaagaggtcgcagtttcaggggccgtggtaggagaggcgacgacgataactagcctgaataccaacaggtcggaggttatttcaagaagatccaattgaaccaaaaaccggaataaaatttccaacatttttggaagacgactccagtccatctgcagcggtccttgttgggataggtttcaaaggcatgagagtgatgagggtcaaaaatctgaacctctacgcttttggtttatatatgcaaccaacttctatccgtgagaagttgggtcctaagtatgcttcatttccaactaacaagctgatggagaaccctgatttctatagtgatcttctcaggaaatgggttcaatgagtatgctgatgctggttgggaagacgatcactcccctgcatatatgggcaatggatatgcccgtggaagaggtcgcggtttcaggggccgtggtaggagaggcggcgacaataaccagcctgaataccaacaggtcggaggttattacgaggaggcacctgttcatgctccagctttagattttcaccatttgtaatggaactgaaaccagcctctcatcgaagtggaaacctttttttagtcgtaaacatttacatggtttatccagtggtatgctgatgaaagatgctaagtttcgcttaatataatgtatatgaaggtcctgtgtacgtcaaattttgtccacattgaaccagtacgaatgacatcttccttgaaagttatagaaatgcttcaaagtt

SEQ ID NO: 38407 - DNA, 5728 bp, Zea Mays
aggccggccaccacctccccacacgtttccctcagaccgagcaaagacgaaaatggcggcggcggttcctctcccctgaccagagccagggcgtgccactgccatgtcgccactgacaaaggcggcgtcggcggcggcggcggcggagtttctcatctcttccggattggatacagggcgtgccatgcctgcgtctcagatctcacgattggcatgcgccctgacttctcgctcttcgtatctccccctccctctcccggcccgtgctagcgtcggaggaattgtattgtcgtagatctgttgctccataaatgccttccctatctgtggccgagcgcaaccaagaaacgaggtatggccggagggagaggtagggctggtcggctggacctggtcggctggacgttgccggactggacttttccctgttggagagggggtagcgaggagggctgccgcaccgacgcgagcacgaggacgccgcggagggccgcgacccgaggccactggcgaggacggactgcagagcgctcgcagcggacgacccacgagcagagaagcgagctgcttacgaagctagatagaggatttggaacggcggcggccggcggacaagcgggctgaaggagtgcggcttgtgggtgactcggcaaggctacgagcttcatcgaacaagaagacacgcgggtcaaggcaatcgacaggattgagaagaaacggtaataccacttctgagcggtgccttccatgctgaacgatgccatccagacgtgtactgatcggccggagtggaagaacaactcacatttgtgcagccagcccaagggatcttcagtgccgtcatattttgggaatccaagcttctgcgctcctggagggggtgggccgtgcctgaagtcagcgccattggaggttttggaggaatcgctgaaggtctgtttcttgtctgctaacacctgggattgtagacggttcacagtgacagagatgcggccttgttctgcttgtggtgtattcacggtgtcgttgagagcgcaattgtactgtccaaggggctctgggtgatgacgggatcctctcctggcgctgagtcgttcatcgtgagaacaggccgaccggcggcagcagaagagaagatcaggcggaaggattgtctagtccaataccaaatgataggcacagggttacgagcagatttggtttggtaggtttcgagatgaagacgagggcaaggtctagcagtgccaactctaggtgtgctgctgcttacactgcgcggtggtggagctggtcatgttggcggccgtgcaatgcaagtgcccgccacgcccgcgtccaggaaggagacagggttttgacaggaaaggaagatgttcgtgcaataacaaaggaagctcgatctgtggtagaaccacacactaacaaaataaaaaggtgatctcccttcactcctaatctattgtccttaaagctagacaataatcccttggtagaggtaactgtaactcaaccttcagtattttttcttgaacgcatagggtaactatgtatcattgtattaagaagatgaaaggggtaaagagccttggaaggtacaaaatggcacaccacacactttctctttttcttatttatcttctagcatgtatttggcatatagatgcagatgaatctcaatttgttaagtctcacggttgatgttgatttatagatgttttaattgttataggattgtcaagcaaagaaaataagcaaaataacctagtatagttctagccattggaagattgaaagacagattgatagtacaaaatgaaagcaatatcaaatttgagagggcgtacttcactgttacatacaaatatatggcaatatcccatcctctcgaacatttcttaacgcaaaatcataaaacacacttttcttgaagatatcatccacagatattgtgtctttgttcaaacttgaagtactttgatttaagtggaatgcttctccactacctgaaccttctacagtttcttaccacagctgcaggagctgtacctggttggcacacatgcacaaacctgggcacatatttaccaatttgttcctggatcacacaaatttatatgcagttatgcattcaacttctatcagtaactcataaatgtcagggaagaggcaggacaaaccttcctaatcgagcatgcttagtagaggtgagagaatgaccccacccaacatagcccaaagcactataccagaatcaaagcgaaggagacatcgtctttaacaaggcgatacaagcatagacatgggccagaagacaccatgtaacagacaggttttttggacatcacactgaattgcagacaaaatatgagaactgaaaacttcagctaacaagagtcttttgaccccaccaaaaatctcagctgaagacttcacttgccatattttggatttcctgacttccaagttccaccattttttttggccttcttttctgcagaatagcccaagaatccaatcagaagcaacaagcaaaaatcacatcagcaggttcaataatgctcctgttgttaaaacaaacttcatttctaagcttccaaatagcccagagaacatcccccaccctgagcgtgattaaatttttaacatcatgaccaaaattactcagccaatcaccaaaaagggagtcaaagccctgaggacatcttttcagatccagggccacttgcaccaccctccagacaaagatagccacaggcaattaaagaagaggtgattagtagattccaaaacgcgacaaaaactcattggatatctacctacaattttctgttaccaaactctcacacgcacttatgccgaacaactagaagctgacaccaccctctcccttacctgatcttgatcagtcataaggcaaacaatgattattagcttatagtatattaagttaataattaatacttacagttgtgaacttgtgatattaaggccctcccagagcagaaagcagcaatatttctgtctctgttaattagcttgccacgtatgtggcatactggcttgtaatttatcgaggagagagaaaaaatttaaagcaatggtttttaattaagaaatcgtagtatcatctgtccaccttccagttgacagtgtcctatgggctcggctgaccaaccacatttgttaatcccttcattactatcttcttttgtgctttacatagataacttctacatgccaaaacatacttcaaagatacatttttagaggtagtgtcttttcctgtacaaaatttcgcaagaatttaataacaagtgatgtacagttcgcggtaaatatgcaaggaacttgaataatgctataagcctataacctgactcagatgatgaggacgccatagccatcttcacaactttccagccacgacaggggctagccttttggcatgtaaatctttcaccgatttcaaatgcttctatggtatgagaaacacttgaaatattaatgggatgcacacttcttcctcgaacacttgggatgtttatgtcagggcatgcaggaaaataatccctcacagacatcattgggggaatatggcatgactgagtgggcagctgtggatcttgctgagtacatatgtgatgggtccgttggctttagaggttttcctattttaaagcacaacacagggacctagagagcagattcattaatgcttggtaagaattcagttagagctttccgctgagaaatagcgtgagcatattttttcttgaaagaaaaccagttaaatcatgtcactgtaaatttttaataaatatacctcagttagaccattgtctgattctgatcgcgtgaaggtttgaatcattaccttacctacttgatagcaacttcggtttatgcttagttggtgctgcgttactgttttgtgttccattgtaggtcaaaaaagccctaagaattgtgaacgttgaggtaactcacaggggaaacatgcgtagaaaatgtcgcatttctggcctcacctcacaagcaacaagagagctatcgtatgtgtgttccattgctggtatgagctaatagcttaaagaataatgcagtgacatgatttgttggtttctctgtgtttctcgatctacgtgggatctttatagaatactactatagtactatgttagccccataggttgagttttttctagtcaatagtaaaagcgaattacatttttcgagatatcgtaaaacacactccgttctaaaatagtagtcgttttagttcttaatttctatgtctatatttaaatggatgaaaatgaatctagacacatataaaacatatacgtcaaatgttgtatgaatctaatccctctgttctaatttaaaattcgttttagctttctattggattcatataataattagtgtatatgtttttatatatgtgtttagatttattatcatttatttgaaaatagacataaatagcaagtgataaaacgaactctattatgggatatggagggagtattaattaactaaaataaatagcaagttaacggagggagtattgaagtgctctctgaaatcgcgactcgttctgcataattggattcttttgtattattagagtttgtgttattaattggaacatgagtataaagaaactcggtccgtccagttatataaaaccctagtagaaaagaaaaccctcatcaaaaaccctagtagaaaagaaaaccctcatcaaaaagacgaatagacaaacctcggtggggcttccggtgggcggcggccgctgccttcttggtattggcctccgctttctttcgtgccgcagcgcaccacaggctgtgagaattcatcgcggccaatgatgaataatactctccttcagcgccacaggcgctgcaggtcgggccagcactacgggccgaggctacaggccaagcacatcatggcgttcttggctcttgcaagcattaggtcgtttatgagaccacactgggtagccttcattagcgaagttgaggcggaggctgtgaaaattgttaggaagtatttggcaaagactgagatgacgaagagcttggagacccacgatggctatattcttatgaaccgagtcttcaaaatgaatgagatggaatactggccatatcccaaggatgcagaggaaggggaagaagattgtttagttgttactgtgaatggtaaggaggttgcggactgttgcgatgataggggcagtttgaaacgaaaaacactatctactggaggtggtgtagaggaaaaagcgaagggatcaaaatctccagatgaaatggagactgcacgtgagtacatttctggtttgagtgccgcggcgactgattttgctgaggaactagcggagactacgggtgaagttacatcgcctgagtctctactggtggcgcatgcgaggtcagccacagtttctgagggtaaatatatttctgatgctactggcgaggacttcgaacaaaataggctagctaaatctctcgatattttccttatggggatgagccttgtggccaaaccacacagcgagccccccaaggtggttgttggtgtggtggaggatccatgggcgatattttgctcgattgttgaaattggtggagacccggggtctgctgcatcaagtgcagttgctggcacgactgtcatgacactgcgaagggttgcagaagatgcacgatga

SEQ ID NO: 38408 - DNA, 2194 bp, Zea Mays
gatagagtcgagtccagcgctcgctgcgctcgtcgccgcgcccctcacctcgagcaaagaggagcgacaatggccatggccgcccccgctttcctcctgccatcactgttccccaagcccactctcctcgccgcgtccctccactccagcttcccacgcggcctctccctccgctgctcgcccaacggcgccgccgtgccggaattccctgaacctgcctcgcgccgcggccgcaaaaagtcaccgtccccgtcggcgccgaagccgagggctacgaggaggagaaccaagaaggcggaccgggatcccgactcggagggcgaggaggagccggtgaagcggaccaaccgccggacgaggaagtccaagggagaggctaaacaggaggaggtggcccaggcggcgaatcacgggacgggggatacgattcaaaaggccaacgaagaggaggatgcggtggaagtgggtagcgacgacgacgatttcgcgaacgagtggccgccgctggtgtgctgcttcggcgcgccgcggtgggagttcgtacccacggtgcgggtgtcggaccgccagatgcatcccgacatgtactccacgtggaggcacctgcaatgggaaccgcccgagttcgcgcgcgcgccggggagcgcggcgagcaacgtggcgattgcgctcacccggctcggcgggcgcgccgcagtgctgggcaaggtcggcgacgacgacttcggccgcgagcttgtgtaccgcatgaactgcgagcgggtgcagacacgtgccataaagttcgacgacaaagcggtcaccgccacggcgcgcatgaaggtgagcttccgggaccgggaggacggcaagggcgggacgaaacttgtagccgagacggtgaagagtgccgccgaggactccctccgcaggactgagatcaatgtagacgtgttgaaagaggctagaatgttccatttcaattcagaagtcctgctaaacccctcaatgcatgacacgctcttcagagccattgagctgtccaagaaatttggaagcaaagttttcttcgatctcaatttgccattgccattgtggacttccaaggataaaacaaaggaggtgataaacagggcgtggaaagaggctgaaatcatagaggtgtcaagggatgagctggaattcctcctagatcatgagtactatgaatacaagagaaacacccctcctcagtattatcttgaaggatttcattttacaagaaactggccacagtactaccactacagccctgaagagatcgctcctatttggcatgacggtataaagatcttgcttgtgacgtatgggacacttcggatccactattacacacctaagtttcatggctgtgtggttgggacagaggatgcactcataactccatacaccactgaccgaacaggttcaggggatgctattgtggctgctgctattaggaagctgacaacttgtcctgaaatgtatgaagaccaggatacattggagaggcaactgagatttgctgttgccgctggaatcatatcacaatggacaattggtgctgtgcgaggatttcccactgagagtgccacccagaacctgaaggaagaagtctatgtgccttctatgtggtgaaatgataaaccatttgtgatgggaatgaacaaatatatgatacaagcatacttgatgaatggtctaacagaactgaacaagggggttttccttttttttgcgacaatagagctacaagagcaacttacatgcactaattggtctatggttgctttagttaggcggcagacaggtaggagtttgtgcttcatattgtccgatgaacaaggaatctttctatcatctggttgttctgcgaagggttccgctgtacgtacgactcatttgtacaacgccttttcaatcaacggagaaccaggatacaaatggcggaaaatcactcaaatgtactggttcatttgccaagaacgcaagattcatctggttgtaccggagatgtactttaggtgaagtatttccctttctgtcaatgtgatctgtgagaaacacctgtccctacgatttagcctgtggtttgtaactatgctgtgttttctgtggttactgcattctaacatgaatttacagaatgatttcttttcacttaaaagttgaatttcaaattcataatttataagat

SEQ ID NO: 38409 - DNA, 211 bp, Zea Mays
tcacatctttactatataataggagttctatgcaaaataaataaataattacattataaggagacaacggtccagcaacccaaagttgactgggagacgacggcatagacctctcacgaacacatcgcagcatcctccatgcgccacatcctgtggtacctgttcttgacctgtgggggctgtgagacagcaagagtgagctcacatacgt

SEQ ID NO: 38410 - DNA, 1769 bp, Zea Mays
gtctgttctacgccgtcgcggtcacctccagccctagcgccatctgctctgtacccccaccgctaacctcctcagctctggcctgcccgcgctcctcctcgttgcctggatccggcagcccctccatgctcatccgcccctttcccgctctctcctcgaccggctcgctcccgcttgcaaccacccacaccctgttctgctccagagacagtcctggcggcgctgaaggaggagacgcagcagcggatggatgacgcatcgattggaggtcattggtggccactcacgcctcctcagacctcaccctcacttcgtcgtcagcgcaggtttggccaacggcccccgaccggatcgcaggtcctcctcacggtgaggcacagagtcgagccggacatcacaaccatgaccatgaggcatcgtcgcagcagtcggagtcatttttgctgccccctcccgacacctgtaaattttgtatgccttcacgccgtgaagccacatttgcggccattggcaatggctgtatccactgtttcgatccatatatttggtgatgtcccttcttcacctcttgttgggctgcttcaggacaaaatcaataactggagggagacatctcttatattgacatccatccttttcgctgcagttgtgttctggttcattggctggttgaaaggctaccacaagtggtacttggaagcgaggagacaaccacactttcacatgctaggatgttgttggctctgaccttttatgctggtccctagtttctgataaatcatcttcactgttctcctgtgagctcactctctcttggatgtcctcgacatttcttacatagatatatggttcccctgttgacttttaatttgattccttgtgtggatctgccatttttctgttgactttgaaattgattaccctggcaggtattgctgctcgtttctttgattgtttgggtttatgcataggtcatagctcacagttttctggttccatggacaagctaattgtatcaaagccactatctatcgggtatctttattcagttgctgagttgaagagtggcgcctattctaaagatacaactaacatatctctgcatgccacgtcaacatttgcagcctccaaaatatctgttatccatgataatgctttgccaaattcattacttggtacagttgaatatgagttgccccatgtgcctccatggtttattcatgctggtatccagaagctttatggggttcttgctggaataattagacttgttggcctatcaacagtgtcaggaaccgggccatgttgatgttcaaaagagttgtcagaagttcatgacatctggtatttattatatcttcttttgtagtgggctggtgtggtctgcttagcagcaggtagcactacaaccagcaatgtatggatgaattgaaggtagtaaagaacgcatgcaatcttatagaaactctacatcttgaaactggcatgattgacaaagaagctggatgcatcctttggattggtgtcttcttatcatcaagcagtaatgtgaagcaagttcatttgttgactaagaacagatgagcacaaatcagtgaagagttcattgcactagagatggaggatggataggtggtagatttcaatatggctttgatactattgtttctctttacaatctttgtacataacaagaaaaatgacgttgtatgtggatactattgtaattcaagaatttatttctgaataataaatatatttgtttataa

SEQ ID NO: 38411 - DNA, 1740 bp, Zea Mays
aacagctaccgactgggctattatttctccccgcgtgctctctctcgccgactaggctattgccgccgccgccctacaccagatgcccagttcttcgtcagccccttctccggcaacgagcacctaacagaggctgcagtatattctgtgagaatggcatggggtcaaggtgctaagaggtccatactagggcttctctttcgttctcagcaccaaactgctcgggcatactcttcttcagcattccagactcaccaattgagcactcatgttccccaagatggagtgtttattaggagattcggctctgaggtgtcttcttcagagcaaatgaaccttattaagcaactcagacaaagaacgagtgctccaatcaaagatgtcaaggcctctctagttacctgcaactgggatattgaggctgcacagaaggacctaaggaagagaggtgttgctcttgctgccaaaaagtcttcacgcactgctgctgaaggtttgctagctatcgcacaagatgacaaaagggctgctgtagttgagcttaactgtgaaactgatttcgtagcaagaaatgatgttttccagtacctggcttcatcattggcaaagatggctttatctgctcagggtcctggtgaattgttcatgccttttggtcctgagcttttagagaacatgcctatcaatctagatcaccctaagctcagtgtggaaacaactgtccaaagtgccgttacagaagttgctgcaatggttggggagaatgtgaaactcagaagaggcttcatgctttccacaactgcacatggtgttgtttcatcttatatgcatacctgccctcagccagcttcaggtatgggtcgtatagctggattggtcacactagaaacagaagacagcagtactcttcttgattctgtcaaaagtgttgggtcatctattgcgatgcatattgttgcggcaaagccattattcttatcaaaagaactggtttctgcttcggctttagaaaatgagcgtgaaatacttcgaactcaggcccaaagttcagggaaatcccaaatggctatggataagatggtggaaggacgattgaggaagtactttgaggaagttgtgctcatggagcaaaaatatgttttaaatgacagcactaacattaagaccgtgctgaatgacttgtcgaaagaggttggttctaaggtaacaatcggtaacttcatcagaatggaggttggcgaagggattgagagaactgaagccgctgatggtttagaggttgctggtggcgctatgtagattccaggcagagatggttcgaacgagatcattaggatctatatgaaggtgtgggctaggacggagataatgtttaggcaggcactagcgttctgggacctgcgaggctgcctagttgatttgtcagttcctagcttgtttggttacagttttggttgaaccctctctgattgaattacagttcgtgtggacgtataaaaaatcgaaatagagtgggaattgccccttgaactttttgcactgagtctggagtgaattagtgttagtgcaaagtagttgttttagctgtcatttttgtattaattaaactttgctagaatgacttgtgagtttgtaggataccttttgcaggctattcacccatcttttgccatctaggtactatcgccatgctaagggtatttggtttctagggactaatatttaatttctttattttat

SEQ ID NO: 38412 - DNA, 1099 bp, Zea Mays
cttccacaaaccccataaccctagcaccgccgccaccatgtcctcatctccatcttcagtgaaccgccgtcccccgggcccgctagcgttggggctggagtccttggggaagaagatcagcatcggctggtctccgtcccgggcggcatcctctccatctcgtgtcgcacctacgcgaccccactgggccatggcttctttccccgtggtgcaggtcttttcggtcctcaggcttcatccctgtgcaagtgcagggataattgcttctaatctcccgaggctgcataacctaattcagaggcagagcaagggggcgtgagggagatgagggagatcatcagcatccatatcgcgtaggcaggcatccagtgacacctctgtcgggatcgcgagggatgcgttcaacacgttcttcagtgaaacgggcgcagggaagcacgttccaagggccctgtttgtcgacttggagcccactgtgattgacgaggtgaagaccggggcgtaccgccggcttttccatcctgagcagctcatctcacacaaggaagatgctgcgaacaacttcgcccgtggacattacacaggctcaaaatgttcttggaaacaaggggactgaaattgcaaaggtagcacatcggcgaactgatgcggaggcgggcgtggaggcgctcgatgccgtccagcaatcagtagttgtcgctgcatcggcgacttctttcccccaccagcatggccgcgtgaatggttcagttctttccaaagcctacagcttctaggaaatcggatacgatcacccgaaaaaggcaagggggaaatcttcttatagatctgttccgtcattgtgacaatcatttgggagagaaacaagtaaacaacccttttttccataaaactccatctggaagtgcacgacagccactacagttgactaccgatgtaaccaagatgatgcaaaagcatcagctggaaacgccatagttgctgctactgagacttctttagtgatcttttggtacatcgctgctgatacaaacagcctacccagactgcttttgtgaagggctcctagcttggtgtttctttttctgtgatacttgtg

SEQ ID NO: 38413 - DNA, 1218 bp, Zea Mays
atccgggtccgcgcattgcactagctccccccaggctctaccagaaccgccgccgtttctggatctctcgacggcgagcagcgactcgtccggtcgtccctcagcactgtgcttggcggacgcaggacaagacacaggatgagggctgtggtgcagcgcgtcctctcggccagtgtcgaggtcgaggggcgaatagtgtctgcgatcggccctggactcctcgttctcgtcggcgtccacgaggcggacacggactccgacgccgactacatttgtcggaaggtcctgaacatgaggctgttttcaaatgacaagactggaaaagcatgggatcaaagtgttatgcagcgtaactttgaagtgctattggtcagtcagttcaccttatacggcatcctgaagggtaataagccagattttcacgtggctatgtcacctgcaaaagcgaaaccattctatgcttctctagttgagaaatttcaaaggtcatactcggctgattcagtgaaagatggtgtttttggagcgatgatgaaggtttctttggtgaatgatggccccgtgacaatgcaaatcgactcaccctcactgcaaggtgctgctcagtcaagcaatggttatgatgatttggttgcggatggtgaagcaagagtagctaaagagacgtgttaaaattctgggtctcttgctgacctagggtttagggttctccatcacatctttctcattcagatttttttggtgcagttggatctgaaagccctcctgctgtgcacttgttctagcgctttgtcattgccagtcagttacagcactgcttcagtctgcggaggcatagccttttgcgcaaatgacagaaccagacacattctctagactatatttgtcatcttattcatttttctactgcggataatactcttatcaatatgggagctacacatgagcttgtggcttctcaacaatgtagtatctagggtcttattactgaattagcaatcttcagtacatctatggatgaagttcagctctggtctatatatcagctgaactgtctctgtctcctacttgagcagaactcaaacaaccaaaaatcaatacttgggatcctctttcacccgagttattacttgttagcagcactgtagcagctagtgtcacatgcagcagagacaatgcagagatgccaacatgactgaaggataattttcttttgca

SEQ ID NO: 38414 - DNA, 4920 bp, Zea Mays
aagtttggaacgaattttaaaaaaccagtggtttaaccggttttataaaccatggttgccagttgcctgagcctcacagcgcgcgccaccaccaccgcgccatgccgttctccgccaccgccgccggcgcctccaaaccctaaacccgccgcagcaatcaatggcgtccctcctctcctcccccgacgattccaagtcgctgtccgtcaccacctcatcgctcttcctctcctccatcgcctctctcccctcttcccatgccttctccatcttcacctccgcctccacgcctcttccccctgtcccggtctctgtgcctcccgccgcactcatcccgggctcccgcttccttgtcgatgccttccgccatgccggaaacttctctgtcgcctacttcctctcgcacttccactccgaccactacagtggcctcggcccttcctggcgccgcggccttgtattctgctccgcgccaaccgcacgcctcgtctcatccgtgctctctgtcccgcctcaacttgtcgtctccctcgatatcggtgtccgtatcaccgttgatgggtggggcgtcaccgccgtggacgccaatcattgtcccggtgccgttcagttcctcttcgcctctcctgggccgagagccgagagatatgtgcacaccggtgactttcgttacacagagtctatgacgcgtgatcctaacttgctggagttcgtccgtgctgatgcggtgtttctggacaccacatactgcaaccccaagtttacattcccttcgcaagaggattctgtggattacatagtgaatgcaatcaaacgtgtgaaagaggagagttcagtatcaggagagcgtgtgctatgtctgatcgccacctatgctgtcggcaaggagaagattttgctggaggtcgcacagcgctgtgggtgttcaatccatgtggacagtaggaagatgaagattttgacactgttggggttcggtgggaagaatagcgtttttactgaggacgcaacagggacggatgtgcatgttcttgggtggaatttgttaggggagacttcgccctacttccagccgaattttgtgaaattgaaggagatcatgatggagagagggtatgctaaggctgttgggtttgtaccaactgggtggatgtatgaaaccaagaaggaaggttttgctgttagggtgaaagattcactcgaaatccatcttgttccttatagtgagcactcaagttacaatgagttgcgcgactatgttaagtttttgcacccaaagagtgtgatccctactgccggagtggatgctgggaagctcgatagtaaggaggcagttgctctgcagaagcattttgctgggttggttgatgagacagcaaacaaacaggagttcttgatggcattccatcgtaggtcaatagatgctactcgtagctgcaaagatgtggttgttaattgctcgagccagcttgatggggaggatgctgctttgttaccagcaatctcttctgcttctgaacaacaggataaactgatggagaatactatgcaggaaacacttaaagaactgtcagatttcttaccctcgtgggtgagccaggaacagatcacagacctgctgatgagttctgaaggtgatgttgttaaagcagcatcgattttttttgagcgggaaagagatttctttgaagaagcaaatgtttcttgtaatggcacacccaagacagagaaaaaccattcttctaatcatgggtcgtctgctgatgtaagtagtcagcaagaatcttctttattttcacagaagcctgtggaatactctgcaaaactggtaaatttgtctcctatgagaatgaaaccaaatactcccaaaaaggtaaataagaggggttccagcaatacaaacaagccaaaaaagaaaggccgattaacttcctcaacagaatctggtgggcggaagcagtccacaattacaaattatttcattagagctactgaagctgcttttaaaaggtgtagacctgaaagagtaactgtggaggcacatcaaaataacgtggaaaacagtgatcagttagctgatactgaaaaaacacaagatcagattgtagaccagcttctccagattgtagatggtagcatgtctagagaatatgcagtttatttgcttgagaaggcaaacggagatgtggctgtagcagttgacatattttacagttcaagtgagggtaataatgtaattgaggttgacaagaatattatgctgcagaatgcacaaggtgaaactgcagataattgtagtgaaacagacatggctagtggttattctcaggctactccaaaaatgtcaaacttacatgtaggaacttctttagcacatggagattctgccaacacatcactgctaattgaaaagtatctacctattgaacatgcttgctggatagcaggacagcctgcaccatacttgcatttggctcgcacatttgacttggttgaaaaggaaaaaggaaagatcaaaactatcgcaatattttgcaacatgttcaggagtttgcttgctttatcccctgatgatgttctacctgctgtttatctatgtactaataaaatttctcctgaccatgaaaatatgctaggaactgaacattggtgggagtctagttgtaactactctggaggaatcattaggaaccagcagatctaaaatacatgaaatgtacaaaacttacggtgatcttggtactgttgcccaagaatgtcgtcagaatcaaacactaattgctcctccccgttctctctcgatttgtgatgtatattccacgcttcggaaactaagtgcaatatcaggtagtggaagtgctgggaggagaaaaaatcttgtcttgcatctgattcggtcttgtagagaaacagaaatgaaatttcttgtcagaacactggttcgtaacttgcgtattggggctatgatgaagacgattttacctgcgcttgcacatgctgttgtttttgatagaaactgtgcagcagatcctgcggtgtcattggaaggcataaaatcacaactacagagtctttcaactgaagttgccgaggcatacaatgtcactcctaatctagatttgctcattccttctcttctgagagaaggcactgcattttcagcttcatccttggcaatggtgcctggcacacctattccacctatgcttgcaagaattactaacgggttgactcagtcgttgaaagctttccatggcagatcatttacttgtatgatggtcagcgtgcccagattcacaaagcacttgatggatccgtgcgaatattttcaaggcaaatgaaagaatcaacttccagatttcctgatcttgtgaatatgattaaggagttgtgcaagcccgaagtgtcaagctttatactggatgccgaggtggtaggaattaacaggaagaaaggaaatgagttgatgtcgttccaagagctatcttcaagagaaagagggaataagcattcctcaatttcaatagagaacataaaggttgacatttgtgtgtttgtttttgacatcatgttccatgatggagagagactactggattgccctcttcggcaaagaagaaagtacattcatgacttgttccatgagaagccaggatattttgagttagctcagcagctaaatatagaagcctgcgaagcttcaccagacaattctagcactttggctaggatggacacgtttttcagaaatgcatgccagtcttcttgtgagggtataatgttaaagactttggatgtcgatgctggatactctgcttccaaacgctgtgattcatggttaaaggtcaagcgtgactatgtgcaaggcttaggtgatagccttgacttggttccgattggtgcatggtatggaaacggacgtaaagctgggtggtacagcccttttctcatggcatgctacaaccctgaaactgaagagttccaaagtgtatgtcgtgttatgtctggtttctcggatgagttctataaagagatgaaggagttctattcgggggaaaggatactgcccaagaagcctgtttactacaaaacagacgagcaaccagagctgtggttcaccgcagaacaaatctgggagatccgaggtgcagacctgacgttgtcccctgtccaccatgcggccattgggcttgtccatccatcgcgcggcatctcggtgaggatgccccggtacatccgttcagttccagaccggagcccagaggactgcggcacggccgccgatattgctagcatgttcaaagcccagacccggaagatggatgtcagcagcgagggccaggagtagtaggcaatgcaaagctcagcccatttcctcgtcctagctttgcttatgttcaccagttctgtatatacacagaacgaaccagggtgaagtgaaccaccctactgatcaaatggtgaaaactgaagcgtaggacaggcagcactgatcccactggctttcaatttttctttgtacagaaactgaatgcagttggaacgcggaaggaagcccacgagttgcacgttcggggggaaaaaaacaatgcataagtacatcaggtatcagcttgctttgtactacagcgcgattattgtaacgcccgtggccgccggcgagtcagccgttgacgtgagcacagatttggtgggaagcgccggcgaggattgcgtcggcctgtgcgcgttcgtgtttctgaatatctgaatcgatcgtctattacaagtctcaggcacttatgtgctgttacacggatacaagagggttaacgctaataactcgaatacgccgccctaattcgaagacgtcttcccgtagtacgccatctttactgttcagctggagcactcgttacacctccggagatgaagcttgag

SEQ ID NO: 38415 - DNA, 3065 bp, Zea Mays
gatctgacacccctcccacccaaccttgcttcgctcccgcgcctcccagatccgatcttcccatgcctcacttccgctgatcccactgccgccgcggaccgccgcgatggcgtcgcgcccgcctctccgcaccacctccgtcgcctccgtctcatcctccaccgagtcccccacctccaccggcccccccggcggcgtcccgcagtccatcaccgcgctcctcaacaacccgctcccctccgccgccgcctcctcgtactcctggttgtcctggccgcctcccaccatcacgctacccgatgcggctccaccaccgccgtcgcatccctgcgaggtcactcgcgccgacttcgcgccctaccttgccgctgtctccgaccccttcgcgcgcttcgccgacatccgcctccacgccagcgccgagctcgccgccgcctctgacgccgagggcgccccagcggtctcctctggcctcgccgcctgcctccgcgaggtgcccgcgctcttcttcaaggaggacttcgcgctcgaggacgggcccaccttccaggtcgcctgcccgctcgatgatgaagcgctgcaggagcgcctcggacagcaccttgacgtcgttgaagcccaccttgtgcgggagatagcgctccggtccgagtccttctacgaagcgcagggccggctgcgcgggcttgatggggagatagtcacgactgtagggaggatccgcgagctcagagaggtggtccgggttctcacgggggacctcgtcggggcagcgaggcaggtgcaagagctcaatgctacccgaggcaaccttgtgacgctgcagcagaagctaactgtcatcctgtatgtcagccaggcgcttaccgcgctcaagctgcttgtcgcagcagcagattgtgctggtgccctcgatgtcattgataacttgcaaaatctgctagatactgatgaacttgctgggctttattgcttttggcatattcgagatcagctgggaacatcactagattcagtgaacagcattctttcagcagaatttgtgcatgctgctgttcctgatggaaaagctgtagatgttatgattttatcaactgtgaaaagaaaggcttccagcccattgaatgggacggaccatgagggtaatgtagatgaggaggaaagttttattctcagggatcgactcctccccctcattatttgcctactgaggacggttagttctatcattgtcttacattctaattaccttttttttgtcaaggcctggggcaattgcagatgactagatgagtccttgtctaacatgtttattcgacaaacttcctgctgttctcagaatttaccgggatacacttataactgttatgaaagcttcaatcaaaaccacagtaggagagttactcccagttttaactgccagaccaatagattctgactcagtaactggagacagagctaccgatgctgatgctggaggccagtccttagcaaataagttgcggagtctttcatctgaaggatttgttcaacttttatctgccattttcaggatagtacaggtacatttacagcaagcagctgaagtgaaaagaatagttgagtgggtcatgggaaaccttgatggaacgttaggtgttgatgctagtaatcctacgttacaacatggtggtacagttattcctgatacccaagaaaatgactcttcaagaggctctaatactcttacacggagtacttccaagatcccatttgtccaaggaaaaacaaatgatttttccattataaattcgttaaagaatgttcgggctgatgtcttgagagagaacactgaagcagttttcgcggcttgtgatgctgcccatggacggtgggctaagctgctaggtgttcgttctgctttacatcccaggttaaggcttcaagaattcttgatcatctacaacataacagaagaatttatagctgctacagaaaagattggaggcaggttgggttacaacattcgtggaatcctacatcaacaatcgaagcaattcgttgattatcagcataatgttcggatgacaaaaatcaaggcagttctagatcaagagacgtgggttgctgtggatgttcctgaagagtttcaagcaatcgttctttcactttcatccacttattcttctgttaatggcatggagatgcctagcactgatgataactcaaagtttagtgatcatcggtctacaagtcaagaaccgacatattcagctaaaaatattgctgataatggcaaagtaacatccgggactggtgaaaacaaggttgaattcacttcacagactgaaaataatgttgccgggaatctaaagtccaccttgcaaacgattgtacatggaggtgttggctatcatatggtaaactgtggtttaatactgttgaagatgttatccgaatacgttgacatcagtaaatgtttaccatcactatctttggaggtggtccaacgtgttgtggaaatattaaagcttttcaacactaggacttgccaacttgttctcggtgcaggagccatgcaggtgtctggacttaaatcaattacgtccaaacatttagctttggcgagtcaaatcattagttttatgcattctttaattccagatatcaggcgagtacttttcctgaaaatacctgaagcgcgcaaacatctgttaatgtctgagctggatagagtagctcaggactacaagatccatcgagatgaaattcacaacaaacttgtccagataatgagagagaggttgcttgcaaatcttagaaaattaccccaaattgtggaaggctggaatggcccagaggataatgacgtgcagccgagtcaatttgctaaagctgttacaaaggaagttacctatttgcatcgcattctttcccaaacattgcttgaggttgaggtgcaaacaatattcaggcaagtggttcaaatattccattcacatattacagaagcattttcaaaattggaagtcaatactccctctggcaaagaataggtatgctgcttatttgtgcatcttttagca

SEQ ID NO: 38416 - DNA, 385 bp, Zea Mays
ggaacaaaagcctcataaagccagacaacagtcttcacaagtaaatctgatggtaattccaaatgtatagctaatcatcacaggctcaactgtgaacacactactttataattttgaactgcaatgatttaagagttcatggaccaaaaaagcaagcatcaacaaaaaaaggtgccaacaaggctgatgaaacaaaatctgccagcaagtgcaattcaattaattctgaaatcaggagagggagctcttgacacatcattacaacacaacccagaaattgtacattaaagacaaaaagaattaaattgtaaatggctgaggacaacaagacaaatcgtatggctcggttcaaatggatagtcggcatacagatcaatctcttcta

SEQ ID NO: 38417 - DNA, 300 bp, Zea Mays
ggaattgggagaggagttgatcactttggtgtgtcttgtattgaatgcttagctcttgtaagtagttggaaggtggaaaacttggattccttgaatgtgggggtggttggggtatttatagccccaaccaccaaactagccgtttggtggaggctgctgtcgcatggcgcaccggacaatccagttatagggtcgagatggcggactagaggggggggggggtgaatagtcctttctaaaactaattacaatggctaacacaaataaatacggaattaaaactattttggtttagctaag

SEQ ID NO: 38418 - DNA, 341 bp, Zea Mays
gcatacctggtgattatgttcacgtccgggtcttggtgccccgaaacccgggtgtgacagcggcgccccctgacatgcgagtagcgacagtgccactcgaggagcgaggatcgagcgcccactgaaggagcgaggatcgagcacccactaaaggcgcgaggtgcgcacagcgatgatcgcgcgtgacatcctccgatccggcgcagtttgggtggcccaagtgatgacctccatctattctcgtgtcgtcgacgatgtcctccagcgactacctcctccgattcgtgttgtctttcaattattgtgatttatgcctaccgcatgcactatttacactaaaa

SEQ ID NO: 38419 - DNA, 921 bp, Zea Mays
caatctgaagcaccctgttcgcaaaacctctcctgctcctgccgccgccgccatggagagtgcgccgcaaacccccaccatggcggccgccggcgatgtccttcgcgtggccgacctcccgggacgaggtcgcggtctcgtggccgcccgcaacgtccgcgagggtacttatgtgacaatgagggttgttggggtatgcttgctccattgccaccctcaccaaacggcgacctgtcccatgtgtttgaatgcaatctctgtgggaagctgaggaaggaagaggatgtcattcctgatgagggcacttctggcatggtccattagtttgatgaaaacatactgatccgtgtgctgcttcttttagtgggagtcagggaagtctgttgtttaaatctactgactgaagtatcccagctccaatgagaggccgcataataaaaaatccaaaagagtatgaacttacgacatgagcctttcaatcaaaggggagaaagttggaagatgatgtctagccatgtaaagagaatgagaattggccaatgtccataactcttccaagatttgagccagagggcagggggtgggggtggagttaaagagttcattgctggcaaaccatttagccttaggggatgatcattgctgctaatctccaccttaatttagtagtgttcatgttaattaggctacaaatcctgtggcgaaggtctaacacaagcttggataagtaagagaagtgagtgtcaaaatggcacattatttcatttttagtttcatggagatacccagtttgagcagtatctaggtacgaggagttacaaatttgtttatgttatgtattgtgctcttgcgtcatactgataagagaaccgtgatgacaaaatccacctgttttggtgtttaccttgagccttgtaaagg

SEQ ID NO: 38420 - DNA, 1156 bp, Zea Mays
ccaccactccgttccatccctcgcctgccttcgcacgggtgcgccgcccgctcgacggccacgccacgccgcggcgcgccgctcagctgccccggcacccgcccttcctcgccgagctcgggatcgacgtctcccgcacctcctcgcgcccgttccgggctccgcatccggcccctccccgtccccaaccccattccgcagcaggcgaccagcacaacatcccgaatcccccacctcgcattcggctcgccgtagctcctcctccgcgtcccgccgcccccggcacggccactagctgggtatcaaaacattgggttgccaaacaagctaccttctcagattcagatcaatagcttctcaggtccaacaaggggaagggaacggtgctgataatgcaagtgctggccaaaaaaaatggcgctgtggagcatctgaaacgctgcttcccttggctcatatgaatgtcagtttaggccttaggatagagcaaagtagcataatctcaagcacaagtttactatgtctgggatggcatttgatgattcacctgcccaagtgaatgttgaaggagatgtttcagagaaaaaagtagaagttcaagaccagaatgaagtgggtgggatgccctcacgacaagaggaggaggcagcaattaagaaaaagtatgaaggaatattgcccagaaagactcctgcttatatctaaggtatagcagacaaatacagaaaagggctggcctggttaaaaacggttcaggttagcaagcatcatggcccgtatccagaaggtagcttcacgtttgagagaaggtggcttcgaacgagacctgatcgtttccttcgtcctgggcgacttggctggctcttgctcaatgggagttgacaggacagatcacggctagccagtcaggttcgttgtgatgagatccagaagcaagcagcatggctcgatgtgatgagctgtacaagaggcgatgatgcgttatcatctcaggcagatttatatcggaggagatgaatcgcgttcgcgtggctcttctctcggttctgttttactgatgtaaattttagcttatttttaactagaggaacgatgtaagtttaaccagaccaataaaacaaccgtgtatgctctgcttccaatccagctattagct

SEQ ID NO: 38421 - DNA, 1051 bp, Zea Mays
aaaagactctcgcgaaggagcaagccaccagaactttttaggcaccaggtgaggctgaagcacagtgtgcagcactttgtgaaaatcaccaggtttatgctgtagcttcagaggacatggacacactgacttttggtgcccgaaggtttcttcgtcacttaactgaccttggttataagaaatctcctgtgacagaatttgatgtgtcaaaggtatcggaggacaaagagccttgaaactcattcgtcagcatggttgcatagaagaagttctgcaaaatctgaaccagacgaggaattccagatttcacgtggacctcaccagatccagagggccttatggatttcttgtcaacagaaaacagtttcagtcctgatagagtaacaaaggcagtagaaaagataaaggttgctagggataggtattccccaggcagaatgaagcatttaacaccagttgctagcttacgaggatctcatactgagaaggaaccccagtgcatactaggttctccaggacaaactctgaaggtcatgtcatctccacaagtatgcaagagtccaagctctggtttcagatatggtagctcaaagccatttatgctgggcagacagtcaggatttcatggaatgccttatgctctctcttttatctaaaatctgtagctgctctggtttatgagaaggttgaccgaagctgtagctgcggctacatttttagatgatggaaaccgatatccggctttcacctcactgggaggatatggccaagtagctgtagctgcagctacatgaaaggatgctcacttataatatgttaatctcgtgctactattgtaatctttccatttctattgtaacgtagttaatcagctactgcagttcatcgttgacatctaatgctggttgctgctacaccggttgaccttaccttttgtcaatatattctgagttttcgggatggtgtttttaaacctatgctgagagggtaaactggcagaaatgtcctcgactttcatgtgatggcattgtatgcatcgtgtgcttaccac

SEQ ID NO: 38422 - DNA, 2990 bp, Zea Mays
atgacaggtgcgaagcttaatggcaagattactatcatccaggatttaatcagatgtgtacagtcctatccggagtttatggcggttccgacgaatgaggctcctagtcaaggcgctgcttcttcctccactacttcaagcacccagggctttccgctggctgatcttgtgggcaagaaggaggacctcgatgagcttctggacctcctcgtccggagacccgacaatgagctggacaaggtcctcaaggtgatggtgatctccgtcgtcggcttcggtggcataggggagaccaagctttgccacacagtgtacacggacgtacaggagagcagaaggttctccctgcatgcgtatgtcagcgctgctgggaaggactgcagcatcgttctggaagagataatcgagcaatttagactgcaagaggatccacaagatagcagtggtggattttttcacaggtattttgtggtggtggatggcgtggagtctgaagaactggtgagtggcatagcatctgccttcccggataatagtatgggcagtagaattatcatgggtatgaggaccgcagtgggcagggatgcagagagatgtgtgggtcatcatcacaagatgtggccacttgaagacaagcagtcggtggtgtgcttcctaaatgaagcggagcggcggcgacgacgacatgaacaagacgaccactcgtcgttcattaggtttcaggaacaagaccactcatcatcctgtttgcacaaggtatgtgatggcgtaccacttgcgctggttagcgtatgtgaagtccgcagagggtccatcatcactgctgccgttgaagaacaagaccgctggccacacagaatgcccaaggtgctcgaccacagctacgatggtctgcatatccggggtgctgggagctgtccgaaccaatacatcccctatctccaagcctgcctgctgtactttgccatgttcccccgcggcaatcatgtcaagaggggatccctgatcaggcgatggcaggcggaaggcctagagttcggaggcagcaatcaagctgccgaaaacctcaaggccctcgtagaccggaacttcgtttggcccctccatgcgagcctgaatgagcacgccaagacattccagcctcctggagtggtgctcaactacatctcccgcaggtctcaagaggaggaattcatcctcaggtcttgtccaagtggggaacttaatcccaattacagccgccggctttgtctacatcctgccgaggaagaagaaggtgaaccccaacccgtggtcattaccaacggttctgtaccaccacgcctgcgaactctggctgtgtcctgggggcagcaacaggccagcaggattgctgaatgcgagcagctccgagtgctggatctggcgtcatacaatggtctacagccagaccagctagaggagatatgcaagaaactgaagcttctcaaatatctgagcctcctgccagatatcatcactcaagttccaagctcaatgtctaatttgcagtgcttggagacactcgaggtgggggaggtcaatggcagggcggcagttctggtgcctatccaagtcttggaactgccacgcataaaacacctaatcggaaaatttgagcttattgacaacttcaacggactaccaattagggcttatccagatgcactagtaccaaaggcaatcaaggaaagcaacctggagacggtgtcggggttcttcacccgcagaggccaaggatttccgccactcatgcgtcacattaggcagctcaggaaggtgaagatatggttctacagggatgcagaacccaaatacctagcaagctatctcccgaaagcgattacaaaattcctcaggaatgacaacgttcatcgctccctgtcacttgacttccaggatggcccaagacaaacagaaatactgcaggcttgtgtggctgaagctagcggtaatctttactccctgaagctgtcgtccggcacaaatctgagcaggatccaactgtcggttattgccaccaacaagctgactggaatcacaaagctatgcctttcccgctggaaaacgataacgttggatgcagaatttctgaatgagctgaccaaattggccagtctgacgtatctgaagctggatgcagaaacaataaaaggtacgtacgaccaaaacccaacaccaggaggaaataaccaagagaaggtcgtcatagagactgggcacattgcaaatctgcggcggatgtgccttgtggccaggcagacgctgcccgacatacaagtcaagcctacagctctgcaacgactcgtttcacttcatctcatcagtgaaacggacgattattgtccttccgccaacgtcatctgtaaagccaacccccaggacgacaacgagccggcgccgttcacgagcctccaggaagtctcgctgaatgctacggtacccgaaaatttaagggattcttggcgtaatgctgcaagggaccatccaaagaggccacgaattctcttcatccaacaccctcaccgtgcgggataacccgtacctatatgttcttcgtttgaaacctccaagttcgatctgtcactttctccacgcagtgctcctgcttcttcaagattgattcgtctccttatatattatacttgcctccaccttcattcaaataatgtttgattgtattctttttgtatactgcggttttgtatccgttgaggtaatttttcaagctgttgagcactaaaaatagcacgaacggtctggccctgaggccggacggtccgtggtcctgacggtccgcgcctgtgggccggacggtccgctcaagcgcagaacagattatggtttcgagtttcttactatgtttgttggcgagaatatcgagataagctcggaattttgttggtaacgggtacagcccccctcctctataaaagcagaggaatacatgcgatttaattaatcaatcgaac

SEQ ID NO: 38423 - DNA, 1530 bp, Zea Mays
gtcgctgctcgcttcgcatcaaccgtatccgcttcttgggaaggctccatgcctcgccccgccgcaacaaactcctccgctccacacctctcaccaagaccgccccttccctgcccgcacacggcggcgccccaatctctccaccacgtgtgacggcgacggcgccccatccctctccagcgcgcgtagaggcggcgtccctccctctcccgtgcgtggcggtggccggatgcggtggaggcggagggtatcgccatcggcggtagcggcggcggcggaggaggcggcgccatgaggggggcgcgggcgggagtgggcgctggctgcggcggcaggaggtgggacagcgagcctgtgagctctcaagataatttccaggcttcagaactttgacaggagcagtgttgcatctgttgtcacagctgcagataagaggtacgaataatctaagattgtgtcgctgatgattttgtcaagaaagaagtctagaatcagacggcaggtcattgtgcaggactcaagtttccttattcttcatccaagatgttaattgaagtcattatcaacacaagttagctgtataatcaacctactctcttcgcatacaatcaacatctatgaaaaccaggaagcaacctataattttctcacatgtgtgtattttttaaagacaaaatagaatgcggcctataaattagttaaatttagaaagtgcctgttaaaagagccttttttctgcacaggtgtttaaccaaaatttgtctaaatcggtggaaataaagctgttattggtctactcaaccttattcatgatcatgttacaagtccattacttgtaagccaccataacaaacttgctgcagggaggtgcaacccatgttgacatagcatgtgacaaggacttagtaaagcttgccatggatgttaccaaccttccgaatatttttttgtggaagtggaagggttctagcagggattctcttcccttcagccgaaaatcaacaaggatctattcagggtggaactaactgacatcgaggtttgctcgagctccctcagcacatagctgaacaaggtcccgatgaccgctgttatctgcgtacactggtccaaatcatctgcactgaccagaagaggctcagctacgacacttgaggacgatgacagtgaactgaatatattttcacaattagtctagatttatggatgtgtgccttcattaatggtgacagtagtactcatgtggctccattgctcattgagatatggtggcatgttgaattgttgaccccccctacgttgtatcacatattcacatctactagcactggtagttatgaactaggacaacaactctttttatttttcgtattagccttctttgaaatgatcatgcgaatattgatattttcacattgtttttttttgcgattttagccttaattttcatataactagctcatatcgtcattgaatataagtctttaggttgttatgtttaggctgtctctagcatcctttgtatcccac

SEQ ID NO: 38424 - DNA, 441 bp, Zea Mays
cccattctctcaccagagtacgaactacgaagacccgacaggccgacacccgctcgtctcccctcgcacgtaggcggcgcaaccggaccccctccccctccagatcggtgctccgctgggagatctcctcgtgcaggcgccgaatctcttcgtcgtctcttccaagcacggttggcagcacaatagatctgtttgcaagcattctttggtactacttcaagatgggtgtgaagatgtatattgaatattacaataattgcaacccgtaccggtgcttatttgcattatcattgtaattaagtcattcttctccatcgtcccaagatcgaaattagtccttggtacccaattcaggtgggactgtaggtagttttccttttcttaaaaaacaaatcaatgacctattaggctattactattaggccgtacatctctctttgt

SEQ ID NO: 38425 - DNA, 3399 bp, Zea Mays
tgccgcgcgcgcgcacacgccgctcgctccgtcctcggcttcctctttgcgaccaccaccaccctcgccggtcgccgcgctcgcccaccatttttttttacgttgccacgctactttgctcccggcccctgctcactctgctgcctgccctacctcgactcccgcccgttacttccacccctcggtttgctgcgggagcgagccagcactcgcgggctcgcggcgtcgcgggcaatgccggcgacggcgagcgagtagggggctcctccagggacggaggagagggatgggctgccggagctcgcggctggacgcggcggacgtgtccccggcggccgcgctgtgccgggagcgccgggacctgctccgcgcggccgcggaccaccgcgcgcgcctcgcggccgcgcacgccgcctacttccgagcgctcccgcgcgtggccgacgcgctcgcgcggttcgcgagccaccaccacgccgccacgccgccgggctcgccggtgctcacgctgccgccgccctccgaccacgcggacgccgacgccgacgccgagcccaagaagcagcggagcggctccgcgtccggctccgcgacaccgcacaccggctccggccactcccacatccacttccactccgacgattcctcggaatccgatccagactcctcgaccgacccctgcgccggccccggaggctgtggcgctggccacgtcgacggcgacggcgacggcgacggcgaggtcccgcggccggcgcctgcccttcggcctggcgttcccttgcccggccgcggcggccacggcgagccccaggaacgccaaatccaagacccagcttttgccaggccggagatgccgtgggagtacgcttcgtacgacccctatccttcgttcccaaacaccgagttccaaaatgccacatttcctaggtactactacatgaaggccagctcgacgccggcgaacacggtgtatcaagaaccgtacggctacggcaacttcgccaccagttcgtcctacatggggtacaacaacccgatgtacggcgtcccgttgcaacctgatggggatcgcccggtggaggatcgtggccgggaatcggtggctccgccgccggcggcgccgccgccaatgccaatgcctgagacgtcaccgtgggacttctttaaccccttcgattcatatgagcaggagctcccgcagtatagaggcaaagggtacgattccaatgggtcgttcaccagcagtcccaactcgagtgaggtgagggcaagggaggggatcccggagctcgaggaggagacggaactggagtctatgagggagtctgtgaaggcaaggaaggctgtagagagcacggcgtctaaccggattgacaatgcggatgtcagtgccaaggtgaaagtgtccatggagcacaaggaagttgagattgagagtgtgtacagtgtttcggtacttgagtcaggggacgagagtgtgtgcagttgcgattgtgaccatgccaacactagaacagaggggccaatgcaggtgcctgcaggagatgatcaaggggggaaggtgagctcagaggatcactcatccatagttgtcggagaggatgtatggccgccagagatcactgggacaagagatgtcgccgtggttgtagaggaaataaaggagcagttcaaatcagtggctgcttgtggagatgacgtcgcaaggatccttgaggtggggaggatgcagtatcgatcacggaatagagtcttgagatgaggaagaaaaattgaggattacatatgacaaagaatggaagcgcttgaaagagctggatgctagtggtgcagagccatataagatcgattcaacccgggcctcaattagggcactgctcaccagaatcaacatttccatcagatcagctaaagttatttctaggaggatccacatactacgagacgatgagttacacccacaccttgttgcgcttatccaagggtttgttagaatgtggaagttcattcttgagtgccaccggaagcaattccataccatacttgaaactaaatctcacattctgatccctaagaatggaccggaaagaagctcgtccaaggttacactggaactagaaatggagctcctgaactggtgttcctgtttcaggaactggatcctgtcccaaaaggcttatatcgaagctctcaacggctggctagtgaaatggcttccccaggaaaaggaggagactccggacggcattgcgcccttctctcctggcaggcttggagctcctgccgcgttcgtgacagccaacgactggtgccaggccatgagaaggatgccggaaccggaaggcggcgtagtagacacgatggaggctttcgctgtcaacgtgcatacgttgtgggagcggcaggacgaagagcagcggcagcagaggctgagagctgactacctctccagctccagggattttgaaaagcggatcagatctcttcagaaggagcatggctcgcaggggcagtttgacgctggcagggcagcggtgcttcccgccgttgccgacaatggcagggcagttgataaccgcatggttgcactggactcgttgcacaagggattggacgaacagagggcccggcacgagcacgaggaaaccgtgaggcagatccgcgaggccagcgcggctgatctgaaggcaggtctggctccgatattcgaagcgctggaatcttttaccgcggagacgctgagagggtacgaaaatgtcaggatccctgccaaaagcattggcgggtgataccttttaagccccccacggttttttttttctgttggcagcagttcttggtacatccaaggaactattgtcaatcttttagactgtcttcagtttgccagccatgcgcaagcacaaacaaggccccattgtggttggggtaatgtagagttcatccagtgtacaagaaagggcggcccagaagttcctgcatgattgcgcacgaagcagtgttgccatggatgctttttgagataatcctgatttctgtggtagcaaattcatgtggatctttgagactagtcggtagctagagctacttatccacagagagctgctaggagcctgaactcctagttgcagccccgcaaaggagtggggggagccggggaggggatggcagttttgtactagtcattttcagctcctgtacatattgattatattagctaagttggtgaattatctatctatctatctatctatctatctatcaggctagctcgccatccgtgtacaattttatctgtgcatcgtacaagttgtatttaatgccgtatggttatgccacgtggacggcctggtcctgtatggcgctgcctgctgaagactgaaggaagagtctgca

SEQ ID NO: 38426 - DNA, 2640 bp, Zea Mays
atggacagaaagccagccggtaaaaatagcttcaggcaacaggagaagcagaaaaaaaatgagaggttggactggaatgacctggtcctggctgggccttttgtccttcattcacattcccaaactgctccatcactttataccgccgtctcatctcgtgctcgtggtgtccgtgttcctcctcttggcggggccggccagaaaagcttgctggacggttggctccggaaaccggatgcgtctcaggtcaggcgcctgatttttacttgggttcccatggttcgtttccacagcgcaaaccacctcccagcttttagtcagtatagtctgctggagcccatggaggtgcagctggcgacggagcaaccgggggacccgttcctgccgctgcggtgggagagcacgggcgaccagtggtggtacgccacgcccatcgactgggcggcggccaacggccactacgacctcgtccgggagctcctgcgcctggaccccaacctcctcgtcaagctcacctcgctccgccgcatccgccgcctcgagtccgtctgggacgacgacgcgcgcctcgacgccgccgccaggaaccgcgccgccgtcgcccgccgcctgctgctcgactgcgagcccgataacgacaagcagcccccatcccgcggaggcggaggcgacgccgccaaccgcctcctccgcgccggctacggcggatggctcctctacacggcggccgcggccggggacgagaggttcgcgcgggagctgctcgcggcgcagccgctgctcgtcttcggcgagggggagtacggcgtcaccgacatcctgtacgccggcgcgaggagcggacgccccgaggtgttccgcctcctgttcgacgcggtgctgtccgcggcgccggcgtgcccggtcgggggtgacgacggcgagtttaggcgcgagatgatgaaccgcgccgtgcacgccgcggcgaggggaggcagccttgccgtgctcagggacctcctgcgcggctgctccgacgccgcggcatacagggacgcgcagggatcaacgatcttgcacgccgcggctgcaaagggccaagttgagcgaactgtgtagatgaccaagggaacacggcgctgcatatagcagccttccgaggccatgtccaagtggtcgaggctctcatcaccgcatctccgtctcttatatcagcaacaaacgaagccggcgacacgttccttcacatggcactgactggcttcgggactcccgagttccaaaggcttgatcgccagacggagctcattaggcaattagcgagtggagcaatcgtggatatcagcagcagcactattatcaacgcgcagaatgacgacgggaagacagctcttcacttggccgtggtttgcaacctgcattcggacgtcgttaagctcctgatgagcgtgccttgtattgacctcaacatctgcgacaaggacggcatgactcctctggatctactcaggaagcagccacggacgacggcgtcagagatactgatcaaacaactgatcctggccggtgggttcacaagctcaagggaccacgagactaggtcggctatcgcttctcagctgaagatgcactccattgtaggaagcccggggacatcgttcaagataccagacggcgagatcttctttctccacgctgctggagtcgacgtgtcgggcggcatcggcgaaggaggagcagcagtaccgttttcctccgttattgctagggctgacgtcctgcatggacccaaactgaagaggctcaactctttccaagacgcggcgaagcatatcaaggtcctattcagatggcctcgccgcggatggaacaagtcaggcagcggcggccgaaagggtctggacgacgacgatgcctcgtctgtggactctgccaagacctggagccacgaggagaccccgacaccgctgaggcagaggtattccaggatcggctcgctgttcaacaagcggacctacgcagcaggcagggcttcacctagcgaagcagtgaagaagggtggagtggtacagccagctggttctactctactttcgacatctctgtcgtcgtcgtcggcgtccttggttgacaggttcgaatctgttcatcaggacaacgatcagtctccttatgtcagtaggttgatcaggcacacacctaagaaatctggatctctcaacagtagacttatgaaccagtccttgcgcctcagggcctaagataggcagcaacatcgacaaggcttcttgcttccctcactagctagctggttacattttacagcttcactggtagcagacacagataattctaaatatctagccgccctgccacagcagcaggtttgtatctctgtggttgccggagagtgggtttgagcttacttagggcttgttcggttagctctcaatccatgtggattgagcgggattggatgggtttgaatcccaaacagctcaaacttcttcacaattttttccaatcccatccaattcatgtgtattgagaataaccaaacaagcccttagtgtttgtgttatctcaaaatgcgagtaatgcgatcttgcaatgcgatcttgggatattcatgtacatgatatctcaaaatgctagcaatgc

SEQ ID NO: 38427 - DNA, 3143 bp, Zea Mays
cgcctccgcccgcccgcacgccagaaacctcgccgcaggaaaccgccgaccctaccacccgcccaccctaccgccctaccgcccgcccgcaaatccttccgccgcgaaccgcccaaccactcgctcccacgccgcaatcccaccgcgaaagccgcgaacccgacgccttccaccatcccgccggccgggcggcttctggggccaccccgaggacggccaccgctcgggcgacgcgaccttcaagggagggccccacgacgcgcgcctcaaggccttcttcgtctgcaacacccacatgtagccggctcgacgttctccgctaattcgcttggacgcctcgccggccggagggaaaggaagagtcggagtagcctgcccggctgggaaccgacagcttctccgtttcagaagcacgcgggcggggaggtggggtcgggagatcgcggggtgctcctttgtctccagggcagaggagaaacgcgcacggctggggaagaaccgaagaaggaagaggaaggtgccggtggaccaaacacggatctttcagtggagttcgggaagagtactggcacgcacgccaaggttgcatctccgccgtccaccacgaagcgcacgcgaacccgacgccttccaccatcccgccggtcgggcggcttctgggaccaccccgaggacggccaccgcccgggcgacgcgaccttcaagggagctcggcatgttcgacggggaccccgcggccgagccgttcgggcgcctgggccccgcggacgtgtgctccagggagcaccaggacctggcgctcgacgcgccgcgccagggcgtcgtgctcctcaagaaccggagcggtgggtggctacacccatactttgcagctacacccatactttgcagttacttaattcggagcggtgggcggccgctccctgccccgctccatctcgccagagaaggcaaagatctagctgccaagttctggcagctctctctgtgtgaatcaaacgatacgtacaggtagatgtattggtgggcctgcttcttcaacatcatcatctcctcctccgatgctgcttacctctcagtcctcaccactcccctcatggtgaatgacccttctggcagttttcccaaatcaagtctgaatcgagcacttcagttgagagtagtcactctggagtagagcaatggagaattcatttgcacctctacatattcaagaaatcccttgggaaagtgagtacatctgacgtgtttgatgtcaaagactctgatttggtcccaggaaaatatgaaggtgtcaagtgggttgaagctttgggaaggttcattagacttggtgaaggccctgaattctgatatcaaagaatataaattgcgtgtagaaggcaaacacgtattagagcttggatgtggacatggactccgtggcatttttgcaggtctcaaggaatctggtgtgaaagggattttagtccctcgccactcgcttgatgtggactgatacagacatgatcgatggagtatagtgaactacatcataagctgtagcattcatcgatccagatccaaacgtccttcggactcttccttctgcatttgtgtggagtggggattcatccggccttcttctcttgcagatgaaaagcgtcatgagaaaggcaaagctgagtttaagaaggttgtagaatcactgggacatgtaatactcgggtggcgtctggttccgactgacaactcagacttgggtgaatctgcactcgagactgagccagtcattgagcaggttttcgttaccaagagctcaagatcagaggctgagtttgagcaacaggtaattccataccacttgagatgaggcaaccgacttttctggtcaccttgtaatgctgacactattaggcacaaatgagggaaatgtactgccacattaggcacaaagtagtgtatattgctaggtgcttattcctagaccatgctctgcttttagtttgtatttctcttatttttcttagggtgtgtcgttagctgtttccttcctgtaatcctgtgtagcgtaggaggcttacctgctctgtaagcttccttgtattgttctataaatgctttaatacagtcaggtattatcaagaaaacaaaaagaaaagaaacagatggctactttgaggtaaatatttcagggccatttgtatttacttatgaggtttagatcaaatgatagatgatgtcctgcatgattttggaattgcatttgtattgtataaacctgaatataaatgccatttttgtgaagtagtccgatagcatcaaaaatttgtgaagtagtctgatagcaacagaaactataattaattgagtcttattactcacactagatcttgtcccccaccgcctgatctgactacttttgagctgatttggtcaggaaaggtgccatttttacccagcggctgcctcgccaccaaattaaaggttgcattttgtctccggtctcaccattcccattttattctccgcgtgttgctgcctgctccagggcggcggtgggcatgctgctcggcggcgaggacatgcacaggttcccggtgcgctccccgcggatggaccgcggcgacctcatctgcagtcccgccgcgcggcagatcgtgtccaactacttcagcatgttcgggccggtgcaggacgtgcgcatcccgtaccagcagaagcacatgttcggcttcgtcaccttcgtgtacgccgagacggtgaaggtcatcccaagcaagggcaacccgcacttcgtgtgctacgcgcgcgtgctcgtcaagccctacaaggagaagggcaagatccccggcaggttcaggaagctgcagcacgcgcaccatggcggagccgagttcggcgattgcgcgtcgcccaccagattgctggatttcagggacccctacgccctcctgcttctttcaggtgcccaggttttctcctgggcatgaagccattgggctatgatgtgtgaggtgcatagagcaaaaaaaggggaaggggggccctccattcctctaatctgggagggactactaatatggctacatgatggccggccctatcaaccgagcgtagagaagctttgacaaagaaaaaagaaatacctttggagaggtgta

SEQ ID NO: 38428 - DNA, 3915 bp, Zea Mays
cctctcgtctcttcttccgtctcctccgcctccccacgcttcgttatataaaccctagactaaagcccccgagtccctccgcccccgctcgccacaaccactgcgcgtgatcccatttcgaaacaaaaaaggaggagcgcgctcgcactcaactccgcggagccccaatcccagcgtcgcctgcggtttagatggaggcgcacggcgaccagcggtggctggtggattgcctgacggctacgctcgacaccgcgcgcgatgtccgcgccttcgccgaggagtcgctccgccaggcctcgcttctccctggatatggagctgcccttacaaaagttacaatcaacaaagagatctcgtttggtttacgacagcttgctgctgtcttactaaagcagtttatcaagcagcattggcaggaagacgaagagaattttgtgccccctgttgtttctgcttcagaaaaggtggtcatacgacagctcctgcttacctcattggatgattctaatgggaaaattcgcactgctattagcatggctgtagcagctattggacagcaagattggcctgaagactggcctgagttacttccggttctcttaaagttaattggcgatcaaagcaatgggaatgaagttcgtggagcattaagatgcctagcccttctatcggatgatctagatgatatgtgtgttccaaagctagtgccagagctattcccatcactgtatagaataatatcatctcctcatctgtatgaaaattctcttcgtgcaaaggcttttgcaatagtccattcatgtatttctatgcttggatcaatgagtggtgtctataagagagatacagctagtctgatgacttcagtgcttgatccactaatagagcaattctccatagttctaaattatccggtgcagtcccaaaatcctgatgactggagcatgcagatggaggtgctcaaatgtttacttcagcttgtccagaactttcctagattacctgaagctaaaatttctgccattcttccagcactgtggcagacatttgtttcgtcattcaagacctatcacctgtcatacattcaaggtgcagaaactttggattctattagttatgattctgatggcagtgaaaaaagtcttgagtcattcgagattcagttatttgagctatggacaacaattgtggggaattctagattagcaaaggttattgggggaaacattaaggagctagcatactatactatagccttgcaacagataactgaagaacaggtgcaaaactggtcacgcgatgctaaccagtatgttgctgatgaggatgacctaacctatagctgtcgtgtgtctggatctcttttgctggaagagctagtaacagcttatgaagattatggaattgactcaattgtggaagcttcacaaatgcgttttcatgaatcacgagaattgaaggaagcgggttctgctgactggtggagactgcatgaagcatcactttttgctttaggttcactgtcagaacagttgtgtgaagcacaggattctggtttgacaaaatacaatgtgcgggatttacttgagcaaatgctaattgacattatgggaacaggggtgcatcagtacccatttctccatgcgcgtgcattttctagtgtggctaaattttcttcactgataagtaaaggggtcagtgaacagtatctatgcaatgcggcccatgcgattgcctcagatgtgccacccccggttaaagttggtgcttgtagggcactggcccaacttttaccagaatctaatcagaatctgattcagccaaacattatgggcatactttcatctcttgttgaccttctgcggcaggcatctgatgaaaccctgcatcttgttctagaaaccctgcaatcagcaatcaaatctggtggagaacaatcaactttaattgagcctgtcatttcccccatcatactggatgtttgggcacagcacattgctgacccgttcatcagcattgatgctgtcgaagtgttagaggctatcaagaatgctcctggatgcttacagccacttgtgtctcgaatccttccaacaattggatccattttagtgaaacccaaggtccagccggatggactggttgcaggttcactggaccttttgacgatggtactcaaaaatgctccagttgctgtggttaaagcagtcttcgacacatgctttgtttctactgttcaaattgttcttgaaagtgatgaccatggagagatgcagaatgcgacagaatgcttggcagcattcatatcaggtggccggcaggagttgcttgtctggggtggtgaacaaggacaaacactcaagatgctacttgatgcagcttcaaggcttttagatccagcgttagaaagttcagtatcactatttgttggaagctttgttttgcaactcattttacaaatacctctacacctgtctcctcacataccggaccttattgctgctattatgagacgtatgcaaacgagcagcattgcaggattgaaaagctcccttattgttataatagccagattagtaagtctatctctctcttacctaaggtacatatgagtgcaccaaatgttgatgggttcatcaatctattgctttctatccctgcacaggggtatgacaattcacttgtttatattatgtcagaatggtcacaactacaaggtgaaattcagggagcctaccagataaaggttacaacgactgcattagctcttctcatatcaactcgtcatcctgagctatccaaggttgaagttcaagggcatcttattaagactagtgcaggtataacgacacgttcaaaagctcgagtgactcctgatcaatggaccaagattcctctcccagttaagatcttctcattgctggcagatactttaactgaaattcaggaacaaattggtgctggtgatgacgatgactccgaagaggataatgactgggaagaagttcagaatggtgatgctagtatatcagatgatatcatacactcagcatcggttccttcaatgactaatccatcagttgaacatttaaatgcaatggccaaggtttttgatgaggatgatgatgatagttatgacgatgatctgacaaaaaacgaccctcttaatgaggtgaagttagcggacttcctaacaaacatctttgctaacttgtgggagaataatcgaccaatatttgagtatctttgccagagatcagctgttgaaaaggttttgaggaggtgaagcgttaacttgggatcctgtcttccacctttcgggatataatatatcttcatattagttatcgagtcctgtttgcattgctgtggactggttttcttgctcattatatgttcattggtgtaaactgatacatctctgaagccggtgttatgaggttttgttagtgtaggtttctttatgttctttgtatttaaaatctacaagatgtgagtatttgttgtaccgggtgtggtgatgttgggtattcatgtctgaagaattcccggcttgacttgttcttacgttgaattcctccggagggaccttgattccttggctttattcatcaatttcatgcatgcctatttggaggaacgccacctttggtgtttggcaggagcggttaagctcagggagttgggtcccggggttggagttccttagggctctactagtgtgtgcggtggtcaagtgttttctccttccttggtcaagtgtttgcctcggttcaacccctcactcttggtttggagtacgggtgtagtttttcttttgtaagaaccttcctttttattctatcttaatttaaagatgcagttcttctgtgtatccaagatttttttcatttatggactagttgagctccagtg

SEQ ID NO: 38429 - DNA, 2227 bp, Zea Mays
ccaccggcacgctcctcctctttcctgtaggctgcagcaacccgctcccccgctcacaccgaaatttgaaatcctcctcccagtctcgtccttcgaacgaagcaacagccgccgcgccatggagaagatctccgtcgccgtccgcttccgccctcccaacctggtggccgctaacacctccccagccagttccggcggaggcggcgaccgcgagtggcgtatcgatgacacccgcgtttccctcctccaccgcgccgccggccccatcaccggtgcctccttcgccttcgaccacgtcttcgacggtgcggcgaacaacgagcggatctatggcacggtcgtccgggaactcattggcgccgtcgtcggcggattcaacggcaccgccttcgcctacggccagaccagcagcgggaagacattcaccatgaacggctccgacgccgacccgggcatcattccccgcgcggtccgcgacgtcttcgacaccgtgcgccaggctgacgaccgcgagttcctcatccgggtgtcctacatggagatctacaacgaggaaatcaacgacctcttgacacttgaaggccagaagctgaagattcatgagagcttagatcgtggagtgtacgtgtctggtttgcgggaggagatcgtgaacagcgcagagcaagtgtttgagctcctccagcttggagaagcgaacaggcattttggagagaccaacatgaacatgcggagcagtcggtcacacactattttcagaatggtaattgagagcagtggtaaggaccagacagacggtggagatgctatccgcgtatctgttttgaatttggtggatcttgctgggtcagaaagaatcatcaagacgggggcagaaggggtacgtttgaatgaggggaagtatattaacaagagcttaatgattcttgggaatgtcatcaataagttgagcgagaacggaaaacaaagagggcacattccgtatcgtgatagtaagttgacacgcattctccaacctgcacttggaggcaatgcaaagacatctatcatctgtactgctgctcctgaagagattcacattgaggaaactagaggtactcttcagttcgcaagtagagcaaaatgtgtaagcaattgtgcccaagtaaatgagaggcaaaaactggaaattgaagaacttcgtaaaaaactgcagggttcccattctgaagggttggagcaggttgtactaaaactacggaacgacatgcacaagtctgaacttgagcgtgatcgattggccatggaacttgaagacgaaagaaagttacggatgactctagagcaacatttgactgagcaacagaagctagaggccatatcgtcagaccactttacagattcaatccagctggatcttctgaaaactccagattcgaagtctgtaccagatggctttgttgcctgtcgctcacgttactcacaagatgttgagttcagcccaatacctgaaaatttggataatattgctgaagaagatctatggacacgtctgaacaaaggctgtgttaccgatcttgatatgcttgagatgacacctaatctcaaacgcgagtcatcctttctacaagaaaaatcatcagctgcgccattggaggaacctaccaacgccatatgccagaggttagcaaaggagtgcatctatgatcagcaacagcttgaggaatcaaaggcgagatgcgccaatctcgagaaagattgcgacgtgctgagggacgagaacttgtccctgcaacaggagctctccgagtccaagctagaggcggacagcctcgtagccgagaagcaggcacagctggatgatttgaggatgaggtgcgtggccctcgagagggatctctccagctccaggcaggaggcccaccgccttgccaccgagaagcaggagctggccgggcagctgggcacagagaggcagaagatggatgagctgaagcaggatatccgggtgatctgcggcgacttgctccagcgggaagggcagctcacgtcgatttacaccaagtccaaggccatcatagagagctgcaaggcctcccaggtagctactctgctttgatggtttcaatgaccgctgttggcttgtgcattttttatacataaaaacagaaggacagcatttttatgttgagattatatccttcgttggcgttgcaattataatttcatcctcagttttttttaactc

SEQ ID NO: 38430 - DNA, 1117 bp, Zea Mays
acttatcttccttatcctatctccatcgccccatttcctatcctcccagccgatcccctctccctcacggcgccctctcccatggccgtcggccctccccgccatggacgtcgctcttccttcctacagatgttgacaattggaaatccatgtagcaaataaatgattttggaactagggacagacattggaggtggattttcctcaattggagatattgacaaattggaaaaaatgtgacttgacctgtgctgcaacaaccttaaactaggaggggcttctaattcttcatctctaccaacagtcctctcctgttactttttaaaccaataactttttcaagtttgtgcagatgcacacatccttgagccaaaatagaaaaaaaatcatagaagagttctttggtaaatataaattgtgcactcataattttgcaagtgcatctatggataccttcacttattcctaacggatgtctttcaggctgtcacgtgattcaagagtattaatgatatacaaaagtttgctttatggcaagtcaagtaaccaccaattttgggcaatgacagggatgtgcagtggtggtctcttaaaagaattttgtgttccagcgtagctatttccactgcaaactatcaaatcattacaaactggcattccatggcttccactagttgagtccccatgataaccaatccttgttatcatatacttcttcaagtttgacgtcagcaacgtggtcatggtgaccggcgggaggaacaccgggcgtgtaggagtgatcaagaactgggagaagcacaagggcagcttcgaggtcatcgacgtgctgcttggaggcttttgcatgctatttctagttttctcttatttgttgtacaagaaaacatagaatggaattcaaatttggtggtcgcaaaagtgtggagacttgaattcatataaagttaggcttaacattagtgcaaaaagttgtattttagttttgatttagagtacacttatgtatgccttgtttgacaatacttatttatgatatattgaatggtacctattgtaatcgtctattattgtaggatattcgagacagtttgataaatactttatgacttataat

SEQ ID NO: 38431 - DNA, 1681 bp, Zea Mays
caactgtcttcagggaactcgcattgaaactcggaagcaccgagtcattccatttacgtgtgccacctgcaccgccttcaacccagaaaaactaacctgcgtgtcttttcgcgtacgaatgatatattttcctaattccccaaacggatgtcgatattggaaggcagtggaagtttctcagttccgttgtgggaaaagaaattttgcactgatgcttgtgctatcccctgggctaaactgtgtgagaccaagagattgatgtctctgtataaaagcgtggttgattgggacgactcagctgcattagaagccttcaatgacgcaaaggcgcgcttctgtgctgtatatcatggtcaatgctacgatatccctttgcccgacccaaacatgtttattgatattatcaacccagatgaatatgttgatcctgaattggtggctgatctggagaagtcacgtcgtagtgttcccagaaaagataatggtgttcctgatgtctgggactcttttattttctctgacaagccagttccagttacaggatggggtgacacggagaccagcttcacccatggccagcagctctctgtaaactgggacaatcagttagaacactcagttgaagcaaatcataagcaaatgtcggcaagttgggactattctgtcaagcaaccttctcaaagaattggtcagcaaaactcagggaactgggaagtgtacaaggaacagcaggatcaagccagcaactggggggagcagacgaatccttgcagtaccaactgggtcatggatggctcccaggatgcttggaagcatggctatggttggggtcctgcagctattcagaccgatccatgggacaactgtcaatatagctatcaggtgcctgacagccagggcacatatggacactggactcactggagaaggcgaaacaatgacttgggtagaagaaacaccaggaatagaggagatcccatcagctcaaagccaatgaaatcaaagtaccaaacggatgaacacagtggtgcaaacaatggttggaggaactgtcgagtgaagaatgatatgtattattactcatatgagcaggctgattataccaagcagtcactggctatgtgagtaagagctaaggggcttacgccatcgagagaagatgacaagttcctctctgccgttcactacgctttagaggtgtcagtagttttacaccagcaatagtaatggtggacatcttgagatgaggtacagtagagttagtagcaggttatgttcacctacccccccccccccccccccccctaagctgctgtatatagtagtaattatcgtcctaatgattgtttcgtttagccatttgcggccgttgtttgtttatatatatctgtctcgatatctgtagttttggtttactggctacttcttagcttcagtgttgcagcagttagaattatgatggttcttctttaatttacatcttcggtggtggtaagaacaaatgctttgactgatttgtatgttggtgtcgaaatggcacgagcagaagcttatatcctgtacatagctgcattgctctctggtaattgtgattttctcattgtacccgtttcatgtggccgtgttcaacgcctgcagattgtgtagttcgatttagaagaagctgctagtcgtatttaag

SEQ ID NO: 38432 - DNA, 3345 bp, Zea Mays
cccagcaccagctgtgtattagcggccgggcggacaagaagcagttaccgcgacaacggacgacggcgacgcgagcagtcgagtaaagacgcggtggggcggcgctgcgctgggcgggtggtgagatcagaggaaggaacgggatcgctcccggttaggttgtcgtcgtgcgcgggtgctggggcgagggcgtggcggatctcatctaacgccgccacttgctgctaccacttccccttcccccgcacctctgagctctgacctcccgcccttctcccacccatcaccatctttgtccctcgcgcaattcgccgaacacaccgcgcgcgccgcgcctccctgcgacggctgcctccacggccaatgctggcggcgcgatgaacgtggatgaggaggtggagagcggggaggaagaggaggaggacctgttctacgagtcgctcgatcgcatcctctcctcctcgggctcctccacatctgcctcggacgacgacggcgccgacagcccgcgccgccgccgcggttgcgatgcgccggtcgcggccgccgcagcggccctcgacctgtggacctctcagccgtcgcccgtccaggagcggcgccgccggctgctccagctgatggggctcataggggatccttccctcgccgggtttgagactggccggtccgcctccgaagatgccgcgggcccgcccccagcctctcccgtctctcggtccagatcaggcggggccgccctcggctccgccgggaagccaccactcgggggcgtccgtctgcggtcatccttgtccgacgggcccgatcctgccgacgaggaccccaggtgcttgatcaggaaccttgacgacggcagagagtacgtggtgaaggaagaattcggtctccgcgaggtcggcacggggcgccaccttaccgttgaggagttggcccgctcacctattgttcaggagcttatgcggcgccaagcttttagtactcccaactccaactgcaactcaaattcccaaagtggcgcctccacaccgatcgaaaggtcgagctcaggttccagcaatggtgggtcgcgctccaagcggcgaagcagctggctccgcagcatccgctgcgcagctgggtccttggtcacccactcccgtgaccgcagcagcagcgacgagaaggacacgtcttcagagaaaggcgggcaccactccagctccgctacggatgacagccaggacagtgttccacgccatggcccggcccgtgtcaaggtgcggcagtatgggaagtcatataaggaactcagtggcctgtttatgacacaggagatacatgcacacaatggttccatctggagcatcaaatttagtcctgatggtcgttaccttgccagtgccggggaggattgcataattcatgtttgggaggtgttggagttcaagagggcagggaaggagagggaggtgaaggagaatggggtatgcaatccgcttgttgctatggtatacagtgagtcatcagagacgatggtggcatctggtgctccaagcgggagccattgggagaagaagctgcgatcaaaggtactgcaaggtgggggatcagtgagctcagacaggttgatggtgcctgagtatgtgtttgcactgtccgagaagcctgtgataacctttgcagggcattcagaggatgtgctggatctcagctggtccaaatctcagagccccttaaacttgcacgtgtctcacaaaaaccgctgaacagaagcaaagtttagggagtaactgtgcaagtttaggggctaggtgtgacaactgtgcgaattgaatgagacgggaaagcaattttcaagttcaggcagctagcccactagtatttgctttcatcatcaatggataaaacagtacggttgtggcacatgtcaagcacttattgtttgaaaaccttctcacacactgactatgtgacttgcatacagttcaatcctgttgatgatagatacttcattagtggttccctggatgaaaaggttcgtatctggagtattccaaagcgtgaaattgttgattgggttgatcttcatgaaatggttactgctgcctgctatactccagatggaaagggcgcgctgatcgggtcccacaagggcagttgccatttgtatgatacatctgatgacatgctttgctacaaaacacagattgacctgcaaaacaagagaagaaaatctagccagaagaaaataacaggatttcagtttgtcccaggggattcttcaatggtcataatcacatctgcagattcacgaatcagagttcttgatgattttgagctagttcataggtttaaaggattccggaacaccagcagccaaatctcagcttgtttagctggaaacggacggtatattatctcggcaagcgaggattcccgtgtatatatctggaggaacgatgatggttcgaaaccaagtaaaaagaagggcattgtttctgtcacaaatacccatgaacacttccactgcgagagtgtcacggttgctgttacctggccttttaccagcaccacaatgacttctttaatgaaccccaggaaacaagagcttgagcttgggtctgagaatggctattcaccgcaagatctgcaaaccaaacttgctaaggcacaggagatgacagatgttgagtaccggagcacaaatatcacaagttacaactcgaagcataacagtgaccggacatctccggcttggcctgaagaacttgtcacaccaccaaatcaaagtctcagcgctactacctgccatgccaacgagggagaccaagctctgaatcggtcggcctggggcctagtaattgttacagcaggccgtggaggtcaaatcagaacatttcaaaacttcggttttcctgtaagagtatagcatgagtccgaatacataagatagtcactgccattcaggagtgcagtttgtgtatagataggagatagtgggtgagtttcacactattcagggattgggtttgactgttccttggtgcacctgctagagatcagaatcttcatctaacatacactgtcagtagtccaaaacttgtgtatgccaaatttattttaccctgaaggcccaagttgtacatgaaagagaaagccctacagagagcaacactatcagctgactggagataattcatctgtcagcttcaaccctacctttcggttttagacttctattccgaaccatgacatgttcttgtaagaaaagaaaaggaaaaagatagacgtggtgaaattgtcattttggctttatgatctcatggtattggtatcctgaatcttttttcagaccccacctat

SEQ ID NO: 38433 - DNA, 2420 bp, Zea Mays
cgaagcaaaccgaaacaaacaaacccaagtgcgcgtccgagcctcgaggcggagaagaaaccggagcgagatatttgcatttcagtccctgcgaagagaaaaccgtcgcgtcctcgccgcgccgctcgcgtcgggatcccgccgccgccctactcggtcgaccatggggacggcgacgatggcgactgcggtgggcgcggccatgctgctctacttcgtgctgagccggcggctggcgggcgaggacgtctcagcccgcggcggtggagggggaggagtcgggtctggaaagcggcggagggggcgcgcgctgcggcggccggtgcagccgccggcgacgtggatcgaggcggtgggcacgctcgcggaaacgctgcgtttcacctactcggagacgctcggcaagtggcccatcggggacctcgccttcggaatcaagtacctcatgcgccgacagccatttccagtgtttcgggaattagctggattttcacaggaggatgttcttattgaggaaccaaaggcgggggtgaattttgaagcctgcccatacaattatacgtgatgagtgcaccaaatccttccttgttttgatccgagggactcatagcatgaaagatactctgactgctgctactggggctgtagtgccatttcacctctcacttttggatgaaggcgatgtgagcaaattagtgttaggttatgcacactgtgggatggttgcagcagcccgctggattgcaagaggtgtaacaccatgcctccgtgaagcagtcagacaatgcccagagtaccaaatcaagattgttggccattcattgggtggtggtactgctgcattgctaacctacatccttagagaacacaaagagttttcttcaacaacttgtgttgcatttgcacctgcttcttgcatgacatgggaattagcagaatcaggcaagcattttgtgacaacggttgtcaatggagctgatctggttcccactgtatcaactgcatctattgatgatctccgttctgaggtaacagcttcatcatggttaaatgatctgagggatcaaatacaacagacacgcttcctaaatgtcgtttaccggtcagccactgctttaggaactcgcctgcagtctttttctggtgcgagagagagggttgcaggtgctggagcatttctacgtcctgtttcaaacaaaacccaggttgtgatgaaacaagcacagaatgtcgcacaggctgttgctagaagtcggtctgcattttcctcatggtcatgcatgggtgcacgtcgtcgaggtgtaggtgtagttactgcatgttctaaagatgatatgagagtggaaacccatgtaacatcaacagttgagtcaaagtctgtccttgtagaacattgtggcgccaagaccatagaagaactgcagtatactgcagctagtgtttctgttcatgatgcagcagaggaagaagaggctcttttgagtgaacatgaaacctccagggagaatgccgaagaagaaacaacagagggtgagttgtggtatgagtttgagaaggacttggatcgacaagctgaaatggaggcacgaacaagggaggaagaggcagctgcagccaaagaaataatggaagaggaaagtgctgtgctaaaaggtgtagatgacaggcagtccttcacaccagatagcttggagaggcagcaattctacccccctggtagaatcatgcacatggttgcaatgcctcccacagacgctgacccagatgatccggttgctgctgacgagtgctgtgttggaatatatgagacccctagagatctttacagcaagattcgactctcaaataccatgatcaatgaccactacatgccaatgtataagaaaatgatggaaacattgattgagaagttcgcgagggatgaggactgctattgtacaggttctactgcagaataacatggaagcatgaatgacctatgtacatcgataactgtacaatactccgtgttagctgttattagcctatctgacattgcaatatacaagaggtgatgtcctcctgacccgtgaaaaaaggattttagttagggtcatgtgagtgtgtgatgtgtaaatgtaaaagaaaccagaatcagcaatttaataccttttccagtcatatttgcttgtactttacaagcatgtgatgcttggatcttgaaatctaaatgtttacaaggcattttaaagtcaggcgcttagcaagaagagcgttttgacattgttcatacagaccaatgggcaatgactacagggaactaaaacgataagagttgcaatggcgcactggtgcttgtttagctagccatactatttgatacttgacatggctgttaagaactgaaatgtaaagtgaaagtagagaacggaagaaattgt

SEQ ID NO: 38434 - DNA, 5086 bp, Zea Mays
cggctcacgcccccggcgccctcctgaaaatgcgaaaaccatatccacgccgcgtgggccctgtgccaatccaaaaccgccacgtgccatatccggtgatacgcctccccggcctctcgtgtctcgtcgtctccctctccctccacaacggcatagctgcagcagccaagtcctctccgctctcttcgccgccaccgccgacaaataaccgccgcaattcgaagcaagagagccgcaccaggagaagatatagtgagagtgagagcccgaggagggggtggcgcgatggggctctcgggcgcgacgatctcggcgccgctcggctgctgcgtgctgcggtgcggggcagttggcggaggtaaggccctgaaggcggacgcggagaggtggcggcgggcgggatggagccgacgcgttggcggaccgaaggtgaggtgcgtggcgaccgagaagcacgacgagacggcggcggtcggggcggcagtgggcgtggatttcgcggacgaggaggactaccgcaagggcggcggcggcgagctgctttacgtgcaaatgcagtcaaccaagcccatggaaagccagtccaagatcgcttccaagctatcgcccatatctgatgaaaatacagtgcttgatttggttatcattggttgtggtccagctggtctttctctagcttcagagtcagctaagaaaggtctcactgtaggtctcattgggcctgaccttccattcacaaataactatggtgtgtgggaggatgaatttaaagatctcggtctagagagctgtatcgagcacgtctggaaggatactattgtctacctagacaataacaagccgatactgattggccgttcttatggcagggtgcaccgtgacttgctccatgaggaactgctgaaaagatgctatgaagctggcgtgacatacctgaactccaaagtggacaagatcatagaatctccagatggacacagagtagtctgttgtgacaagggtcgcgagataatttgcaggcttgccattgttgcttcgggggcagcatctggtaggcttctagagtatgaggttgggggtccccgtgtttgcgtgcagactgcatacggagtagaagttgaggtggaaaataacccatatgatcctagcttaatggttttcatggactacagagattgtttcaaagaggaattctcacacactgaacaagaaaatcccactttcctgtatgctatgcccatgtcacccacacgagttttctttgaggaaacatgcttagcttctaaagatgctatgtcttttgatctacttaagaagaggctgatgtatcggttgaacgcgatgggaattcgtatcctgaaagtttatgaggaggaatggtcctacattcctgttggagggtccttaccaaacacagatcagaaaaaccttgcattcggtgctgcagcaagtatggtgcatcctgcaacagggtactcagtggtcagatctttgtctgaggctccaagatatgcttctgtgatatcggacatcttaggaaatcgagttcctgcagaatatatgctcggaaattcacaaaattacagtccatcaatgcttgcatggagaacactgtggcctcaagagaggaaacgccaacgatccttcttccttttcggattagcgttgataatccaactgaataatgaaggcatacaaacattcttcgaagcctttttcagggatgtggcgaggatttcttggctcgaccctttcatccgtcgatctcatactattctcattctacatgtttgcgatagctccaaatcaattgcgaatgaaccttgtcaggcatctcctctctgacccaactggctcatccatgatcaagacctacctgaccttataaaaccatttgcaccaggctgcaagaactcttagaaactgtacagttttgtagttgtacataagttagagaggatctggggggttacttggcggcggatctaggggttagcagcaatgctataatacactgtaaatcttttatggttgctatggtgattggatagagaagcacaccgtgttgtgcacgatggaagaataataagagagatcaggtgatggtcatggttcctgcattggccaattttaggttgcatttgctgtttcaaggcttcttacatgtccaatcaattacacccttattttaggttgctcaatgccaattttcttgtggaacaatatttgcaaaagcaaaaaagggaaaaacataattggatgtgcaagaatagtatgaggctgtccttgctcctgcgccatggcatttagctgcaagatgttggggaaggagaagacctgtaggagactaaggttggaggcaagggagagaaaggaaggagggcaggaggagaggcggaacaacccgtctccctccatctctctaccttcttctcctgcgcccctatccatcgctcgcaccacccactgaccggccggcggcatccttattaccataacatcacgggacggtggcgcgatgcaaggaggcccactgagcccggatgagtactgggtgatatcgccgccggcgctgctgcaccagccggcgtccaccatcgtcgtggccatcgaccgggaccggaacagccaactggccgtgaagtgggtggtggaccacctcctctccggcgcctctcatatcgtcctgctccacgtggccgtccattaccacacgacccatgggttcgccatggttgagaccacgcagggtgcgctggaggctgaaatgaaggagatctttgtcccctacagaggattcttcaaccggaatggggtggaagtatccgaggtagtattggaagaggcagacgtgtccaaagccattctaggttacatcactgcaaacaagatccagagcattgcgctcggcggagccaacagaaatgcgttcaccaagtattctttttttttccccatcatttctttttcgtccagattgcaccgtctcagctctcgcctcgggcaggaaattcaagaacgcggacgtgccgtcgaccctgatgaagtgcgctccagactactgcaacatctacgtcgtggccaagggcaagtccgtcaatgtcaggctcgccaagtgcggcgtcccgccgatgcacactggcgccgacatcgcttcggacaccgactccctccgggaatcggtgctctacatgcgacgcggctccagggggcacctgccgcgggtgacgcctgacgcctggcgctccattgacgggcgcacaccgccggagctatccacgcggccactgttccgcgagcgcttgctctcgtcatcggccaccaccaagaactttgtcgtcctgccaggaaaggacaacttcgagacgtcctcccgctcggcgagacacgactcgttaggcggcgacctcgacttcggcccgagcacgcgcttctcctacatagacttgggcgagaacctcgatatgtccaccactctccccgctctggaacccatgtcaccggccaccggcgcgcagcgggataccgaggccgagatgcggcggctccggttggagctcaagcagaccatggacatgtacaacgcggcgtgcaaggaggccatcaacgccaagcagcgggccaaggagatgcatatgatgaagctggaggaagcgcgtcggctggaggaggccaggaacgccgaggaggctgctctggcagtggccgagatggagaaggccaagtgccgcgcggccatggaggccgccgaggcggcgcagaggctggctgacctggaggcgcagcggcgccgcaacgccgaggtgcgcgcgcgccgggaggccgacgagaaggtgcgcgctctggatgccatttccaaccacgacttccggtaccgcaagtaccacatcgacgagatcgagatggccacggagcgcttctccgacgagctcaaaatcggcgagggcggctacggccccgtctaccgcgcctccctcgaccacacccccgtcgccatcaaggtgctccggcccgacgcgcaccaggggaggaagcagttcctgcaggaggtggaggtgctcagctgcatccgccaccccaacatggtgctcctcctcggcgcatgcccggagtacggctgtctcgtgtacgagtacatggaccacggcagcctcgaggaccggctgttccgtcggggcggcacgccgccgctcgcgtgggcccagcggttccggatcgcggcggagatcgcgacggcgctgctgttcctgcaccaaacgaagccggagccgctggtgcaccgggacctgaagccggccaacatcctgctggaccgcaactacgtgagcaagatcagcgacgtcgggctggcacgcctggtgccgccgtcggtggcggacaacgtgacgcagtaccggctgacggcgacggcgggcaccttctgctacatcgacccggagtaccagcagacgggcaagctgggcgtcaagtcggacatctactccctcggcgtgctcctgctgcaggtggtcaccgcgcggccacccatggggctcacgcatcacgtcgagaaggccatcgacgcgggcacctttgagcagatgctcgacatcaccgtcaaggactggcccgtcgaggaggcgctcggctacgccaagctcgcgctcaagtgcacggagatgcggcggagggaccggccggacctcgccacagtcatactgccggagctcaaccggttaaggaacctcggccacgcgtacgaggcacgcatgagcgccgccagggccaacggtggaagtggagagagtggtgcccagatcagcggggactcgacaacggtgggtggttcatgggaaacggcggacagctagcgggcggtccggtgatcggtgtggccggtggcccggatgagtcagttagagagcgagctttttttttgatacgggggagttaaaaaatccaaaaatcttggtgtatgtacagttctgtctatgagaaatactaacgcgtcttgcagtgctgctgcctgctgcctcatccttttgagggtcgtcatccatgatccatttttttattctgttggcccaacctagaaattacgattgcg

SEQ ID NO: 38435 - DNA, 380 bp, Zea Mays
aatgtagccctgctgactgaagaccttttaactggtcacatgcctcatcatgggtaagctttgcctcgggcagactaatactagaataagacaacacgcaatgggagtggacagatgacgagagtagtgtgtcccttccgtgccaacaggttggacggtggtgtatctgtgctctcagttggcgtgagcctgatctgatcttaagaaccccgatggtgagttgacatatgcaagggttaagtgctacatatgtcgtgtgattggagatccccagctgggtattaatcgattcaggatcgccattacttctcggatatgaagacttggtcactaacttgcaatctaagtcatggatggaatcataatgagcaaaaatcatg

SEQ ID NO: 38436 - DNA, 476 bp, Zea Mays
tctcaaaccaaacacaccataaaagattcaagggcgtccgcacacatctcgtagtactactcatcacaagcaaagcaatggatatacatcggtcgacgtacgcacgcacacagccggcttacgtacatacgtacgcgtgcgggtcccacgtacgggccgtatatccatccagcgacggtagaccgtgtggcgcagggccgcccccgcccggcacgtgcccgagtacgaaagtacgtacgtgcgagagtgtacgccggcggcgaggctcggcgaggtagcatatcgcggtcgcggtagaggagcgaggaccaagacagctgggcggtggcaggaccggccgcgacgtgtgcggccgtgcgggcatcacgccacacgtgtaaagcctatgaccttgggcaggcgtcccggcgacggggcccacgtccaccccgagcgcgcgtctccaggcgaggtgtggggtgcgtcatcgctgcacg

SEQ ID NO: 38437 - DNA, 2039 bp, Zea Mays
ggtgcgttgccttcttcatcctcgcacacggcaggcacgtgaccgacacccccagcgcacgaactccaaaatagcgagccgaagggggccacgaccacgagtcctccacctccctctccgccgcgtcgcacgcgcttgacgcgcgccgagagccgaatcggagccacgaggcagccgccccgggcggatcgatcctagggccagggcatgggcggaggggacgccgacgccggcggcgagcccgcggacgcgcaggccacgctccacatccggtgcaccaacggctccaagttcaccgtgcggaccgacctgggcgccaccgtcggggcgtttaaggcgatcgtcgcccacagctgcgacgtgccggcgccgcagcagcggctgatctacaagggccggatcttgaaggacgagcaaaccctagccagctacgaccatacaatccacatggtacgtggtgctgtgctatcaccaacatctactgcacctgcagccaaccaagaacctaccactgctgctcctgccagttccccggcaacaggattgggtggcttgttgcaaagtctgggtactacaggcgctgctgctaacagtgaggggttgtttggatctgccccccctggattagaccaaatgcagcaacagctagctgaaaatccgaacttgatgagggaaatgatgaatatgccactcatgcagaatttgatgaacaatcctgaactcatacgcagtataataatgaacaatcctcaaatgcgcgagctcattgaccgcaatccggatcttgctcatgtcctcaatgatccaagcattatgcgccagacttttgaagcagttcggaatcctgaactcatgagggagatgatgcggaacacagacagagccatgagcaacatcgagtcttctccagaaggattcaacatgctccgtcgcatgtatgaaactgtccaagagccttttctgaatgcaacaacaatgggtagcgagggtgatcgaaattcgaatccattctctgctcttctaggaaatcaggggtctaaccaagcaagagactcagctgcaaatggaacaactagagcttcagaccccacatcagggtctccagctccaaatactaatccacttccgaatccttggggctcaaatgctggctctgcccaaggagcagcaaggtcctctcctgctagcaatgttaggagtactacagcaagtggcctaggagggttgggttcagcagatttgggaagtacgcatggtgccagtggtggtggctctgatgctaccttgttgactcaagttttgcaaaacccaactatgatgcagatgatgcagaacattatgtctaatcctcagtccatgaatcagctgcttaatatgaatccaaatgtacgtaacatgatggaatccaatactcaaatgagagaaatgattgagaatccagaatttcttcgccagttaacatctcctgaaacattgcagcaattaatttcgttccagcagtctttgatgtcacaacttggccaacaacaagctggacaggagcggacacaatcaggctctggtgcaggcaatgtcaacctcaacaccttgatgaacatgttcagcgggcttggtgctggtggtggcctaggtgttccaaatgctcctaatgcaccgccagaagaactgtacgccacacaattagctcagctccaagaaatgggtttctttgacacacaagagaacatccgagccttggccgctaccgctggaaatgttcatgctgcagtggagcgacttcttggaaatatgggctaatagaatatgatgatcataactgtactcagatattgtgatttttagttggcattgtgagatcatgtctggctcattggttttacacccgaggtgtacatggacaatgtcgtattctgtacaagagggagagggaatatgtagtgcagaccatgagaactaaaaaaactgtatttcgattgctcaagaaaatatatgagatgcatccataactcagagatgtattttgttgcaatagttgggat

SEQ ID NO: 38438 - DNA, 1622 bp, Zea Mays
gtcctccggtcctcccgtttccccccttccccttccgcttcgccattccttctcggtcagaacgacgcgcatccccgcccgcacgttcccgtgctctcgcttctccggaggcgaccagggttgggacttgggaggctagcgagaaggtgctacccgggccaactcctccgatcgcccgcaggagaaggggatctctccgcctccccgccctcgtcgggcctttcccatcgccacccgcgaggccacgcgctccagctcttgtgaaccggaagggttctggatttctgagccaagcgaccagcacggtggctcggccgggctgacactcccctcccctgtcgcccggtctcttccttcccgagcagaactcccctgcgtcttgccgcttctagcatcggggagaaaaattatagaggaaggatatgcgggatccatttgatgcaccggttgatctcattaacccggaccataatggtgggaacaaactttctaggactggtgcagtgtctgctggggactatggtttacaaaatggacccaaatcctttgccccaaactccgacaccctagtcaggcatcaagtccaggttgcatccttgcacaaagacttagttttggaagatcccaatactcgtatcatggatcctgagaccaaggaactttactttagatcacaatcacaaggggacgagatcttgttgcttcgcaagaaaattgctgaggcatctctcaaggagctgagattactgggtgaaaaacatattctggagaggaggctcacagacttgaggatggctgttgacgagaagcaggaagaagctatatctggtgctttgcaacaattgaaccagaagaaaacccatcttgaggacaatatgagactggcaaatgaactaaaagttgaggaagaagagctatacttttttacttcttcattgcttagcatgctagcagaatacaatattcgcccacctcaaataaatgcttccatcattacaactgttacaaagcgtttgtaccaacagatgcatttgaagctcagatctttaaatgtgatatgactcaacctggaaatatatataatcccaatcttcagcaagtaaccctatcaagaaatgaaccttccccatcttataatttggattcaaataggaacactcttcaacagtatgctcaaggtccaagtgaccgacatatggatcaaatgtaccatggatccaattttcagcaggatactggcggtactactccctctaattattttgagggagacagaagagtagatggtgactcacagttataccaacctgatggtgacgctttacctggtattgaggggtttcaaattgctggtgaacctagaccaggatttcaattaacagcatgcggttttcctactaatggtactaccctttgcaatttccagtgggttcgccatcttgaaaatggtaccagacagtctatcgaaggtgccacgatgtatgactatgtggtcactgcagatgatgttggtacttttcttgctgtagactgtacacctatggatgataatggccgccagggtgatttggtgacagaatttgctaacaatgggaataagataacctgtgaggggatgctag

SEQ ID NO: 38439 - DNA, 3335 bp, Zea Mays
cagggagcaagggaaagagtccaagggaggtaatgcaccacaccaccacctccttgcggaaacgcacgcccaccatctccttcccgtccaagccgccgccttctggccttcctcaatctcgtcctgcgatttctccaacttccatctgattgtccgcgaccgcttcctcaccgcctccaccaaactccatcaagattccgcaactcgccgtcgcgatcttaagggagattgaaggaacctgcattgtgtgattgactgctgcctagcgttcggctgatcatcctgcttctgccatgggggaatcacagagtagcgaggacgcttccaggttcagagctttgggcaacggtgtctccggtgctgggcaggggagtgctggtgacaatgagctccacgatgggagcattgcatcgcaggctgtcagggcttatccgaatggtgggagatccttggtttctgacgttgggttgtttgacacgttgagggttggaagcaaccagtattttggtttctctcacagtgccagtggtaatccctatgatgagcagtccttgtcgtttgcttttgagggcatgggctttgattcacgcaaaactaattcacctaccagtcatcacaatgtaccactgacaaatggacactatccatctgaacgtgtggatggtactctgagccagcagcatgcacctgcaacacgccaatgtgattctttgggtctacagtttagtgtgcaacatgccatgcagaacaatgatgttgaacaccaggaacaatctcccaggtttccaccacagttggggactttctcaagaaaccctgagctgcacagctttgatcgcaattttggtgttccttgccatccatcaattgcatcagcttcatccttaaaaatgtggcaatctcaaatgtacacaccccatgatcagaatgttggctcaaacttcatgtggcagcaaaatactggtgtacaaccatactctattatgcaaccgaattatgcatgtccacaaatgcagcaagtttctgggtttggtatttctcgacataggagcaatgagcaggctgcagtctaccctcctgcaaagggcccatcctcatcatatattggaacaccaaattttcattggctggaaaatgggtattcttacctaaacggtgctgcttctcagaaaagaagaaatagtggcggtctgaataatacatttgcagacagcttcccaagtacatcttacaccggcagttcatgtggcagtggtgattttcaccattttcaatgggcagaaaaggttttcaattcatatggaccgcatcaccagcaaggtgataacctcagtcatccatatggcttaggtttatcacatcatcaaagatctgatatcgctcatccatatggcttaggtttctcacatcatcaaagatctgataaactcaacacagcaagttacgtggagaggatccgaatgagacctgacgttggaaattcagtaaatttttttgatttatcttcctatgctcgcttgctgaactccccattcttgtcctcacaatctgatacatataaatccattgatgaagtgatgggaagagtatgcatgctgtcaaaggatcaagatgcatgtcgctttctacaaaaattattatcagaaggcactcaagaggacattgataaaatctttggtgaaataattgacaatgttggtgatcttatggtggatccaactgctcactatttggtgcagaagatccttgaagagtgcaccaatgaccaaaggacacacatgattcgtgaaatcactaaagcacccataaagcttcataaagcttcttgcaatgtgcatgggtatgaacacaataacctttactattttatcatccctatttgttgggttttttttaagaaaggcaggcgtgatgcagtgttgagagctgtcttactgagtgaccaggtcgtgggttcaaagcatttatctcttctctagaccccactcatgtgggaatctccgatactaggtctgctttttttttatttgttggattttttttctttgatcttgtcgtgaaaaatttcaggacccgcgttgtgcagaaggttatagacaccatgaatacccctgaccaagtgtcaatgttagtgtccgccttaaatactggaatgatgtgtttaatgactgattcttatgggaatcatgttgtggaccactgcctgcagaaattgttacctgagcacaaggcattcattcttgaggctgctgcatcatgctatcttcaactagcaagagatcgtcatggttgctgtgtcctccagaaatgtattggtcattcaagtgatgaacagagaaacaacttgttgtgcaagataacatcaagtgcccttacactctcagaagatccgtatgggaactatgttattcagtttattctggacctcaatatcgaatggataacagtcagagtagtggatgagctggcaggtcactttggaaatctatccatgcagaagtgtggttcccatgttgtggagcattgcctgaagctagcgccacggctgatctgtgataggatcatcaacgaactcatgcatgatcctaaactgttggatatcatccttgatcagtatgggaactttgtgattcagacagcgcttaaacagtgtcagggtgaacatcatgctgcttttgttgaaactattaagccgcacactgctgtaatgcaaagtaacatgtatgggaagaaggttctttcaaggatatgcttgaagaacaagcactgccgatttgacctccattaacctagcattttttttttggcgaacgtgtcttcagagacagcagacgggacggaacccttgtacaattctgtgataacttgcagatcttacagatagtgtgtcttggcgaaaagggaaaaagatcttttctttcaagggaaattttggttggttaggggaagcattttgtcgctgccagtttagtgtaatttcgaatgtagaattagtatagtttcatctgcgtgtgatgatggtggtttacattgccggcgttgttatcagtactgtagtttaatgtacctgtcgaactgtgatatcagtaacatcgtgtaatgtgttagttgtacgataaaagctaaagtggcacactagcctggtcattttttcttttggaaaaaaatgaattgaatcggttgtttgaacacttattggaaccacgaaccggaggtgtagcaatttgcaaggttcttttcagcacgttatttgcattttgataatttgcacggctgcagcctggtctttttttcttttggaaaaaaatgaattgaatcggttgtttgaacactta

SEQ ID NO: 38440 - DNA, 1454 bp, Zea Mays
ctgctgctgatcgtcggcgcgccgggctcatgatcggaaattcggaaccagatcccctcactttttatcccatctttggctccggcgagctatgcgagcatgcggcaccaccaagcctgcagccgcgctcaccaggtgggcgctctggtcctcgtctctgccaccttcctcctcacccgcctcttcgaccgcttcctcctcgacacatattcctccgcccccataaaccccggccggcccttctcttccgctgacctccgcatctacgtctacgctgaggacgagatccagggcctccgcgccctgctccggggacgcgacggcaccatcaacgccgccacatgcctcaagggccaatggggcacccaggtcaaggtccaccaatttcttctaaagtcaaggttcagaacatttaacaaggatcacgcaaatctcttctttgttccgagctatgtcaagtgtgttcgcatgacaggggcactaagtgacaaagaaatcaatcagacctatgtcaaggttctgagtcagatgccatatttccgtagatcaggtgggcgcgaccacatttttgtcttcccaagtggtgcaggcgctcatctgtttcgttcatgggcaatatttctgaatcgatctattatccttactccagagggtgaccggactgacaaacgtggtacgagtgcatttaatacatggaaagatattattatacctgggaacgtggatgattctatggggaaagcaggacgccttcaactggtggagcttgcaaagcagtatcctgacaagctggaatctccagaactcaagttataggacccaaaaaattgggaaggatcgagtacttcaagcacctgagaaatgcaaagttctgcttggctccacgtggagagtcatcttggacacttcggttctacgagtccttctttgtgtgattttgtcagatgaagttgagcttcctttccagaatgtgatcgactacagtgaaatctcgataaagtggccgtcgtccaggattggacctgaactccttgagtaccttgaatcaatatcagatgaaaggatcgaggaaatgattggtcatgggcgtgagatgagatgcttgtgggtgtatgcagctgatactgagccgtgctctgccatgagcggtatcctgacggagctgcagaagaaagtgcggcggttccatcaatcgccggaaacgttctggctgcacaacagaacaattgtgaatagagatctgattgagttccacagctggaagacgcctgttccgttgccatgaaccatgtattctgatttcaactatagccggcatctgtttctgtaccatgttagacatttttcttgtgaagctgtgtttgttgttgttcttgctaatcttgagaataaacacatacatcgtgttaaggattgacaatagtacgctagatatatttttttactttatcggg

SEQ ID NO: 38441 - DNA, 2846 bp, Zea Mays
cttgtcgccttgtgtcatcctggtccacaaacttttgaagtgtgtcagcccagtccttaatcgttgttcgggtctcaattaggtccaaatgggtcgtggttgacatatggaccccacatgttagcctgtgtatcacttttctctcttttccacgtgtccgatgagagaaccgagaaaagacagagaaaatagatacacagactgatatgtggggtccatatgtcaaccacgactcgtttggacctaactgagacccgaacagcaattaggaccaggctaacacactttaaaggtttgtcgactagaatgacacaggacgacacgtttaagcacccttacgaaagtataaacttgcaaccttcgctagatgggcaaaacatagtacctggtcatagccttctgtttcaggagtcaatacacattgcatattggataagcaagagccatcattgacctaaaagttggagttttagaatgcattggactcttaaaggataagagctacttgagtcgacaaatataaattcctctgtggtgtgcaaaagcattatggtacgactggctcattagccaagtgtcatgacatgttagctagggtctcgttgtttattactgaagcaaaggagatacacttaggggtggtaatggatcatgataaaaaatgattcttcacaataaattagggcccttaaataattttagttcaaaaatgaatagaaatagagtctgatcctaatccgattcgatccttaaattttatagtgtaaaatctagaacccattaccacccctagatacactatcagttgaaacataaaacattatatttcattcagaatatttaaccaagcatcaaggcattgataacattgtgaaacgctcattgagcatttctatatattaaagcagggagcaattctgctttcaggtgcctccacgtcagcactctgtgttttagccgcatgatccaaatccaacggtaaagcagggagcaattatgctttcaggtgcctccgcgtcagcactttctgttttaaccgcatgatccaaatccaacggtaaagcagggagcaattctgctttcaggtgcctccacgtcagcactttctgttttagccgcatgatccaaatccaacggtcataatcacatctcacgcatcccagcggtctctaacacacgctctttctcctccaagcgaaggaccattctagatgatgcacgaaggagccatcaagcgaccgtttccgtataacccccagctacccctatggccctatccggtgtctccatttgccgtgaaggttctagacagtccactccccgccctcaaacgccgttacctaggtgcttcgtcgtcccctccacccccgtcaagagctctcccaagcgtcggcgcacaccgccacctcgccgtgctctacagggttgccctctacagggctgccgtgcctccgccccggttgctggctgtcaataagcacgacctcctcgcgcatatcgccagctttgattaccggcctgggatgatggctgagctcgacgcgcagatggggttcgtcgtgggcggaaccattctcatgctactcactgtcgtcttctttgagattcaggtcagtctcttctccttccctgaatcgggagtgttaatcgcagcctgtacaaatccattcaaattgcgtgaaactggttgtttaactggttgccaagcaacttcaggcagatatccatcccattttgatttcaaagttttaatttatgctctacatgtacatatcaacgtgttttggtacttttactaatacatttgtcagctactggtcgcattttccttttgatgtatttacttctatgcttgctttaattaatttcagatgtttgctaaaccaccaaagaaattatgcaacaacaaattcatatttgtgcatcagcatttgtttattatcatattagtgacaaacaagtaaagtcattttttgtagggctgctaagcatatacaagatcgagggaaaaactcataggaccaattactcattaatagcgccatggaaaaaacagtactcaagattattaacttttttatacacaaatttagtatttaaagtatataacaacctcaatgccaatatatatatatagggcaggtataacgggagccctgggcttccaatagttaaaggaagcccaggtcgatcatccctgcaacctggttcaacccagcgcaccgactggaccaggctgtcggttgcaccacccgcgcccacgtctctgcgcgcaaaaaggaatgcatgcatgagtcaaacacatccccttgcatgcgcataaatttaggaaagatacgtgtgacaatttctatttttaaatgctttatttcctccataaatttaggatctctgcaacagccatgcaactagactcgtaaggaccattttatgatatgtactgctactaaatatgctatcctgtgtagataattatgcaattcagtatactacgtaaaaatctgttaccagctgcatgcacacgaatttatgataaaaataatgtgcaacgaaaggaaataaattgcacgcatagaaacaaaaaatcgtatttaatgttttatttccttcataaatataggatccctccaacagctatgcagctaaacacactagatctagtttatgatatatattgatacaaattatactacatggtgtagctatttatgcaattcgttacactgcgtaaaaaatctggcatgttgttcactggtggacgcatctccaagttggagcgtaataaccttaagttttgagcataagatcctccaattataagcgtaaataccgagccaatgtgagag

SEQ ID NO: 38442 - DNA, 2000 bp, Zea Mays
ttgtttggtttgaagccggccaaagttgcctggcctggcacagatctcaggcgttggactttgagtgcttgggctaggattccttgccaaacagacctgagtgcatgacagcgacagccttctgggctcactcgcacggtcgcacccgaaacgccgcaaatccgggcccgcagcccgacccaactcaactcaggcagacactcgccgccgccacgacgtcactagtagagccgtagagggcaagaggcgacggaatgacggagcggcaggtggcggagctgggtcccgggacggcgtgctgcggctggaaccactgtggccgccgcctcgccgctggcgccgtcgatggctccgtctccgtctatgactcccagccgccaccctcgttcaagtggcaggcccatgagcaagccattgtgaatgtcgtctggcttcctccagagtatggggatgctatagcttgtgtttgtgctgatgggacactgtctttgtgggaggaggttgctgctgatgatcaacttccaacctggagaaattgtaaaatcttcgaggatggcaactctcatatactaaatgtacattttggattacatctgggaattctgaaaatggttactgcatactcagatggccaagtcaaggtctacgagctcttggattcattggaattagacaagtggcagcttcaggcagagttccaaaacattactgatccaatctctagatttggaaaacctgcatgcacttctgcatccatagcatggaatccaagaagaggtggaagccaacaagctagttttgcaattggctttaattcagattcgcctcatttcaactcttgtaagatttgggagtttgaagaagctcatcagcgctggcttccacttgttgagctaggttcacctgaggatacaggagataaagtgtgtgctgtagcatgggctcctaacattggcaggtgtggcaactggaatgggacatgggcggtatgacactcgcatcaaccggaggagatggcatggttaagctatggcaggctaatttggatggagtttggcatgagcaggctgttcttgactgcagtggatcacatgtctagggtctacgtgtttcagaaaacattttttttttgttcccagcactagaagttgctgctcttgctgcagaattatcaagtacttctttcgcttatccgcccaactattgctgtctcctgtgtggctggttgggcgctatcaaaactgggccattaacggccgtgggaccgcattgaaaagtccagaaaacgaaggtacatttgcttgtaaccttgtaattggggaagctacacagacgttgagtctaagctagtggacggaggtcgagatcaaccacgtgatgtacacgtggtcatgttcctcaaaatcttccgcaggtcctttcagatatcactgatatgcttgtaccattaaaagcagattaacacaggacgaccttcggctgcccacagatcagctatccacaatcaatgtttattttcatggtatattagatttaatattagcgctaggtttttcagatttggaggtagggagatggcagacggaaattgtggcaggatcaagcttcgctagttagctgtgacagcgttttacactaaaactgagtggtgcccagcccataagtgaggccattgtaatactgattctggcgaaccctatttgtggaagtacccaacgataaacctgctgcaggtagggatgtttttttacaattcgttttataatctgatcttatacttaaatttcatagctctaaaatttagagctcgttatcaccctagctgcaggcaaataagagaatttaccgaagtgtttcaatcttcaagtggaaggtgagtgaaatctacgggacctgtctggcgcgaatatattttgatttccatgtaacaattatacgcctttaaagtgaaaaaaatgcaaaacatttaataatttatacttctttccttaacatatgag

SEQ ID NO: 38443 - DNA, 267 bp, Zea Mays
ctccaaaaatccaaatacatctgcactcttgacatacggtaacatgattttttaggcacatggcaattgatcgagcaccttataggcataacatatactattgtaggagaaggagcttaattaccattgttgatgcgctcaacatcttgcaagcaatgggcattgtgtggctggccagctgctgctcacagtgaccctgtgtcgtcattgagaatcatggtcgtggaccacccgctcgtggtgacccaacgcccctgtttgccgtcg

SEQ ID NO: 38444 - DNA, 1009 bp, Zea Mays
aagaagactatgggcttctagcaattcacgtggttgaagacgtcttgtcccgttccagaacactcgcgctctcgcacgacggcacgagcgcgctactgccatagtgccatggcgagcggcggcggtgctgcggcgcggatggacccggaggtagcaacagagctggtgcggaagggtgccaccctcctcctcctcgatgtcccccagcgcaccctcttcggaatcgatacccagatgttctctgttggacccaagttcaaagggatgaagatggtgccaccgggagcccatttcgtctactactgctccccaaacaggcatgggaatgagtttgcacctactgtcgggttctttcttactacacaccaatctgaggtgattgttcgaaagtgggatgtgcaagaggaacgattaatcaaattatcagaagaagagatactcagaagctgtaagacattttgaatttgatgatcaacttggaccatacaatttagattcttatggagattggaaacaactttcggactacttgtcaccgaatgtcattgagcgtcttgaaccaattggaggagaaatcacaattgcgtgggagtcatcatggatggataaagctccccaaagtgacatggagagacgtttggtggaacaactaagagaaggaaagtttgcaaagaatgctcctgtacagtctgggcggagaggatgctactacacaagtatccctgcttcagttaagcataaggacatctctgggggtgacttgacagccctaaacttggacaaaacaagtttgctggagactattttggccaaaaattatgaaggtcaagaagatctattcttgggggagcttcagtttgctttcatagcttttatgatgggtcaatcactagaggcttttatgcagtggaaagcactagtcagccttcttttgagctgcagtgatgctgtgctttgctgacataaacttgccaactttgaagtttggaaggccctctcaggagtcagg

SEQ ID NO: 38445 - DNA, 863 bp, Zea Mays
agcgtaccgaactacctatcctatcccctcgcgtcgcatctttcctctcgtaacgcgtatcagtgccaaccaggcagccatcgccgcggccctcgtgcctctgcatcgcggcgcgccttggtgctccatccacgtaatccctgaggtgcggcacaggcgtggaggtatctcggcagtcggcagggcggctggagttcggtcccagaagagatggcggggggccctgatgtcgcgggcttgatcgaggatgatgcggtctccgtcatcacggagggcttagtggtgtgtgacatatgtggcagtggtagtgcccctcatcttattgcaaactgcgctcggtgcaatgcgcgtgagcacggcctgcaggttctggagatggtgttgggcgccaaattcccttgaggaaggtagcagctagtgtcgtgtgagaaatgttggcttgtttttgtggttgtgtgtattggcaatcgctggagcctggagctgtgtgtattggcatcgctggagcaaaatgtccatgtggcttggcactgatgctggctggcctcagaacatacgtcggatattctttcaccgcgagtgagcaattgaaattgggcaggtaataccatgttgtgggcgtaaatgcgatggacactgtcagtttcgtgggttttcttttcttctttttcgggccaagagtttcgtggattctcagcctcggttgcatgcgcaagatcttgagtgcagcatagaacacgcttgttcttaccagtacgtgtgcaagaaaaatggatctcggtatatttaattaatatattttcttgtttgatggtgaacataattatttgaactaatatatttactagtgtttatgtttatag

SEQ ID NO: 38446 - DNA, 1004 bp, Zea Mays
gatggcgggtcaaggttgaagccatcaaggcaacgtacgcctaggagtggagacgacgagagtggaggagggctgctgatgggcggaggagacgaccggagagcggcggcgctccagcgatcctcgtcgccatggagcgtgggcgagcggtggcgggcgcacgccgggatggtcctcgtcatgctcgcctacagcggttaccacgtcctcgccaagtccgtcctcaacgtgggcatgaaccaggtcgtcttctgcgtctaccgcgacctcctcgcgctcctcgtcgtcgcccccgtcgccttcctccgcgagagaagggttaggcctcccgtgacgcctcagctcctcgcttccttcgctctgcttggcttcactgggctgtatgggaacccgctcctctgcctcgtcggcctccgctacacaaacgcctcctacgccgcggctttccagccctccataccagtgctcacgtttctcttggctgccattgtcggcgttattgggggagtctctataattgctggtctctatctggtcatctgggctcgctacaatcaagggcagcgggcgcctacggatggttgtttggaccctcttattattgtggataatccaagaatccacaagacacaagaaagtcccttcgtgtagatcctgaaaaaaatgtgtggattatccacacatttgtataggtggtcttaaaagacagtatacttctatttgttaaacttcacatatgcattcaaataaacaagtggtcaaagattgtagtgaacctaggctctaattagaattgtatgttttgtagaacatttttataggctattcacctatctctagccatctagatcctatcagtcaccctgtaaaaatccatatagtccttcaatcgttggaaacagataaggatccattttgacataaggaagatgctgaggaaactttggtacgtgaagttctctatctcaacaccattggttcactaatgtgcctcctaaattgca

SEQ ID NO: 38447 - DNA, 2018 bp, Zea Mays
gcatttccccccaattctctcccgcccaaagccccaaaccaccacccaaaatcctctctgccgcccgccgatggccaccgccgccgccatggccgatgacgacgacttcgcctcgccgccgctcgccccgcgtgcgcgggaggaaggaggaggcagaggcgtgtaccaggtgggcggcgtgccggtggagttcccctacaagccctacgggacgcagctggcgttcatgggacgggtcatcgcgacgctcgaccgtgcccggcggcaggggcgctcccacgcgctcctcgagtcgcccacaggcaccggaaagtcgctctccctcctctgctccgcgctcgcctggcagcggcactacccgctccgttcccctcccgcccccgatccattgctccacggcggaggattcgtcccagatgatacgcagccgcagccgacgccagtcgtcccggagaaggctgtcaagaagaagaacgccccgataatctattacgcgacgaggacgcacgcgcagataagccaggttgtccgggagtaccgcaagacgtcgtaccgagtgcgcatggccatcttggcctcaaggaagcactactgtgtcaataaatttgcttgcgcgagcgacaacattgatgagaaatggaatgcacagaaactaagtcggcatccatcccttcagattggtggctgctatgaagttcacgatattgaggatcttgtcagagttggacagaaagcaaaaggatgtccgtattttgctgcacaacacatggcagaagcagcccaattggttttctgcccatataactacctgattagtccggttgtcaggagagcaatggacatcgatatcagtggttccatcattattcttgacgaggcacacaacatagaagatatagcacgtgatgctggcagtattgacatcgatgaagaatcactttgcttgttgcagggagaacttcaaaacctggccgctaatgaggccgttgcaatgatataccaacccttgcacgatattattcaggctcttattggttggattgctgagagggaggacaatttgcataatcatgagttcggacatccggcttcatattggactggtgaaaaggcaatgaatgaacttcagcgggctggtatttctccaatgtatttcccggtattgcaagaatgtgcaacaaaggcaattaaagctgcttcagatactgaatcagatggttcacacttaagtggtggtagtgctatgacactagagagtctattctcttcgttgagctacttttttgctcagaaaggacgcaattcatgtgattatcaacttgctttgcagcgttttgttaaaaaggaaggcaaggacgtaatttcttcaacatgcacaatgagtttgtggtgtctcaatcctgctgttgtttttcaagaaattgcagatcgaacactttcggtaattctgacttctggaacactttcaccaatgggttcctttacatctgaacttggtgtccagtttgaggcctgcatggaagctcctcatgtaattaatgctgattctcaggtttttgcagctgtgctatcatctggtccaacaaggcagatattgaatgctagctataaaactgcggacaattcatctttccaggatgaacttggagcttcactagaggaaatatgcagaattgtgcctggtggtgctctagtgttttttcctagctacaagttgatggacaaattgcaagtgcgctggtctcagacaggtcaatgggcacggcttaatgctcaaaaacatgtgtttgttgagcctaagggaagtagtgaggaactggatcctgttttaaaagggtactatgacgcaatccttggtaaagctcctgtcaagaaaggcagaggtggttcaaaacaaatagcgaagaatcgagtgacaaaaaaatcatcacaggaatcagtgaaagcaggagctgctcttcttgcagtttgccgtgggaaggtatctgaagggattgacttcgctgatgacaatgcta

SEQ ID NO: 38448 - DNA, 458 bp, Zea Mays
atgcctcctggctcgccgtcgtcgcccacagaccccacctcttccaaggtggttcctccgcctagttactgtagtcatggctcccctgccatcattctctccttcctctattgtctccttcctccagacagagaggcggcactggtacaggtgctaccgggcgaggtggagcctaatcgcatcccatggaggaccaccctccaatggatccaggacgtgaggcaccaaatcaatggagaaaaacaagaatcgtgactgcaatggcaaatggaaggtgaaggcccttttgattgacaacttaggaaaagatggaatggaactcaaattttgatggtcggtcaagtgtgtagacttgaaatcatatatacctagttaggctcaactttagcgcaaactgttggtgaccatgttttttagttagtattttagtttggatttagagtacacttatgtatgag

SEQ ID NO: 38449 - DNA, 3264 bp, Zea Mays
cactcggccactcccgtcgcggctcgcgaggagagagaagagtaaaagagcaccttcttctccgcgtccccatcccaccacacctccggatcagcagcgaagtagcctgcactacgccggtgcctagtagtagtagcaccgctccggctccactgttgaacgttgaacggaagccagaccggcccgcaccttgatgcccgctcctatggcggcttccaccttccccgtcgccccgctgcacgcgccgccgctggtgcgcccccgggtcgtccctccttcccccaccttcggctgctgctgccgctgctccgctccgcgcggggggctcaccttgcgcccgcaggcttgcgctccacgccgccgctgcaaccccgcgatccgcccggtgaggttctgtgcggaagttggttcggtgtggcccgtggtgctcactcgatcgatcagaagggggtttcaaaagggtataagtgtcgcaagggtggatgacaatgctgctggtcaagtcagtttaggtgatgacaacgaggatttagaccatatcaccaacgaaacccttcgtaccacaataaggaaaagcaaggaagtgctggcaaggcacaagatcataatgaatcagatatcagaaaagaagcagctcatctcaactatactagacagttccattcataatgagcaagagccactcagtggtcagagtgatggttccttatcaaacctgaatgcaattgcaaagggcacagagattggttatgaccatcagacataccataataggtctttacagcaatatgaatttgacaccacttatggagaatccatctacgatcagaacacatactatgaaagttcagaagacgacggcactgatttcagtgagaattatcagtataaaagttttcctagagctactcgtagtgtgtatgaactagaagaagataatggtatgaaacaaggctatgtggtacaactaagtcaagcaagtggacatgagcagtcagttaacgagggaacaaatgacaatgcgtctgaagttgatgttatgaatgtcatattggtagccgcagagtgtgctccttggtccaaaacaggtgggcttggggatgttgctggagctttgcctaaggctttggccaagagaggtcatcgtgtcatggtgtgccttttgtgagctattgtgtctgaaagagatttaactaagctcctactagttggaagtggtgcaagttaacatggaagataaacaggatggtagtagttccaaaatacggtgactatgaggaaccacaagagataggagagccaaggagctaccacgttgcagggcaggatatggaagtaaagtattatcatgcatacatagatggtgtggattttgttttcattgacaatcctgtcttccactatgttcaaagtgaaatttatggtggggaccaaactgacatctggaaacgaatggttttgttgtgcaaagcagctgtagaggttcaatggtatgttccatgtggtggcttctgctacggtgatggaaatcttgtgtttattgcaaatgattggcatactgcacttctacctgtttatttaaaggcatactatcgtgacaatggttttatgccatatgcccgttcagttcttgtgatacacaatatagcacatcagggccgtggcccgatagatgatttcaggtacctggatttgcctggtcattacatggatcagttcaaactttatgatccattcggaggtgatcatctaaacatttttgcagctggtattagagctgctgatcgtttgcttaccgttagtcatggttatgcatgggagctcaaaacacctgatggcggctggggccttcatagtatcattaatgaaaacgattggaaattccagggtattgtaaatggtattgatactgctgattggaatcctaggcatgatgtccatctacaatctgatgggtacaccaactattctctagaaaccgttcagactggtaaagcacagtgcaaggaagcactacagaaagagcttggactccctgttcgtggcgatgttccggtcattgcttttattggacggctggaccatcaaaaaggtgtagatctgatagcagaggcaatgccgtggattgctggtcaggatgtacaattaattatgttgggtactggaagacaagaccttgaagatacattgaggaggcttgagagccagcattatgacagggtccggggctgggttgggttctctgtccggttggctcatcggatgacagcaggggctgatatactattgatgccatcaaggtttgagccatgtgggctgaaccagctatatgccatgatgtacgggactgttcctgtagttcatgctgttggtggtctccgcgacacagtccaacattataatccctatgaggaggttggagttggatggacttttgagaaagcagaggcaaacagaatgatcgatgccctagggcactgcttgaacacatacagaaattactggagcagttgggaaggtatccaacgtagagggatgatgcaggacctaagctgggataacgctgctaaactctacgaggaagttcttcttgccgccaaatatcagtggtgactgttgttgaactgtccaaggaactgttgatatttgtcattcatagacctgaaggctttctgtcgcatagaagtcaccgactgtttcaattcttttggtgactgcttcacacagctgctgcatgctttgtcctgaattttgcaggacggtgtgcgtcgcaacagccaaattttttttgttgttgccagttcctaataatcgcatcagatgtgaatgtgaattctgagtctacctcctggacaaacacagtggatgaggcttttgctggaaacaggttaatgctggaggaaagattgaggggaagcgtcgtgcactttttgcaagtgtttacgaattcatttgttctacagggagagctcatttagacgctttggtacaggagggtggtagatagcagagaaactgatgctttgtatcttgagtagttttgttgtatctctaaattaggatacttgttacaatgttcagttcttcatatttttttccgtgcatatcctgtagatgatttagtgttccggtcttccgaatgatcgtaaaaaaggggtttgcaggttgttgagaataatatataattatgaaagggcatcggaatccctgaacaatactgaagttctctgaaagaaccgaggccatgaatgtatgtttcggaag

SEQ ID NO: 38450 - DNA, 2357 bp, Zea Mays
ctgccattcccctgcggccctgccccatactcccgtgtcttcccggccttcttcggatggccagacccctccttctccaaaaatcccagaataccttgggctcccgagcaggagagagcaatgcaacgagccatccggatagccgcggctgcgacaaggcgagcgctgtcgtcgtcggcggcgagggcatcaccccctcctccccgcggacccctggctcctggctggggcgccactaggtggctctgcagcgggcgggaggcgctgagctacgacgtggtgatcgtgggcgcagggcccgcggggctcgccgcggcgatccggctgaagcagctctgccgcgctgctgacaccgacctctccgtatgcgtcctggagaagggctccgaagtcggtgctcatgtgctgtcggggaatgtgtttgagccccgagccttggacgagctcattcccaagtggaggcaagaggattctccaatcagagttcctgtttcatctgacaagttctggctgttaacgaagaaccaagcttggacactaccatctccatttgacaacaaaggaaactacgtgatcagcttgagccaattggtgcgttggatggccacaaaagctgaagagttgggtgttgaagtgtatccaggttttgctgctagtgaggagtcgcaaccaatgatgttggtattgctaaggatggtaccaaaagggaaacttttcaacctggtgtagaactaagagggcgaataacactgcttgctgagggttgccgcggttcgttatcagagaaaataataagaaatcacaagctcagagagagagggcaagggcaacatcagacatatgctcttggaattaaggaggtttgggagattgaagaaggaaagcacaatccaggttctgttattcatactgttggatggcctttggatactaaaacatatggaggatcattcctgtaccaccttgatgatagacagttggcaattggtctggttgttgcgttgaattatcgaaatccgtttctgagtccctatgatgaattccagaaatttaagcagcaccctgctgttagaaaacttttggaaggtggaacagctattcagtatggtgcacgtactctcaatgaaggtggtttccagtcaataccatatccaattttccctggaggtgcaattattggatgctctgcaggatttctaaatgttcccaaaataaaaggaacccatacagctatgaaatcaggtatgcttgcggcggaagcaactttcaagtccctcgttgaaggatcttcgatggaactgtactgggagaacctcaagaagtcatggatatgggaagaacttcataaagctaggaattatagaccagcatttgaatacggattaattccgggtatggttttgtctgcactggaacgctacatattcaaagggaagtcaccttatacattgaagcatgggagacccgatcatgaagcaacagacacggccaatctgcatgcgcctattcaatatcctaaaccagatggacatataacatttgatgtcccaacatctttatacaggagcaatacaaaccatgagcatgatcagccgcctcatctccgcttgagggatcctacagtacccgaacgagtaaatgttgcactgtatgcagcgccagaatcacgctattgcccagcccgggtttacgaatatatctctgatgagaaaggtgacccaaagcttcatataaatgcacagaattgtcttcattgcaaggcttgcgacatcaaagatccaaagcagaacatcgagtggacagttccagaaggtggaggtggtcctggttacacagtaatgtagaatgctcaatgatgaaaatatgttgccttcaaaaataataacggctcattcaccactggtgtcaaactggaccaaatccctggctaattgggttggaagttacaccagacatctagcaatgagcaacttccttaaagcagtagacaggatgtcaggatgttcctagagctatgtaccgatcaggatcagtcagggaaagaagcgtgcatcacatggatgtggtgactgtaaaactattgggaagatgcaatttgtcgaccaataacaggcgctgtaagagagatctgtcccaaacgaaagatcgtaaggtgagatggagaatggcccagagctgggaatgtattaaaatagacagagtagataggccaagccccttatatatgggtatataggtaaatacatgaggactaatccaaaaccctagcgaggttgctaacacgccgtaatcttcaactttaacctgtacagacaacaaaaacaatcgacgatagccctttggtgaagatgtctgtg

SEQ ID NO: 38451 - DNA, 2526 bp, Zea Mays
attaatttaagtgtgtagtgtaacgacgattaattaagtatcgaactaattaggatctagtgctaattttatttacgcatcgcatgaatatcaattaatatgattatgttgagataagtattttaatctatagctgcttaacgtaatcgttatgtctctcggctgcagcttcgaccgtcgtagtttcttttctcgcatagtcgtagatgcgagccctgcgccacgcgtctgtttagttgttctattttattgtgtggtgtattgttgttttctatgttaaaaatgtggaatgtatgtttgaactcatataggtaacggtccgttggcagagtccgaaggagttgcaggcgaagaccctgagcaacagctggttggtgaaagcaagtgtcctataacccatttatgtcctacttattttataattcatcccccgtatttacataattcatatataaggatttactagtttttgtttatcttgtccttgttcacctatttgggttgaattatttctggattagctctatgctagcgctcactttaatcaataaacataatgagaattatttatgatacgaggtttacttttagaaattgatgatgacattgtgatatttaaggggctcaagcggtttctcgagtgtctctccgtaaggactggtttgttggatgatcacaaggaaaacagtacaaccatgagggtagatggatgctcttagctaattaattagaggaaccgatgtgtagtttacttcgccgtcatgctgctaataaggttcgatgtatgcggctcgctctaccgagggtggtttgccccttcggacgggcgaataccgaaatgcggacgggcgaataccgaaagacgccttgtgacagcaaacacggaaactgagaacacgagcagaaggcactcgatcgcataggtacagacgtacagtagcacagccgcgcacactaccaccagtcggacacccgccccgagctccggctatggaggaagccgccgccgccgccgctgcttgggcgtctaatgccgccacgcccgtcccatccgagcccatgagatcccctcctgatgctgaagcctccgttgatcctaccgctgttggtgacgatgagcacgactccaaggaggtcgttctgcgcaggtacttcctccaggagtgggagctggtctcagcgatcctccaccgtgtcgtcgccggcggcggcgttgccgaatccgccgatgtccataggatccgctctatcatggacaaatatcaagaagagggtcaactattagagccataccttgagaacattgtttcaccacttatgtcgttggttcggtcaaagacaatggaacttggtgctagtactgatgaacttcttgacattatcaagcctctgtgtatcatcatctacacccttgtcacagtgtgcgggtacaagagtgtcatcagattcttccctcaccaggtttcagatcttgagctcgcagttgctcttcttgagaagtgtcatacaatgagttcagctactgctcttaggcaagagagcacaggagaaatggagactaaatgtgttgttctattgtggctttatatactggtcctgatcccatttgacatatccactgtggatacaagcattgctactgctgataacgtcgatgggcctgaggtcgttccactggtgacaagaatactggacatctgtaaggattatctctccagttctggtccaatgagaaggatgtcaggattattgcttgcaaggctcttgactcgtcctgacatggcaaaagctttcagcagttttatggactgggcacacaagatgttactgtctgtatcagatgactttgttgatcaatttagatccattggtatagtggaagctttagcatcaatatttaagattggtaaccgtagagcactgcatgatgctgtttctggtacttggagtgattgttcacttgtgatgaagactaatgtctcagccaggagtccacttcttagaaaattcctggtgaaactggcccagagagttggtctcatcagcttgcctccacgtttaccatcatggcagtataagtcaattagcagttcgttgggtgcaaacctttcaagttatacagctggagaagtgtattcaagtggatcaagggaacaagttaacattgatcaaataggcatgtgttttttggaagaagatatggatgttccagaaatagcagaagagattatcgacttgctattgactggtttgagggattcagatacaattgtaaggtggtctgctgccaagggaattggtaggataactgcatgtttaacacctgcattgtcggaagatgtgctatcatcaatattgcaacttttttctcctggagagggtgatggctcctggcatggaggctgtttagccttggctgaacttgctcggagagggttattgttaccttctagctttcctgatgttgttcctgttataataaaggaatggcagcatgtgatggctaaggagattgctgctcttgag

SEQ ID NO: 38452 - DNA, 2076 bp, Zea Mays
ggtgttacacgtgtagagctaggagagatgaagaggaaggctactaatcagggacagacaggaagcagtacccatccccattatgctccaccacaaggcaccccaagtcgtggtagtcccagggaacagtcatctcaaagcccaactcaacaagcctaaccttcagaatatcatagatcaggtcctcatcaagcaggcattccagtgggaccagttgctcataacacttcaacatatagggcatgctttaaatatggtcaagtcagacattatgccaacaactgcgctaacaaggttgcctacactactctagctctgacgaagcagtgccaagcctcaggaggtaaaagccatcccttatcagtcaatcaagggcaaaaaaacttctcgtgcggccaagtcaaccatatagaagtagaggcagaccccgaagaaccagaagacctagaagatatgcttggagaaaatgaagaagtctctcaagaagaaaatgaacagcaaaattagagtctcttatctccgtactaatctcgaggtcaagattcgctttaagggtgtagaatttgtgaaccctaaagtatgtctttaagttgttaggaagttccttcgttattcaagaaataatatttagcatttattctagaatatgaatctttatcaaagcatatccttctaaataaatatacaaataaaagtgatattggattttgatgtcccaaacctaaatttgagattttaaaattttagaatataattttgaagcttagaaaaataaacaatagaaggatttcctatttaatcgagtgaatattcccttcatttatattacatttataggcattcaattaaataagtaataagaaaaatttaaaaaaaattgtatctcttgctgagtttttgtcagttgcattcaatgcgagtttgaaacttaaaactaagtatgaatttgagttaagtttgaataaggaaaatagaaataaaacgaaaaaagaaaagaaaaggagaagctttacatgccccttggccacaaccccttggacccacttccccaatgcaccatgcagcccacttagatccctcagccagcccacctcctgcccgcgcgtgccagcaaccgacaggtagaccccgcgtgatagcaccaccaccgtgcttggctttaggcaccaacctcaatgttgtctcactggcatgcgggccctgtggcagaacctccaagttatcgggcccacatgcacctgtccttgtctcaaagacctcagacggccatgcatgtgcactagataacttaacaggatccgtccgattgccccaaggacaccggataaaccacttacaaccagaaccgcgagattaagtaacacaaatcacacacaccaatatttttgcagcggaaatcttattaccaaattttacaagttacaaaaattttatattattttatcggagtgattacaaaagtataagtttgaaatatatgctagctcaaatgaccatcctcagtaagaagataaagacaggttatacttatataagaaggccgagcccaccggcacttaacaccatcaaaagcagcacaaagttagaacctgaaaaacaacagggaataaaaccctgagtatggaattactcagcaagtcttacccgactaaggaaaagactctcaagggtatgctggataaataggaatcaaggagaggctttagcaagattcaacttagatacttttgcagaaatagcttactaaagtgagtccttactttcaacattttaacgccagattaaatatttaatagactctgtttgcatctagtctaatttcatcatctcatctatacaacatcattttatccatagtgttcacatcctgacttaggttgcaggtcagtgatcaagtctccactctccggggatataacggcgatccgaatcgatttactcagctgaggatctctaaccacacgacatatgtagcacttaacccttgcatatgtcaaccgttcccacagatcctccacaacgtgaaccggtccgcgctacccgggagcacagtactcctccatccagcctctagcc

SEQ ID NO: 38453 - DNA, 245 bp, Zea Mays
gtcttaagaacctcggtggcgggttgacatatgcaagagtttagtgctacatatgtcgtgtgattggagatcctcagctgagtataatcgattcggatcgccgtaccttcgcggatatgaagacttggtcacttccctacaacctaagtcaggatgtgaacttcgtgaataaaaatgatattgtattaatgaaatgataaaattagactagaggcaaacagagtctattaatatttaatctggcg

SEQ ID NO: 38454 - DNA, 2394 bp, Zea Mays
agttgaacattgattaatctgcagaataggagacgatgtggatccttgggttctgatctcccatgccacagtttataacgttgaaggattcaaaaatctacagaactagatgatacttgcataatgcagtcctcaggtatttggaaggcgcatgctggttcatcacagtcagagggttcgggtctggatatggagaggaacggatgcaatcataattattgtccatctcctctccaaccaattgcctcagctggtcagcactctgaaagcagcgctgcatacttttcttggcctacatctactctaatgcacgggtcagctgaaggccgtgctaattactttgggaacctacagaagggtgtactaccaggacatcttggtcgcttgccaaagggccagcaagctaccaccttacttgatttaatgattataagagcattccacagcaagatcctccgccggtttagtcttggtacagcaataggctttagaatcaggaaaggaacattgactgacacacctgccatccttgtgtttgttgctcgaaaggttcacaggaagtggctcagcgctactcaatgtcttccaactgcccttgagggacctgggggtgtgtggtgtgatgttgatgttgttgaattttcttattatggtgcaccagccccaacaccaaaggaacaactttatgatgagcttgttgatggattgcgtggtagcgaccctattgtaggctcaggttcacaggtggctagtcttgagacctatgggactttgggtgccattgtgaagagtcaaactggcaataaacaagttgggttccttacaaacaggcatgttgcggttgatctggattatcccaaccagaagatgttccatccgctacctcctaatcttgggcctggagtttacctaggtgccgttgagagagcaacatcatttataacagatgatgtttggtacgggatttacgcaggaacaaacccagaaacttttgtccgagctgatggtgcatttataccgtttgctgatgactttgacattacaagtgtcagcacatcggttaaaggagttggagtcattggtgatgtaaaggcaattgatttgcaatcctcaattggcagtctcattgggagacaagttgtcaaagttggaagaagttctggtctgacaacaggaactgttgtcgcatacgcacttgagtacaatgatgagaagggaatatgcttcttcactgactttcttgtcgttggggagaaccaacaaacatttgatcttgaaggggacagcggaagcctcataatcttgacaggacaagacggtgagaagccacagcctatagggattatttggggtggtacagctaatcggggaaggttgaaacttaaaagtggccagggtccggagaactggaccagtggagttgaccttggccgccttcttgatctcttggagctagatctgatcacaacaagtgaagggctacaagctgccttggaagaacaaaggattactctagccgccgctgctgctgcggcaactaattcaactgccacagaatcgtcacctgttgctggccctcaagagaatgataaaatcgacaaaatctatgaacctctcggcatcaacatcattcctcgggacagttcttccatatcaacagaccaacccaacgagaatgtggaagagctaaacctgatgtctccgatgcgcaacggtcaagaaggcaacggtgacttgaataacttgatggacttggaactggaaaattcacctgatggtatttgtattgccctgaacctgggagagcgggagccaaaaagactccgctcagattttgattcgaccctggacatggacttgcagaaatgaggctgttatgctgcagacttgttgcaggaggctctgcactattcagcttttgtgttgatcattgaaggtatggccataaaggaaataatatgtttctggacgactggacctgttgtcctgcttggagccggtctgggttaagctgtgaagctcctgctgcagttttgcgtctagtgtcaagtgctctagtatatctagtgttgcgtaagatgtcggcacctcaatttgacagaggcgccatacttcttgcccatgtaatgttgtcatttgttgtatgctcgtgtatatgtactacatgaagcattgtaaaattgagcaacagcaaccggagctcgagaatcttaggcgcatgcgcaaccatccaccaaccccgtacctgatgaattgacaataaagctggatattttaggtgtttggaaagtgtgttgctcttggaattttggggagagatttgggtactaactttggtaaaggcaggccactggtgttgtccttgcctgcctgatcaaacaacatgctggctag

SEQ ID NO: 38455 - DNA, 1532 bp, Zea Mays
ctccattttacctctgcgcgtccctgctaaccgttccacatagtatcacaaaaaaatggcactaccttggcatcgtcttccccaattcgggtgtatggaattcttggagcaaaggaccagcacacggtcacctccaaagaaagacccaggctgcttctacaaggagctgtacaaagattttggatgagatgatggataatggttttccactcacaactgagccaaacatcttgaaagagatgatcaccccacctaatattgtgaacaaaatgttgaatgttgttactggcaagagttctacccttggcagcaaacttccagatgcagctgcttcttttgtaccttggcgaagaacaacagtcaaggatgcaagcaatgaagtctatgttaacatagtcgaggaacttgatgcatatgtgaacagagagggggttcttgtgaaatgcgaagcatacggtgaagtccaagtaaactgcagcctcccaggatgaccacatgtaagcaataggtgctgctaccagcaaaaagggggactggataagcacaagtgaggtagaatttcaaggttctcattatactttattttttcctggtacacaatggtgaaaaagcagggccagtcctagagttccctatgggttaaatatcttgtgtagtcatttgttcaggaagccagaggccttgctgctggaccaagattagtccaaaggttatctggttttggggaccatcgatctgcagacaatgtggcaagagtggtagaggaggagcttgcacatgcctctatggtttgtattgatttctcaaagaatgccaagtgatgggtcgtgaaccaagcaatactttccaagacttgataaaggagtacgaagttgtactgaagggtccattcaactacacggctcgtgatgaagctggtataccccgagaatggttcatgatagattagcttgtattgttgagatggaaaaagagaatgcaagtttgggataagcagttgaagtctcatcctccaaagaacgttgaatcagaaatcttgtgtgagcatatcaagaaagagagggagacagcaaaggctggaaaacgaccatactatctgaagaaacctgaacttcgcgaaaggaagctaatgaacaagtacaacgagctcaaggaggcaggaaagcttgatgcattcatggaaaagcggcggaggaagaatgcctccaaagatcatcggttcatgccgtaccgacgcagtggagatgcataatagtttcctgattctggagacgagcgaaaggatgattttaggacggtgttctcatggtggctgggacactggacagtcagtgtctctgttactttgttgccctagccgtacaatcgtcagctccgtgcacaatctctactacttcttaagaatagagtgcaggcgtccacagtggttttttatgtttctcatttcactctctgcattttcagttacaactacactgcatatgctggcagatttgttcatatattactccagctgacattttcactatcgc

SEQ ID NO: 38456 - DNA, 1668 bp, Zea Mays
cttcttattcagttctgtttcgtgccaatcagacggcggccgcctcctctccccccgctgccgagctcacccttccgcctgccgcctgaacttgtctcgcccgcggcagatctgctccttccgctcgctgcaccgcaacccggataggagaccgcgcgcggtcgagaactacctggggaccaacgtcctcgaccagctccggtgcggccggcacacagctccacagatttggacagcgcaattacttaagctatttgtattcggatctgatccaaccctggtggtcagctggactcatcgcccatggagcacactaagtcaggccccagcagttggccagaactggccgacgtggtgccggtgccgcaggacgatgggcctagccctgtggtgtccatcgcctatcgagatgactttcgtgaggtcatggattacttccgcgccctctacctcaccggtgagcgaagccctcgcgctctccgcctcaccgccgaggccatcgagctcaaccccggcaactacactattttgatttactagaggagatgaaatttgtcgaaaaaattgctgaatgcaatccaaaaaattaccaaatctggcaccataagagatggcttgctgagaaattaggacctggtattgcaaacaaagagcatgaattcacaatgaagatacttgctattgatgcaaaaaattatcatgcttggtctcataggcagtgggttcttcaagcgttggggggatgggagactgaattagaatactgtgaccacttacttaaggaagacgtcttcaataattcagcttggaatcagagatactttgttataacaagatcaccatttcttggtggccttgcggcaatgcgtgattcagaagtagactacacaattgaagctattctagcaaacgctcagaatgaaagcccctggaggtacctcaagggtctatacaagggtgagaataacctgctagtagaggacgagcgcatctctgctgtttgtttcaaggtcctgaagaatgattggacttgtgtatttgctttgagtttgctgctcgatcttctctgcactggtttgcagccttcagatgaacttaggtccactcttgaaacaataaggagctcccatcctgaaaccgcggatgatgatcctgcagccgctgtttgctgtatcctgcagaaatgtgatcccctgcgggtaaattattggtcttggttcaaggacactctttctcagatctcatgacttcacatgggttcaccccttgtccgcgctggtccgggctctgtgagatagacatgttttagatagtttcattggacacccaaacagagcggacagagtgtatggctgctaccttctccgtgactgaaagcagtgcttgtaacgattttgtttagtaaaatttgtgagtgttactgctccaaacaacaccttatgcaaccatatttgaatatttcacatgtaagcttgaatccaggtgtgtttgttaatgtattacaattgccatgggagcctaaatgagacccataatcacttccactagagtcggaagaccgtgtcgagcagttcactcatatggtcacttaaagcactcttctgcactgtaaattgtaatattcgcagagttttaaatatgggtatgacgatgagtacgctgctgaaa

SEQ ID NO: 38457 - DNA, 4022 bp, Zea Mays
atggatggtggcagcgcacttccagctacaccggcctcacagccatcatcgaccatactatctcaagcagggcaaggatcaggtgtcacacaaaacaagggggctgccttcatccacgagccgtcgctaacaccggagagtcgcaaagtttcgtctagcgccaagacaaccccacatcagggagacaacctgctgctaggaaaagaaattatccctgctccgcctaacgtggagacgccatcaggagcccacaacacccctggtgccgacactctccgcctgctgcctctaaaactagcaagttcgcaggatgacgcttacagtgtgctagatggatctacaaacaagattgacaaaagtgttaccggaaaaaggtctcgcacatcaccttccaagaaggctgccaagaaactttttagagatgaagtcataaccaatgacgatgctactggttcttcatcggttaatgtcgaggctggcaagaatgagaaaggttccactgtttaccaacaaaggttgttgtcatgtgattatgctgttgtatatggcttcagtttacctgctgcagaaagattcatagcgttggcaaacaaagagacgcttattgcaggtggtcctttcgtgcttccccttgcacacaaacacaaagtgaaaattcttcctgctgattctgagcactctgcaatatttcagaccagtgagtgtagcttggtggattgcctaaagtacttcgctgtggtggagcatcttgacagctatcgttgtgaccgttgttggcacatcattgctgccaaatatctttctcttagatcaaaagttgatgaggaaaagttgcagggatatgttccccctggagtcactgccatgttcatcatcttcacgagcaacaaagcagctgattatcagtcagtgcccgaaggtaacacctcagttgtttctcatccaaataccagtggagacaaagatgtgattgttgaaagaacgcatctaagccttaactttgtaatacatattagccaagacccctcggcgcgcccgcactttcggctgaggcgccatgcgccccgcgcgtccgccactgccaattcgtcgctcttgactctggaagaggtggctcgtgctgctaaggggaagagggcacatacggttatgctcacccagttgctcgctttggcaagccatgctttggcagagaaaccaggcctgaacctaaggatctgtgggaagagccgataaacgctactatgtggagaccgtgttctgatcaaagggattggaaagcctcagagggaaccaatgggtacatcatgatcagtgcgaatggtggcataaaccagcaaagggttgcgatttgtaatgcagttacaatctctcggttgctcaatgcaactcttgtcctcccaaaattcttgtacagtaatgtgtggctggacaaaagtcagtttggcgatatatatcaggaggattattttatcaaatatctgaaatctgatattcagattgtaaaggatcttccagtagagctgcagtcattagacttggaggccatcggtagccttgttaatgatacaaatgtcatgaaagaggcaaagcccagtttatacgtaaaaaaaatactgccaattttactgagaaacagagttgttcactttataggatttggcaatcgcttatcttttgacccaataccttctgaccttcagagattgcgatgcagatgtaattttcacgctcttcgttttgtacacaaaattcaagaaactggtgcagttcttgtagagaggttgcatggccacagggcctcttcgtcacctttgaaggataatcttttaggccagtttgctatcaagtctgaccccagtacgaacaagagtgacgcatccaaatatctggctgttcatctccggtttgagattgatatggttgcatactcattgtgttactttggtggtggcaaagatgaggaagacgaactagaagcttatcgccaaattcactttcctgttctgtcagaactcaagaagacgacaaagttgccgtctgctgctttgttacggtctgaaggcaaatgtccccttgcacctgaagaggctgtgcttatgcttgctgctattggtttcaagcgcagcacaaatatatacattgcaggtgctgaaatttatggagggcaatataggatggctgcaataagtcgtctttatcctgctttagtaactaaagaaacccttctgtctccatcagagcttgaaccatttaggaacttctcatctcagttggcagccctagacttcattgcatgtgcagctgccgatgcatttgctatgactgacccaggaagtcaattctcttctcttgttcaaggttaccgcatgtactatggtggtgggaactttcccacaataaggccaaacaagcgccggctagccagcatacttgtgaagaatgccacgattgagtggaatgaatttgaaagtagagtaaggaaactcatacagcaaactaagcaagttcatgagaggcctgttgcaagaagcatatttagacatccacgatgtccagaatgcatgtgcagaacagagcactaatattttgatagtttcttgtatctataccaacagttgttttttcagaagaaagactaccaattagatcgccaaaggtagttcttttgtgctcccgctgaaatctggatagatctcttgcccttgaactactttggaatcaaactgtacaaaagaaaatataatgattgagcccttgtttgtatcagagaagcaatatagctgactagctcatcaattatcttactgctatggtctactgctaggcatcatgttggatttggggtatttggcagaactttgtctcatgtttgatggaagtagaccagggactaaattgattggggtcagctaaaccattctgtgaatgaaggtgcatcatctgcagctgactgtggaagtaatatgttgacaaaactgagcaacaacattcttattgttgcttgcctaaattctactcaggttaccattcaacaaatcaagctgccagagttctgccaaccttgtattgccatctccattgttgctatcgtgctccggctgaaatctgaatatatctgttgcccttgaactactttggaatcaaactgtaaaaaagaaaatacggtgattgggctcttgtttgtgtcagagaagcaatgtagctgactagctcatccattatcttactgctatggtctactgctaggcatcatgttggatttggagtatttggcagaacttcgtctcatgtttgatggaagtagaccagggactaaattttgcacctcgataacaatgctgccatatttttgattggggtcagctaaaccattctgtgaatgaaggtgcatcatctgcaggtgaatgtggaagtaatatgttgacctaactgagcaacaacattcttattgttgcttgcctcaattctactcgggttaccattcaacaaatcaggctgccagagttctgccaaccttgtattgccatcttcattgttgctatcgtgccaggtggcatcttgattccttttttaaccattcttttgttcattgtaccataagagacgcatatagttaggttttaagtttatcccaactgaaaggtttcattatcaacgagagaaatgttcctttttgtgcaatctttatatgtgctcatccaacggcacttgtatactaatgttttggctattttttttgtttccaaattttctttggcaatgccctgaaactgtgaatgaactcactcagactctgattcgcagagcgatgctcagaaccacctgatctctggtgttgtaatgaatgttgttggaaggcattttgtatggaaacctttggattgctagttacagttctgatctgaaataaagcctgatctccggggagtcacatttgacgtgttccatacttcgatgactactgctaaagatcagcattgcataacatcatgatgcttaaactatctacaacagatttc

SEQ ID NO: 38458 - DNA, 208 bp, Zea Mays
ggtatctattaaaaccctcttgaaaactaagaggagaatttattcagggggagttttgtttagtcaaaggaaaatcatttgaaacagggggagaaaatttcaaatcttgaaaatgcttctcgcaatcttattcatatacctttgactatttgcaaatagactttgaaaagattttccaaaagaaattgcaaaaacaaaacaagtggtg

SEQ ID NO: 38459 - DNA, 398 bp, Zea Mays
ctaggtcgttcgtagtcggatcgcgagagtcacctcctccaccaaataaaattattcacctcactaaaagatcaggcactccagttctatcaaatggtagtagattttcaggttgctctgtgagctttatcaagttgtatccctttagtttgagagtgttcattgtcccaacgtccatcagaaaagctacaaaacatttaggctagaaccttgtcctagaaccatttgtccttgcattttctttcagtaatcttgtattattgaatttgtgtgcatttacgtcaagtgttgctagtttcctcgtagttccgttgtcaccgtcgtttttttcgttcatacatttgacatctgtcgttcaccaccattctttttcgttcatacgccgacgcctttttttc

SEQ ID NO: 38460 - DNA, 1382 bp, Zea Mays
cacagcctctccgcaatcgacgcccactttcctccgtagtcttcctcccacaaaaactgcgccacatcttcatcctcctcctcgtaacctcctccaatcgtgccggcggcgcagcaaggtagatcatctgagcctattcatcgcaacctcaagatcccccggggaagaaggggccatgagtcccacggcgtcgtgcagaagatatagaacctactcctacaggctattagaagctgaaggcaattacaatcatcaagaacaatcaaatgatgcaacggctaggactttctcaattacgatcaatgatggccagtattccaagtggaaggatgaacgatgatgctcctcaggaatttggatcgttgtatggtggtgatgatattgagggatctgtggatgagatgatcagtaagggaaatgaagaccagaggcacctacccaagctgtcaaatttgcatcagaaggtgggattgtacttaggcagcacatgccgatagttccacacaggacggagtacaagaaggaagagaacaccggtaaaatagaaaactacactggaaagattgttcagtaagagcagcatgcattgatatgctaaagggtgggcaacgctagatgaggtataagctaaaaaagaaatacttcaatggggttccagcgaatcaagtgaggactacatcgcctatttcgttcatgatcgacgaccaatggaaacttctaatggaaatgtggtctacctcaaagcacaaggacacatgtatgaagaacaaagttagttgtgaacaagtaaagtttccacagggcacaggctctcaatcctacattgcaaaggcatattcaatggttgatatggaatcaatggcggcagcaccagttgaagatggacaccacgtaaagtcttcaatagaacaaaggtgcagcaacttgagtctcaattacaaattgagaggcaagaaaaagatggactacgagatgaagtccaaagcttgaaggctaagacacaggcatctgatgagaccattgctaagtgaagaagtccatagcagaaaatagtagcctccttcgtcagattttaagcataaattgtagccaagtgcctccttaaatatgcctaccaacttgatggtgtcaagatacatcacataccagatggaggattaaagttatatgagcctaagctacatgattattaggatttatgttattggagtccaaatttgttttttgttgaaatacttgtgctagatttttttggatggatgatatactttgaaattagataatttcggcattacaatttattttgtttaatgacatattgtatgcatgaagaatcaatcatgatcgcaaattgtatggatttataatatttcatgaaaaaa

SEQ ID NO: 38461 - DNA, 2928 bp, Zea Mays
acaccgcacacccttgcttgtctccaggcgtacttgcgtttagcgtctcttccctgctgccatctctgtccggagggcaagccatggcggcgggcggggacggcgtcgctcgccaggcggagctccgccggatcgagggcaacatctgcttcaagaaggcgcgcctcggcgccgccatcgactgctacaccgaggcaattgcgctctgccccgacgtcgccgtctactggatcaatcgggccctgtgccatttcaagcgcaaggagtgggccaaggtcgaagaggacagcaggagggctcttgcgcttgattacactttagtcaaggggcactatctgctggggtgtgcgctactcgagaaggaagaatctgctcttgctatcaaggaattcgaaaaggctctaactctcttaaagtctgtggattcaacgtatgaaatggctgaggacatttggcaggtccttgcaaaggcaaaatacttagattgggagaagcattccactgaacgactatggaggatggaaagtttgaaggaagcttgtgaaactgctctgcaggagcatcactttctaactggtacacttgaggaagactccaacaggtcagacaacgagtattcagagcaaattaaactactatcagaggtcttcagccaagcgacagtcgccgatacaccaacagatgtgcccgattacctttgctgtcagataacattcgagatcttccgagacccagtgatcacaccgagtggtgtaacatatgagagggctgtacttgttgaacatctccacaaggtgtgcccttccgctgacgtgaagctgtttactttttgttggcaatttcgacccggtgacgcgagaacctctgaaggagcatcagctggttccgaatctggccatcaaggaagcagtgcaggcctacctgaaagagcacagctgggcccacaagttgaactaattggatgccgtgtgctttgctgactgcagatgctgataaatcggggatggcctgttattagagttagattttatgttgtgttggaatgagattgattggatagctcgattcatcgttcttagtattgattgggtaacttgacctgtaactgcaattctgcaaacactcattggatggatgtaatgaagcaagtgtacatgaaacattggttggttcagctcactgcatgtatatggttgcagcattatatatggttggtcgtagacccagtgggcctcaaacaagttaggcctagtttggatactctagtaatgagtgggattgaagtggattaagatgtattgagagagtatttgatgtattggggatttacaccctctccaatcccttcaaaacactccaatcctaaagtatccaaactaggccttaggtgggccggcctctatccaaggcccagccttttacttggcgctgacaagacaaaagagaggagacgagaaagaaaacaaaccctagcccgctacccctgccccttctctcttcgtcgcgcctccgcctccgccgtcgtagcatcctcctccgccacctcggccatggcgacatccccagcgctcctcttcccttctccctcctcggcatcctctgcgccttcgtcggcgcgggtggaggcagtggtgcttttcaacgtctgcgacagctacgtgcggcgcccggaccaggcggaccgcgtcatcggcaccctcctcggttccctcctctccgacggcaccgtccacgtccgcaactcctatgtcgtcccccacagcgagtcagccgaccaggtcgccatcgacatcgactaccaccataacatgtacgcctcgcaccagaaggtgaaccccaaggaggtcatcgtcggatggttctcgactggatttggtgtttctggggggagtacgctcatccacgagttctattcaagggaagtacaaaaccccatccatcttacagtcgacactggcttcactaggggggaggcttccatcaaagcctacatctcatccaatctgtccctcagagatagtcaactcgctgcacaatttcaggaaatccctctggatctgaagatgattgaggcggaaaaggctggatttgagatcctgaaatctactatggtagagaagctccccaatgatctggaaggaatggagtcatcgatggggaagctttacattcttatcgatgagatctacaaatacgtcgatgatgttgtggaaggacgcgtggcacccgacaacagaattggaaggttcatctctgattcttttgcttcggtgccgaaattgtccccggctgctttcgataagcttttcaatgacaagattcaggataaccttgcgctggtatacctgtcaagcatcacaaggacacaaatcagcatcgccgagaagttgaacactgctgctcaagtgctgtaggtttggcggtgtggcatctggtttggacgtggatggcttgatgctatctgtgatgcttggcgtaagtgtgattggtgacagaaatgcatttttgtactcattattattattgctaaatgagagacctgatggaaagggttagccaacgatgagatcccataatgttgccagaatgccagtagagtggtggatggcgagatgtttctgtttggatagtattctgtgctccaggttgaatatttgtaatgctcgttggttttgtgtagcgacacatcggcaatgtggagcaatgaagagatttgctccacattttacgtcgtcatttagaggtgtggtggcatgcaatgtgatgctgttgttgcaggaaaatcggttttgctgtcctgttatagcaagctttcctcctgcggccctgcttttcatttccctcttgattcttgcctctgcccttcgaaaccggtctaggccgggaacaatcacgtcatcccatgttatgtgtctagcctgaacgaac

SEQ ID NO: 38462 - DNA, 2963 bp, Zea Mays
caaaataggaattcaagaggcaaacctgaaaactcgggaccgggccacgccatggataaaggagcagccggtggctaaatttttggttggccccgcgggcgcacgtcgtttccgctcgcccccctgcgatgccgggaccggccgtggaggcagcggccaggagcggcggcgaccaccacggcggctgctgcgggaaggcggccggcaagtgggagaagacgtacctggatgtcctgggcatctgctgcaccgccgaggtggcgctcgtcgagcggctcctgacgcccatccaaggcgtgagggcggtcaccgtcgtcgtcccgtcccggaccgtcatcgtcgaccacgacaccgccgccgtctcccagttccacattgtgaaggttctgaacaaggcgggcctcgaggcctccgtccgagcctatggcagcagcgccggcgccggcgggcggtggcccagcccgttcaccgtcgcctgcggcgccctgctcgccctgtccctgctcgcgccgctgctccccccgctgcggtggctggcggtggcggcggcctgcgtgggctcccagcccatgctgctccgggcgttcgccgcggcgggcaagctgacgctggacatcaacatcctgatgctcatcgcggtcgccggctccgtggcgctcgggagcttcacggaggccggcgccatcgtgttcctcttcaccgtcgccgagtggctggagacgctggcgtgcagcaaggccagcgccgggatgctgtccctcatgtccacggtgcccaagaccgtcgtgctggccgagacggggcaggtcgtcggcatgggcgacgtcgcggtcggcaccgtcgtcgcggtcagggccggcgacgtggtccccgtggacggcgtggtcgtcggcgggcacagcgaggtcgacgagagcagcctcaccggcgagtccttccccgtgccgaagcagccgcagtcggaggtctgggccggcaccatcaacttagacggctacatctccgtgaggacgacggccctcgccgagaactcgacggtggcgaagatggagaggctggtggaggaggcccagaacagccggtctcggacgcagcggctcatcgactcgtgcgccaagcactacacccctgcgtggtcgtcctcgcggcgggggtggtcctcgtgcccgccctgctgggagctcgcgacctggagctggagcattggttccggctgtccctggtgctgctggtgagcgcgtgcccgtgcgcgctggtgctgtccacgcccgtcgccaccttctgcgcgctcctgcgggcggccaggatggggctcctcgtcaagggaggcaacgtcctcgagtcgctgggcgaagtcagggtcgccgcgttcgacaagaccggcaccatcaccagaggggagttcagcatcaaggacttccatgtggttggggacaaggttgaaatgaaccagctactctactgggtatctagcatcgagagcaaatcaagccatccaatggccgctgcacttgtcgagtacgctcagtccaaatctgtacagccgaagccggagaacgtgaccgagacctgcatctatcatggcgagggcatctacggggtgatggatgggaaacagatctacattggaaacgaaaggatcatagcaaggtcctcgtgtcgtcatcatcaacatgctggccaccaagaaacagacggtctcaaaggcgtgtccatcggccacgtgatctgcgacggcgatctggtggggaagttctcgctgtccgacacctgcaggacaggggcggccgaggcgatcctgcagctgaggtcgatggggatcaagtcggtgatgctgaccggggacagcgcggcggcggccaagcacgcgcaggagcagctcgggggcgtcctggaggagctccacgcggggctcctgccggaggacaaggtccggctcgtccggggcctgcaggcgcggcacggggcgacgctgatggtgggcgacggcatgaacgacgccccggcgctggccgcggcggacgtgggcgtgtccatgggcctgtccgggtcggccgcggccatcgagacgagccacgccgcgctcatgtccggcgacatcctcagggtgcccaaggccgtccggctcgggcgccgcgcccggcgcaccatcgccgtgaacgtggcctcctccgtcggcgccaaggccgccgtgctggcgctcgccgtcgcgtggcgccccgtgctgtgggtggccgtgctcgccgacgtcggcacgtgcctgctcgtcgtcctccacagcatgctgctgctcagggacggcgccgcccgccgcccgaggtgctgcgctagcgctacggcgtgcaagagcaagcaggcgtccaagccgtgctgcgcgacggtgaagccggtggcgacgacgaggcacaggcacgggcacgggcacgggcacgggcacgcaggcgcggggaagcccgggacgctaggaggcgacaagcagggtaaggactgccatggttgctgccagaaggagagcaagccgcccgaggacgccgtcgtgatcgccattccgggacgggccgtggagcaccggaaggaggccttccctcacgagaacgcgggagccggggggtgctgcgctgcagcgcacggtgccgaagacgaggtatgcattgtcatcagcgccaggtcgccctgctgcagcaccgcgaggagtcggtctggttctcccaaggacgcattgtgctgccacggctccggtggtaaagacggcggcgccatctcagccctcgtgtgctgacctcacctaccagcactaccattcgtggaatacggtcgtcttgtatataaaaaaattactcatatcctatgccgtagacaggaagttgtttctattacgagtactaatattcttgtaatctatgttcccctgagatcattagaaaaaaaattatatataatactctattaaaaatctaatgtgg

SEQ ID NO: 38463 - DNA, 1151 bp, Zea Mays
tattgtaaagcctacactcgcttggttttgctctgctgcaatctctgtttgatagacgcctgagacctaaggctaaggagctcaaggatgtcctgagggcatttcctgaaattgaaggactagttgggcatgaagatactggcaagctgatgaacatgaaggaagatgatggggttagtgaagtaaaatccagtttgcaatcagcttttgctaagctaatgacagcaagtaaagacatggtttctgaagcagttgcaaaactgatcagtcgcctgaatactaagagcaagattaggaccttaacagacaaagaacagctggttttgtccctggagagacaatatcaagatgatgttggtgttatagcagcacttttctttaactatgtgaagctcagtcctggtgaagccctttacattggtgcaaatgaaccgcatgcatacctctctggggaatgcattgaatgtatggccacttcagataatgttgtacgtgctggtttgacacctaaatacagagatgtgcaaactctctgctcaatgctaacatacaagcagggtttccctgaaattttgcgaggagttcctgtgcagccacacgtaaggcgctacacacctccatttaatgagtttgaggtggattggtgcttggtgcctccaggtggactggtcgtcatatccccggtaccaggtccatccatctttctcgtaatcaccggggaaggcgagattcaattggattttatgtcagatggggagaaagcagaggaaggtgatgttttcttcgtccccgcgtacaccgaggttaagatctctgcgtgtggccccgagtctgtgcagctgtacagggctggggtaaacagcagattcttcagctaacactgtaattgtagggaatgaggatttttgcagttgtcgtaaagtggactacactgtaattgtagggaagttttcccagctaagaaatatacgtgaaatgaaatgattagttagcaaaaggtctcatatactaatgtatagggagggctacgtgctgataaaagaataaactggttactttcatatcttgatgatttactgtaaagatgccttgcagtgcaatccacgttggatgcgctagaaagaaataaaaatgatgaccatttggttgca

SEQ ID NO: 38464 - DNA, 2678 bp, Zea Mays
tcaaacaccccaccatccttcccgagtcgtcctctccattttcccctcccgattcgccccgtcttcccaagccctacgccagcgacaaaaccctaaccggtgggatggcgacgcagccgccctctaccgccactgccgcggttgacctctatgagacggcctcgcagccggacgcccccgccgccggcgacgcctacacttttctcgagttcaacacgcagggggacgacttcgactaccccgacttcccggagctctctcaaccacctccccgatccacgccgctgacgtcctccatccccggcgccggcacgtcgtcctcgtcgtggcctgccccaccgcctccgccgtccgacgcggcctccccggaacccgatctcacgtctcaagacgtccacaccccgccggcctcctcctcctcgccgtcgccgcgttccgcctccaaggcgcgtccgtcggctgcggcggatgggctcgcctccggggttgtcgcacttaacttcgaggatcctgtaggaaccggcgccgtggaggacgggtacgactacagcaagggagacttcgtggaacacgcatgccggtactgcgggatccacaaccctgcgtgcgtggcgaggtgcaacgtaccctcctgccgcaagtggttctgtaactcgcgggggaacacttcaggctcccacattgtcaaccacctggttagggcaaagcataaggaagtatgccttcacaaggatagccctttaggagaaacaattctcgaatgctacaactgtggttgtcggaatgtaccttcagagcaggagcagctaagagctcgccaaattagtgctcaacaaatcaacaaagtggaagagctctggaagacaaatcctgatgcatctcttgaagatcttgaaaagcccggtgtagatgatgaacctcagccagttgttttgaagtatgaagatgcttaccagtaccaaaatgtttttgcaccactgataaagcttgaggctgattatgacaagatgatgaaagagtcacagagcaaggataatgtaactgtccggtgggatattgggttgaacaagaagcgtgtagcttactttgtctttccaaaggaagacaatgagttgaggcttgtgcctggagatgaactacgcctgagatatcctggtgatagctcacatcccacatggcaatctgtcggacatgtgattaagctcactgcacaagaggaggtggcacttgagcttcgcgctagtcagggggtgcctactgagctaaatgttggattcagtgtggattttgtttggaagagtaccagttttgataggatgcaaggagcgatgaaaacttttgctgtggacgagacaagtgtcagtggatacatataccatcaccttttgggacatgaagttgagcatcaaataatacgtaataccctaccaagacgctttggtgcacctggacttccagaactaaatgcttcccaggttttagcagttaaaagtgtcctgcagaagccagttagtttgattcaaggtccacctggcactggaaaaactgtcacatctgctgcaattgtgtatcacatggcaaaacaaggtcaaggacaggttcttgtatgtgccccaagtaatgttgctgttgatcagctggcagagaagataagctcaactggtctgaaggttgttagactgtgtgcaaaatctagagaagctgtttcgtctcctgttgagcatctcacacttcattatcaggttaggcaccttgatacttctgagaagagtgaattgcacaagctacaacaactgaaagatgaacaaggtgaattgtccagcagtgatgagaagaaatacaaggcactaaagcgtgccactgaaagagagatactgcagagtgccgatgtcatttgttgcacctgtgttggtgctggagatcctcgtctttcaaacttccgtttccgacaagttcttattgatgagtccacacaggctacagagccggaatgtcttattcctttagtgcttggtgtcaagcaggttgtccttgtcggtgatcattgtcaactgggtccagtcatcatgtgcaaaaaagcagcccgtgcagggttagcacaatctctctttgaacgccttgttatccttggagtgaagccattcaggctacaggtccagtatagaatgcatccttgcctctcggagttcccatccaactgcttctatgaaggcacactgcaaaatggagtgactgttaatgagaggcaatcgtctggaattgattttccttggcctgttccaaatcggcctatgttcttctatgtgcagatgggacaagaagagatcagtgctagtgggacatcctatctcaatagaactgaagctgcaaatgttgaaaaaattgtaacaacatttttaagaagtggtgttgtaccaagccagattggagttatcacaccttatgaaggacagagggcttacatcgtaaattacatggcaaggaatggctctcttcgccaacaactttacaaagaaatcgaggttgctagtgtagactcatttcagggtagagagaaagactacattattctatcttgtgttagaagcaatgagcaccagcttagagtgtgattagttgcttgcatgagccttagcctgcattagaaccacagtttttgaggcgttgcggcgtcctgt

SEQ ID NO: 38465 - DNA, 2102 bp, Zea Mays
gtctgtcctaaatcaacccattttccctccgcccagatcgctgtgaagttgaccccgcttccctcccagctcagcgacctccttgccgattacgagtgccgtgtgtgccccgctccagtaagccaacagctcattcctcctcaccacgctgctcgttactaaccaagcaatcaatttcctcctctttccattctcccagccacaaatcgatcggaaacgcacgcccctttctcttcgccttttcgcgtcgtccagatctcagtcgttcttcgctccatgagctaggaatccgaggtgtcctctaggctaagcgaagttggccggcggcggctaggatggggttgatatccgggatgatgatgggggtcattgttggcgtcgccatcatggccggctggagccgcgtcatgcgccgacgcagcacgaagcgcatcgccaaggctgcggatatcaaggtgcttgggtctctcagcagggacgacctcaggaagctgtgcggtgataacttcccggagtggatatccttcccgcagtttgagcaggttaaatggttgaacaagcatctgagcaaactttggccttttgttgtagaagctgcaacagtagtggttaaggaatccgttgaaccactgctagatgattaccggcctccaggaataaaatctttgaagttcagcaaattttctcttggaaatgtgtcaccaaagatagaaggtattcgtattcaaaatcttcaaccaggtcaaatcatcatggatatagatttccgttggggtggtaatccaagcataatcctagctgttgatgctgtagttgcatcactgccaattcagctcaaggatcttcaggtctatactgtcatacgtgttatatttcaactgtctgaagacatcccttgcatttctgctgttgttgtggctctccttgctgatagccaaaaattcagtacaccctgaaggccattggaggaagcctaactgcagttcctggactttctgacatgattgatgacactgtcgattcaattgtttctgatatgctcttgtggccacacaggcatgttgttaaacttggtgtcaatgttgatacgagtgacttggagcttaaacctcagggaagactttctgttactgtggtaaaagcaacttctttgagaaataaggagatgatcggtaaatcagacccttatgtgaaactgtatgtgcggccaatgtttaaggtcaaaacaaaagtcatagatgatgacctgaatccggaatggaatgaaacatttgacttgattgtcgaagacaaagaaacccaatctgttatttttgaggtttacgacgaagacaaacttcagcaagacaagagactaggtgtggcaaaactagcagtaaacactcttgaatctgagattacccaagacgccactctgaagctgctacattcactggatccaattaaaaataaggacaccaaggataggggcacattacatcttaaggtaaagtaccacccctttacaaaggaagagcagctggaagccctagagatggaaaaacaagccatagaggagaggaagcgtctgaaggaggctgggataattggtagcacaatggatgctgttggttctggtgttggatttgtgggtactggcattggcgctggcctcggtttcgttggttcaggaattggtgctggcgcaggccttgttacctctggtattggtgctgtcagcagtggccttggtaaagccgggaagttcatgggcaggactgtgacagggcctttcagcatgtcccgcaagaacggcagcagctctactgctccccagcatgatcaaccttcggcgtagtctgatgtacagtgaaagacaattgtcatatttgtgacagggttgccattctactctgtatacgtgctatacctaggactatacgtagcacttcgtttttgtttctgccactgcctggtgcctggttatatgaaatatgttttcgtcgttgtattgaaacgaggatctttcaaagtaaagattgctgtaaattgcatcagctttcccgaactatatgaaatttgtgcagtctgttgaagtaaaaaaagaaaagaaaatccactga

SEQ ID NO: 38466 - DNA, 2670 bp, Zea Mays
tagctccgctgtcccactcccgagtcccaagtcccaactgccagtgccacgctcggctctgctgcttctctcccagcctccacggctctgcctccgcctccagagtccacgccaaccactagcaccgacagccccgccccaccaacccaccggtccactgcccgccgccgcatgacggtggcccgcggtccgcccggccgcccctcttccgggctcctgggctgctggcgccgccgcccggcgctgggcttcggcgccaagctgaagttgccgcaccgccaaccgcctcccacaatcgcgccgccgccggcggcgacagcggcagcggcgggcacgctcaccggaagccccgtcccgtcccgcacagccacaagaagcgccaccctgctccttctggatcccattcccatccccacccctccaatgtcacctcctcgccggataccaccgcagcaaaggacgatcactccgagccggctctggtaactgacccggaaccaaaggaggaacaggagccagacatggagatggaaccggaacaggaagcggaactgcccatgcccgagcagggcggggacaattcggggaaggcccctgcggaggaggatgaggagaagccgccgcagctggaattggaagacgagcccaatgaggttgacggcgaggaagatgatcccgaggcggcgaagaggaaggctccaagtaagaagaggaagctcccgcctctgtttagcccgggtgcacgttaccactggaagctttgcggcgccaatagcggctaccactatatcccctgtgtggatttcgatggggatgggaggcagaggcaccatgaacgcagctgccaaaggtctcctgtgacatgtttggtgtcactccccaaggaatataaacaacctgctccatggcccgagaggaaggacaaggtttggtatgggaatgttgggcatcctaggttgtcaaattatgttaagggccacaattggctgaaccacagtggcgagtacttgatgttcccaccagatgaatgggagttcaaaggtagcgcaagacattatgttgaatcaattgacgagatggctcctgacatcgactggggtaaaaatatacgcataatattggatgtcggatgcaaaagcgctggctttgttggcagtctgggatcgcgaagattacccttccctagtggtgcatttgatgctattcactgtggtgaatgcaatataccatggcattctaatggtggaaaacttctcctagagataaatagaattcttcgtccaggaggatacttcatcatctcaagcagaagtgctgacctggagagtgaagaaggaatatcagcttcaatgaccgcactttgttggaatgcaatagcttacaatagtgacgatgtcagcgaggctggagtaaagatatttcagcgaccagtctcaaatgaggtatatgatctgagagcaaaaaaggatcctccattttgcaaggaagagcagaacaaagctagtgcatggtatactaatatcaaacattgcctgcacaaagcacctgttggtatcgaagaaagaggcagtgactggcctgaggagtggcccaagaggctcgagagtttccctgagtggcttggggaaacagaaacaagggtggcttctgatcataaccattggaaggctgttgttgagaaatcttatctggatggattgggcattgactggtcaaatatccgtaacataatggatatgagggctgtatatggaggatttgcagctgcactggcatctaaaaaggtttgggtcatgaatgttgttcctgtgcatgctgcagacaccctacccataatctacgagcgtggcctgatcggtgtgtatcatgattggtgtgaaccatttagtacatatccaaggtcctatgatcttttacatgctgaccatttattctcacgcctgaagatcagatgtaagcaacctgtctcaattgttgttgagatggaccgtattttgaggcctggaggttgggctatcatccgtgataaactcgagatccttgacccattggagacaatcttgaaatcactgcattgggaaattgtcatgaccttcagaaaggacaaggagggtatcatgtctgtaaagaaaacaacatggcgtccataaactgagctcagattcacaaggctccagcataccattttttgcactatactgctgtcgatttccccggattgtgagacagccattttgtgaatctggggtagatgtacaatatttgttcattcatctcatgacaatatgctcgccgcatctctgtcgggtagtttaagcccagttggatggttggttgtggttagcgttacattgatcaattctttgaagcagcatccaagacgaccagctctagtttcagaaaaagagggcccttcgattccataaacagggttgtacgagatacaagattgtttcttgttgtttaaaaatgtaacaatatagatatatgtaaaggttgtcactgaattaactgcttggtgatgttgtaagttgcaacaatccgtgaagattcaatgcatgaattttcttattgcaaattgtgagcaaacagcaaaagagtttccgatgtatattctgctgtcatttgagaccgttctacacttctgatattaaagttgtaccagaaaaa

SEQ ID NO: 38467 - DNA, 2786 bp, Zea Mays
ccggttctcacgccgtaggtaggtaggggtcgatcccaactccttccttcccctttgctgctgctttaattccttgcgcgaagatccctcttcttcttcttcgtttacagccgttctttgctctaacctctggactttagccgctcccacacggcctccatctttcggcatcgagagatccaataacatcaggaccaagaaagtaaaaagacgcaatcattaggaactactttctctccgtttctttttaattgtcgctggatagttcaattttgcactatccagcgacaaataaaacgaaacgctacttatctgcattgcgcagattctctgctagctaggctgttggctcgctccttcaattctcctctcctctccttccgcactccaccccctcctccgtagtagtagcagcatagcatctggtggtgtggtggtcaaggttcaagaacaaattcagctggaggccggcggagattattttattcattcccctccgagaggctgcatcgaaaaggggagatcaaggatccccggaggcttgtagccgcaacaaccacaagggaggcggagggcgagaggcttcttctctgaccagcgaccggctcgccgtccagagaagaagaagaagaagaggaggaggaggaggaagaagaagaagaagcgctcttgggctccgtcgtcgcatgaagaaggaaaccatggaggggcatgtgccattgccattgccattgctcccggacggagaaactgcggtgggctacagcaaggacgacgcctcctcgcctctgcaagaggagatttcgagcctgcggtcaaggcagcggcgtgttgacaggagacggcgggaggcgctcgacaggctcgttgaactgaaaggaagcgttagggtcttctgccgggtccggccgctggctcacacgaacagcttgcatgcccagtcatcacctgttaccgtcgagcaggagaggatcacggtcaagcagccgggatcaagagggagttcggcgctgatagggttttcggccaggagtccacgcaaggaaggaaccggcggtaataagctcggcgtcgtgcctcgggctatccaggagctgttctctcgcgcttcggaggacggctcatgcgcctactctttctccatgagcatgcttgaggtctacctggggagtctcagggacttgctggcagcaccgaggcagcctctcttcaggcgaacagagtgcaaagcagcggcgtgtagtagtagcctcagcatactggcaacgaaaggtggcgccgtggaagtggaggggctgacggacgtctcgacgccggacctcaagaacgccagccagtggtaccgcagagggcggcgagcccggtcgacggcctggacgaacgtcaacgacgcctccagccggtcgcactgcctgacgaggatcaccataaggagaaggatgaggcatggaggaggaggaggagtcagcaagctctggctcgtcgacctcggcggcagcgagcggctgctcaagaccggcgcgtccgggctcaccatggacgagggcaaggccatcaacctctccctgtcggcgctcggagacgtcattgctgcgctcaggaggaagaggccccatgttccttatagaaacagcaagcttacccagattctcagcgactcgctcggcgatggttcgaaagttgtaatggtggtgcacgtcagcctatccgaggacgacgtcggcgagacggtctgctcgctgaacctggcgaaacgagccagatcgatcgagccgaacagagaaatcccacagaagagggtcgcagagctggacagggagatccgcgccgccgaggaagagctgaagcgtctcgacgagcagataaggagagcggaggagaaggagatctcactcgaggaggaggaggaggaggaggaggagaagaagctcttcgcctcgtcggtctgccaggctctcagcgacgacgagaaggggtcgccgaggagcactctggtggtggtggggcacaccgatgccgcggagagcccgcgcgcgacgacggagaaggcgaagggcaggaggccgccgccggctcgtggccatggtggctcagcagctccccacttcatgtcctccacggtgtgcagccggcagagacggtgcgcgggaggctaccattctgtcggtaacggtaagccgaggctgacggcggtgtcggtgaacaggtacccgccgccggctgctgagctgagtgggagccagaacgcggcggccagggctagcaggtcggcgtcagtggcactctcgtccggtgtgcacaagttgaggtgcttgcgtgtcaacaagtccgatcaggtcaacgtaataagcaacagcagcgtcgactcgaccgctgcgtcggcaccgccgccgcggcggagggaaagctgcttcggctccaggccggttctacaaagagcggcagcgcccctgcatctgcacaggaggaggatgtctagcctgacatgaacaccgattgcacagttatgatttttcttaacttaattgtttttattagtggtgaaagggttctgaaagatgtttgtgtatgtatggttgttagcttcgtagttcttgactgctgtaactattggttggaggccccttgggcttttgttttttttttgggtttggcttggaaggggcaaaatgatgcgaggaataattgttgatacatggaataatggaatttacctgtggttctggttgcgatggattttgaatggaatttgcgaggtagcaaaacaatctaacaagttacgtagg

SEQ ID NO: 38468 - DNA, 3676 bp, Zea Mays
tcgttctccccctctatagtcctccgccgcctccattgccttctcttgggctcctccccgtatcccgggactactagtccaacctcccaattctgcggcactcaccattcgacaagcactgaaccctaccccacccaccagtccccgcagccgcgctccgcaatggcgagcggggcggctagaaagcgccgccgcaagtcgtcgccccctgccgccgccgcggctgcacgggacgggaggaagctcctcgtcggcgaagtcgtcgaggtgagcgccatccgcgccgtcgtttgcgatgaggtccaccgcattgcggctaagggcgatggtccgcgggtgatgggcagggtgctgagttgtgatcaaggactacgtggctcctggcataaggctattgttattggtattctggaaaatgctcgcgcagtcagatatactgatttcattgatgaaaatgggtcacctcttgttgagaatgttcaagtgtcagatgccattgatggtaagtcaagtatgcctgaggaactcattcgtggcaacattaggccaatgtgtccacatcaagcactgcaggtgtctcatgcaagctatggactttgtgttgacgcactcatagaaagttcctactgggaaggtgttattgctgatcatgctgaaggctctatggaaaggaaagtccttttccctgatgaaggtgatgaatgcattatagaagttgatcagctacgtcttactcaagactgggatgaagctacaggggaatggaaaccacgtggaatctggtcatttctgcagatacttttgtcacatgaagagagagatggtttacctgtgtcaatcaggcagatatggtttgacttaagatccaaaccttcttttaagactgatgccaaaatgtggatgtgtggaacagaagatttttgggagagatcacttgcagatgtcattgctgaattgtggtctctatgtgacaagcctaccctagatggatatcaagtggaagcagttcagaaggatacagttgagaccactgtcttggataggctggatccattccaagcattatcagaatacatctcatgctatcggaataataggaaaaatgctcttatcaaaaaagagtgggcaaagcaacaccttaaatcttcaggatggacctttctggatgacagacctaagaacaagttttacatctcacctgatggtaagcggtttccatcttttctaggagcatgccaggcgtgtttggctgcaaaagaagcaaatggttaccaatatgatcatacagaaaatttgcatctagacagtatgagtctggtgcacaagaatgcatgctacaaccagacacacatggatcttgccttggtaaagaacaagtccaatgataaatggatcacgagcccatcaagatcttgggaattggttcaactggatgctgaattttccccacagatagtttcccttcttgctagttatcaagatggcacaactgtccttcagaggacaattgatagaactctgagtgtgaagctgaagaagcatctattggcactgggttggagtattaagttcaaaaaggacgaaattcaagaaaatggccatcataaacacactacaagataccggtacgagtcaccttatgggaagacttatgtttctatcattcaggtaatatgcagtttgatagttggaggcgttaaacaagatgacaggcccagctatcggacagcagcaaaaggtgctcatttgacagtgtcaactggcctggcaaggctcaataaacgtaaacgaagggataaaactgatgctcttgaaaaatacatagactatatgaaaactgataagcaaaattccaggaggaggaaactgttgagatcaaatgctcagaagtttctcaaatctgctgggtggaatttttggttaaagaaaaagtctagaaacaaattggagttgaggtatggtgctccacatggcaagtcttacagctctttagtggcagcatgtaaaggttacttggaaaatggatatcaggaggacagtgatgcagacattaaaatcgccaaccatggttctgctgatggttctatgcgtccatcaaaattgatagcactcagcggtggattaaaggattcaagtaaaatacaggatctttccctgtcggcatcacgtgaagacagttttgtctttgttggtagagaaaaatattgtggtaccaagggataaggttacatataagcgaagtgatggacctggtataaaggaaggttccatcagcagagatggaataaaatgcatgtgttgtaatgaattattcactgtggagaattttgaggttcatgctgggagcagtacaccattaccttcggctcatatgtttttaaaggatggaaggtccctatcacagtgtttagttgaattcatgggtggaaacaagcccagagatccactgcatgtgcgcttgaaggggagtagttctgatctggaaagtgattcgatatgctctgtgtgccatgatggtggggatttattactttgtgacaattgcccatcatcttatcattatgattgtgtcggcttggaggccattccagaaggaagctggtattgtccatcctgcagatgcggtatttgtaacttgagtgattatgatcctgatatcagccaattcactgagaagaccatagtgtactgtgatcagtgtgaacgggaatatcatgtcggttgcactagaaatagtgaccatcagcttatctgccgaccagaaggttgttggttttgcagcaggggatgctcaaatgtatttcaacatttgcaagaagtcattgggaaacaagttccaactccaatcgaaggcttatcttgcactatcttgaaattttgtagagcgaacggcagtgaccatggcgattatgatgatgagataatggcagagcattatggcaagttgtgcattgcagttgatattcttcatgaatgctttgttactattatcgagcctcgcacacagagtgatatttctgaggatattgtcttcaatagagagatttgcggccagaagtttgctgagctgcctctgatcggtacaagatctctataccgtcgtcaaggaatgtgtcgacttctaattaatgaactggaaaagttgcttttagacttgggggtggaaagacttctattaccggcagttcctgaacttttgcaaacatggacatgctcatttggtttcacagttatgtcaaattctgagaggcttgagttggcagggaatagcattctcagtttccagggaaccaccatgtgtcagaagattttaaatgttgcacacaacatttcacaagatagaagtattccatcaatgtccaattctgagagaatggggttagcagagaacatggtggtgaagaaggcatttattccattgacagtggagccagaccatcatgttgatttgattgtggagcctgagctagtaatgaaaattgagaataacagcagtgaggagggtatttcttcaattgatccgctgactagtatgccagaccctcaagttggtttggcagtggggccagagatggtaccgctcgttggcttcattgatgggaccaacattgcccccgccactaagatcaccgtcaaggtcagtgataaagaagtcaagcaggccaatttagactaa

SEQ ID NO: 38469 - DNA, 4914 bp, Zea Mays
gcctaccggcttccaagccacaagtctttcgctctgtacttcacggccgggccaaagcagcagccacgaagaggcgttctttcctccctgtaccatcagcatttagaaattttgtctgctaccagatagtacgacagtatactggacacagacatgaaagtgacttgcatgagttcgtttttgcaaccggataaacacataagaagcaatcgcagcgccgaaataggatgaataaaaccagccacatgttccggtggtgtgtgttcatcagcactcgcacgcaagcagctcctccaatccatctccatctctgggctaaaagatatgaagagagttttagcctgataggccactcgtacctgctgctctaactccgggtcaccattttttgatgagtagagggggctccccgtctcggccctcctgccggttgaggccagcagagtgatgagtgaacggagtcatgcttgtgagattaggctttgtcgttgtagcctccgtcgcagctttaactcttcagagagctaacagtggggccaggcacagcaaagactatgtccaagcaaggaaaaggaaggataaggctaacaattctgaacatggggagaaagaagaagagaaggaagaggttaaaacaatcagcggcataatcaactcagcccgctcgctaggcgatgacgacgatgatatgctttccgagatcgaaagcctcctatcaggagacattgacatccctataccaagcgatcgcttcgacgttaatggacggtcacggtacaacaacgcttacatggctaacgaggcctctgagatagagaagctgcgcagcctggtgagggaaatggaagagagagaggcgaagcttgagggcgagctgctagagtactatggaatgaaggaaatggagactgacatcgccgaactgcaaaagcagctcaagatcaagacagcggagatcaacatgctcaacgacaccataaactcactgcaggcggagcggaagaagctgcaagatgacgttgcatgtggagaggttgccaataaagagcttgaagcggctagaggcaagatcaaggagctgcagcggcagatacagctagaagcaggccagacaaagggtcagctgatgttgctgaaacaacaggtcatcggattgaaggccaaggaggaagaggcggggaaaaaggaagctgaggttcaacggaagctgaagaagctcagggagttggaagtggaggtacttgagctaaggaggaagaacaaggagttgttgtatgagaagagagatctcattgtgaagttggatgcagctgaagggaaaataactgaggtatcttagtattatgagtctctacaagttgcccttctcataaacagaaaacaaatctcatcaagatgactgcaaaattgaaatttcgtcttatacatgattatcattatgcaagatattacacagcatagaattaacatattttcagaccagtacaatgaaaatgcagttacctaaagtacttactaaagcatgatttcagaggtagcattacatttaacaactatgtcagaatttaaggttctctaagggttagtttggaaacttaaattccctccgggattcccggggattgatgggaaaatgggaaaatgagctaatttcccgctcaatttccgggaatcccggaggggatttaagtttccaaactagcctgagaggcaagaatgcacctagagatttctgcaaagtattcatatagtttgatatactttgagaagctggaacatgtgctaatgacacaccctactgtatatcatgcagagtgatgtagttgccaatgcaagagaagagataaacaagctgaggcatacaaatgaggacctcacaaagcaagtggaaggcctacagatgaacaggttcagtgaagtagaggagttggtatacctgcgctgggtcaatgcctgtctgagattcgagctccgcaattatcagactccatcagggaaggtctctgcacgtgatcttaacaggacactgagccccaaatcacaggagagggccaaacaactgatgttggagtacgcaggatctgaacggggtcagggtgacacagaccttgagagtgttgtttcttcaatgccttcttcacctggaagcgaagactttgacaacatgtcaattgacagttcttccagcagatacagcttcctaagcaaaaggtctaatctgatgcaaaaattcaaaaggtggggaaggagcaaggatgacagcagtagtttagcctcctccatcagtggctctccaaggaggaaaccaaagggcccactggaagctctaatgctaaaaaacgctggagatggtacagccataacaacatacggaaagagggatcccaatgatgtcttggatgacgaaaatgtcgcgtcctcattccaattgatgtccaagacagttgaaggttttgctgatgagaagtatcctgcttacaaagataggcacaaacttgcaactgaacgggagaaggctataaaagagaaggctgggcaagcaagagcacaaaggtttggtggtggccacagttcagctctaatttcctctccaaaaggtgcactccctccaaaacttgctcaaattaaggagagatcccctgcagctaatgctgaatccagtgagcaatccagtgacaaccaaaacaacaccctggtggtgagccagatgaagcttgccaacgttgagaagagagcaacaagagttcccagaccacctccccctcgatcaaccgctgcttcaggggctaccagtattgcaagtggagtacaaacgccacgggcaccaggtgcaccacctcctccaccaccacctccagggaaagttggtggcccaccgccaccaccgccacctccaggtgctctaccaaggaaccttggcgggggtgacaaggtacaccgtgcgccggagattgtagagttctatcaaagtctcatgaagcgtgaagcaaaaagggagacatctttagggtcaatatcatccaatgtatctgatgccagaagtaatatgattggagagattgagaacagatcaacattcctcttagctgtaaaagctgatgtggagacacaaggagaatttgttgaatctctagcaaatgaggtccgagcagcaagcttcataaatattgatgacgttgttgcatttgtaaattggttggatgaggagttgtctttcttggttgatgagagagcagtgctaaaacattttgattggccagagagcaaaacagatgcaataagagaagcagcttttgagtaccaggatctgataaagctacagaacagggtttcaacctttaccgatgatccacaacttgcgtgtgaagaagctctcaagaagatgtattctttgcttgaaaaagtggagcagagtgtctatgcactactccgtacaagagacatgaccgtctcacgctacaaggagtacgggatcccatttgactggctgtcagattctggagtagttggcaagatcaaagtggcatctgtccagcttgcaaacaagtatatgaagagggttgcctcagaacttgatgcattagaaggcactgagaaagagcccaatagagagtttttgcttctccagggtgtgaggttcgctttccgggttcatcaggtaaaatcctcacatctatatattcaaaacccaggtactttacaggtaaattaaaggcttcgaatcagtaacttattcctctaccttctgcagtttgctgggggctttgatgcagaaagcatgaaagcttttgaagagctaagaagcaagatgaccacacaggcatctgctccaccaatatctcaaggctgaagcataaattgagcacaggattcagcacacatctggtcttacttgctggagagtgatttttagttgtgtatattaagtgtacagactacagaagagagattcaaattccggtgttgtgtcaagcaagttgtatatgccaagataatacaagtcaggtttgttcatttgtataacagttttagctcaagcataacacttttcattttgaatgttgtaactgtaaacaggcagttccagaatcacagtagagatcagatgcatagttttgcaactgttttttttcagctgggcatgattttgctactacgactaataaaatgtcaaaaaacatccattctgctagtctggtacacatggagataattcctctacatgaaccttgctgtctttgttcaaaaaaaaaaaagtttccagcctgtccgcttggttttaatccgtaacagcttctacttctacagtatttttgtctctatggattacagctgcagcagtccaaacttgttgctttaatccgaagcaaacagttactaccaacatacatacagtgctagactagcagatctgacttgaagaatgacatatcaagaaaaaaaaaatccacctggacggagaaggtcgatgttgcggcgacgagctctacctgaacgtggaagtggaaccgaacacttcgagtggttggctgtggctgcctactagtcgccggggggccgggccccgcctctcggctggcttcagcgcctccgagcgcggtggcagtgtcgccgtcgcgtgggtggaagaactcgtcggttgggttccggctccgggcgcggccgcttgccggggaatccaaccgggagaccgtgaatcgtggttatattattacttgggccctatcaaggccaccacgtctatgactgtgagcttattgtttgggcttgggccgatattcctcttcatccattagatcagtttttaagccctctttattttttaaaaacggttcattgttgcactcttagccgtttttatagtggttttgccgatgtgaaacagaagataaatcgaattaagtttaattttcg

SEQ ID NO: 38470 - DNA, 4496 bp, Zea Mays
ggcccttctcgccatacagagagactccctcacgaaaactcaccgtctcccgctctcgatttcgaaacactcgccactcttcgcctcccgttccccagcccagacccgaagccctgcgcctccccctccgccgctcgccgggcgagatgtccccgccgttcgtgttcccctcgaccctgcgggatctggagctggacaccgacggagacagagacgaggagccctcgctccggccgcagaaccccgtcgccgtcgccacgctccgcgctgccgacctcgaggagttcgtcaagggaggtgtttgatgccatctactctatcgtgcgtgatttcaattgcctacccccagcccttaagtttaacattgttgagaccttgcgctccaacctcagtgtccttctacccagcatagactcactttcccgggcatccatgtcatccccttctgatgctaccgaaatcactgaccgcattgcctcacaccgcaatgccctcaagatctactccttctttctcatttccattgttctcaccgcggaagctggcgctgaaagctgcacagcggctaaggcaacagcacatggtcgaaagaagaaccatatatattcttggaactgggaagcacaaagaggcaggatcatgagtctagtcgctaattctcttgaagctaacctttcgctactttttggtcctggaggaaccgatgaacgatatctctcttttgtttcgaagtgtacttttgttctctgtgaaaatcaaaatgtgttaaaagatgaggatacaagaaatggcctgtgccggataattggagcaattgccacgaagcatcagaggatttctcaaatcagtgcatctgtttcacatctaatacacaaatttgatttcactgttcctcatcttgcggaagcagttgcttctgcggagaaaaagtttggtgatggaagccttgcaatttccctgattagggaaataggtcgggctgatccaaaagaatacacgagagatagtgttggtgcggataatgttgggagattccttgtagaacttgcagaccgcttgccaaaacttatgtcaaccaacattggtgttctgatacctcactttggtggtgagtcatataagatcagaaatgctcttgttggagttttgggaaagctggctgcaaaggctttcaaggatgttgagggtgatagcaatgctcggcttcgaagtaagcaggctatgctggagattttgattgagcgctgtagggatgtgtcagcatacacaaggagtcgtgtgcttcaggtgtggtctgagctttgtgaagaaaattctatttcaattggcctgtggaatgaagtggcttccgttgcttcagggcgactggaggacaaaagtgctattgtgagaaaatcagcattacagcttcttataacaatgctgcaacacaacccttttgggcctcagttaaggactgcaacctttgaggcaactctagaaaagtacaaggaaaaattacaaggaatggagccttcaaattcagacaaagatgaggccgcaaatgatagttcgcctggtgaagtgatcatggggcaagatgaaagtgtcagtgatagctgtttagcatcaagtcaggatcaaaatgaccgtgatgctacgattgtggatataacaaacttggaacaaataagagctttagttgcttcacttgaagctggtctgcggttttcaaagtgtataacttcgttaatgccaattcttgttcagttgttggcgtcatcctcagctactgatgttgagaacaccatccttttactgatgagatgcagacagtttcagatcgaaggatcagaagcagcactcaggaaaatgttacctctggtatcagcactgtgggactatttttgctttaacataaatggagtgagaccagtgcaaagccgtggagctctatctattctttgtatggctgcaaagtcgtctcccagcattttgggtaatcacttgcaagatattattgacattgggtttggacgctgggctaaggaagaacctctgcttgctagaactgcatgtcttgctttgcagagattatcagaggaagacaaggacaagctgataagtaataatagtagagtatttgctgcattgcaaggtttggtaacaagcttctcgattcctgagaaaatatggtatggagctgcagataaagctataagcaccatctataccctacaccctgcacctgaactttttgctactgagactgcaaagaagtctctcagttctgtattcagcgttttaggaacaaatgatgtgtcaaatggagatgaagctcagaatggtgcctctctgtcatcagtatcaccttcaaagctgggtagatttctttttgttattagccatatagcactaaatcatttggtgtacattgagaattctgttaggaaaattcagaaacagaaacggaagaatgaaaaatctcagcccaccactgaggatctccaacctgacgtgtctaaaagtttggaggcacaaggcataaatgccgaactgggacttagtgcaaccatagatattgcaatcgagtcccttgctgaaagagcagaaaaggaaattgtttgctgttcttctgaaaagaatctcataggacattgtgggccatttctctcaaaactctgcaggaatcttgcattgctgcaaaagttcccagaccttcaagcttctgcaatgcttgctctttgcaggctaatgatcattgatgcagagttctgcgaagcaaatcttcaaatcctgtttactgttgctgagagtgcgccttctgaaactgtccgatccaattgcactatagcccttggtgatttagcagttcgcttcccaaatctcttagatccttggacagagtatatatatgcccggttacgtgatccttcagtgtctgtgaggaagaatgctgtgctggtcatttctcatcttatattgaatgatatgatgaaggttaaagggtatataaatgaaatggctgtaagaatagaagataaagatgagaggatatcaagcctggcgaaactcttctttcacgagttgtcaaagaaaggaagcaacccaatttataatcttcttccggatatcttgggtagactatgcaatcaacacctcaaagaagaaacattttgcaatattatgcagttcttaatcaactcaattaagaaggacaaacaaatggaagctcttgtggataagctgtgcaataggtttgctggagtaaatgatgtcagacagtgggagtatatttcttattgcctttctcagctaaccttcactgaaaagggcctgaaaaaactcattgataattttaagatgtttgaacatgcattatctgaagattctgtgatgaaccacttcagaagcgtaatatcaaagtgcaagaagtttgcgaaacctgagctaaaaatttgcattgaggaatttgaggagaaacttagcaaggttcatcaggaaaagaaagagcaggaggaaacaacaaaaaatgctgaggcacacagacagagaattgattcgcttgatgaatttctggttactaaggaagttagtgagaacagtgggaattctgctgaagatgaaactagcgaggtagttgatccttctgtggatagcagcacggaacatatggagaacacgccagaatgcagtgtcaatactagtgctgagaattctcagacaacagccccacttacagaatcagaaggtggcggtgaagagattcaatccgcacaacctgttagcaaaggcatgtcacggttaagggcaaagaaaaccagagatcctgttgtagatccttcggtggaccgcagcaccgaatataaggggaacacgccagagcacagtgcggatactagtacggagaattctcagacatcagtcccacttacaggaacagaaggtggcagcgaagagattcaatccacacaacctgttggcaaaggcgtgtcgcggtcaagggcaaggaaaaccagagaccccgttgtagaggactcagcagctccagtgagacgcgccacgcgttcaaccagaagacaaggaagctgatggtgcagcaaagcggcagctcaagccattccgtgccgatctcgcctcgaggtcccggagtactggaccacagcaaagcggtgcctggacgtctggatcggagagttggctggctctatcctttttgcgtgatgcgtgtcggtctagttttagctcgctgattcccggacaggccaataatgatctctcgtgaatctgtctaggggcagtatgtttaactgctccatacgaggagctcttgtgtttggttgttgcagtaggtcggctttcatatggattgtctactacagacattgctcccttggggagcgtatgtataatatctggcctgatctttttgaggcctgatgacgctatgatatttttgaacgtgttgttcttatgaatccagcaggctcagctgatttccagcctttcaatgtgac

SEQ ID NO: 38471 - DNA, 3227 bp, Zea Mays
gtggagctcactgtttgatttttttggtactcaagcgtcgctcctgttcactttcctcagcccttccagaagctgagagattgagggcggagcgtgattttcgcggtgattttcctgctcccatatcgttggcggccggttgatagcgagttgtgctggagggggaggtgcctgtgacaggatctgtggttgctgtccgtgggcaacaagctgtgtcgaaggaggtcgaactcccaacgcgatgtgtggtggcggggatagttcaatgacgttttcagttccaacctgtagcgatggtgctccagctcgtgttgacacggtcgatctggtatcgcacctcttcactttccccatccccttatggaaggcgtgagatagagtgtcgaacggagcttcccacgacgatgctgctgtttgccggcgagctctcccccctacccatttcttctactcctttgtaaggctcagagagctgcctacagagagaaggtgctaattgaagcagagaaacagtttcaggacgatttcaattttttgaaggaaaaggtattagttgattttggccaattagtggatgtccaacgtattgacagtatttgccaagttatgtgcgacaagttcaagggttgttgttcggtttgcaagacaatgtgtattgaagctatagtcgattctgtgaaaattatggttgaagcaatgtctatcaagcatcaggagattttgaattccatgaaccctctagtgaaaactatggctgttaagcagatgagaaatacacccatactgatatcaatgtacaaccagctattgttaagtcggatgagaaagtcgttgttgcagactttgttgagtcatctgatgggaaaaggtcttggtgtgggtactagcaatcctctggtaacagtgcccatacatctgaacacatcaacacaccagtcgtttataggtcggatgcaaatactgcaacttctgtgaagcccccagcggagcgtgttcatccactcaacaagcgattccatttctccaaaactgacaagttgggtcgctttccacgtacaagcctcttctcacctgtgggtctttttgacctccacatttcagatgatgaaagtgaccacaaaaaaatactgcacctgctagtgctatatgtccacatgggtcagatgtcattccaatcgggttaggtcattctattttgcctacatgcacccatggtgttcatcctactcctcccaatgttgtattacaacctttaattaagtcacatgcaaattcctctagaagccttattgagttgtgtcctgaaagtgcaacagcagcagtagccaacactgatgtaccagataaggttgtttctgtgctagtttctcatgctcaaaagtctcatgttgctggggcagttcctccagtgaatgacacattctttgagccaacattaacatgtaatctttcaacactgaactcaacagaaaggcctaggaagttcgaagggataagtggcaaaaatcaagatgttattgttattgacgatcatgtgagagcggttcaggaggttcacaatgttgctggtgaaatggttggtgctagtttatatggcagtagaagatctaaatcaacagctatagttgaccaaatgtacaatgataggaatatattcaatgatccagaagctaggggaaatttgttgggatatcaactagaagtggcaaatttagtcaaaagtgatattcagtatattggtgaaaatcggttacaagcccaacatcctagtgtccctttaccatgttctgttgtacaattgcgatattattatatcctttgtggcatggggcgtagccaatggaaagattttgttgcagttcggttttcaaaaaccaccactataaattgggaatattttggactgtcaatagaacccaatggacattgcgacaacttttttattgctgggttctgccaaaaacattttgaagatgttcatccaaggatgtcaaagaaacatttcttttatcccaaagttgggaacgtgtcgtgggtatggtctccaggtatggtgcttggtcatgggagcttttttgtacgtctatatcattagttgagataacatgcaccgaatccacttcaacatgtaggctaagtgtttgcagactgcagagaccttagtcattaagaagtcctgatccttgtctcgctggctattgtttatataaagtcgaaatatattgttttatgaacctctcattatgttctatgatgcatttgtttttggttactgcaagggggacatgtatgttgactattttttctaaaactccatcccttgactgacctgaaatacagttgtgacctctgctttttttagggctgttacgtgtgcattgtcattggtttctgtgagggagggggtcatgtatgtctatttttttttctgaaaccccaccctcgactgacctgaactccatccctcacttgtttgtcttgaatttttctcacatccaaatagaagtgcttgtcatcatctcattgtcaactgaagcctgttttatgaatcttcgaagattggtgttcagaaaaagacaaaaaaatgcaaattgcacatgaatcgagcggggaaatgtcgtttggatggggacgtcagccagctttcttgggaacatttagcaagaggcttaacaggtgtttcaatgatgctacaaatggggttccaggtgatggttggtctctaatgagcaatgatggtgctgaggatgttcctattgttgtcgactctttctccaaacaaacttattggtgctcatgtcaactcctcccagatgttttttgactgttgaaggtggtctcctgcgtgttaaggtataaattggatgaacttgcggaactgatccaagctgagcggacagagatcccggccgccactgatgatgcctgagttgaagaagagcagagggattcgtcgtcctggaattggaacagaaccgctctgtgctctgtcagtgtcatgaattaattaagagctccgcgtctgaaaattattgcagtatatatatcctgggctgggacgcatgcataccaagcgcgccggcctgttgtagcagcttcgctttatactgtgcgtagaagttgatctgtgtaggaatataaaataatccagtggccaccaggcggacaggaacagcttgttgctccataacaccatgattattagctaccttgctttcaagcgtttc

SEQ ID NO: 38472 - DNA, 620 bp, Zea Mays
cgggattatgaaggccatcgacgcaaatcagcagcgaaactcttagcacggggcgcagaccaaacaatatagcaaatttctcatatgcggagatccgcacagctccgcctcaaagcacgaccagatgaatccgaggcgcgggccgacggtcgcctccaaaacgacactctaggcctcgcgtgtatcagacgagcacgggttgagaaaggagttcgcctgggattgtcgatggcgacacacgacccaaggtcccaacccaaatcaccaggagcgggaaagaagagatctgcggctccgctcagtgctcacatcaaagaactgttcagggagcccatctgccgtcttcgcagcgggacatgacgcggcggagcagacggagacccagaacctgcaacggttttctctacgccggcaacggaaccgaggtggcacgggcgggaagccgccatccggttctctcagcggcgacggcttcctggacctcgtccacgaaatctggggcacgtattcgaacgaagaggaaaaaataaaacactgagccatggcgaggaacgcagaagaatcgaaacgcaacggaaaagcgtggaaatcatggcgatggcgccaggagggacggccgg

SEQ ID NO: 38473 - DNA, 1505 bp, Zea Mays
acccatcctgctcagtgctcacttccacgcgggccccagcccgccacgagtccccgctcccacctgctcctcgccgccgttagcgcgccccgagccccgacagcctttctccttctagggtttctctctgtttcgtcctcatcgaatcggagtttcgcatggagtcatcgcggtctcggaagcggacgcgccaggcgcatgactgtgccgccgcgccgccaccagagcgagaagtggtagcgaggggtggcgcgtcgccaccatggagggaggatgaccgtgatggacacttcgtattcgaccttggcgagaacttgacccgccgatataaaatcttgagcaaaatgggagaaggtacatttgggcgtgttttggaatgctgggaccgtgaaacacatgaatatgttgccataaaagttgttcgcagtatccgcaagtaccgtgatgctgcaatgattgagatagatgtgctcaatcgccttgcagaaaatgaaaagtacagatctctttgtgttcaaattcagagatggtttgactatcgtaatcatatatgcattatatgcatgagttgcggcttatccacactgatctgaagccagaaaacatactacttgtctcttctgagtatataaaagttccaagtacaaaggtttaggctggagttttccatgtgatatttggagtgttggctgtattcttgttgagctatgctctggggaagcattgtttcagacacacgagaatctggaacacctagcaatgatggagagggttttgggacctctaccagaggatatgatacggaaagcaagctcttcagctcagaaatattttaggagagcaacacgattaaattggcctgaaggtgctgtttcaagagaaagcatcagagctgtgaggaaactggatcgactaaaggacttggtatcgaggaacgctgaccattcaaaggtggcactggtggacttgctatacggtctcctacggttcgagccatcggaacgcctgacagcagaagaagctctggaccatccattcttcaggaacccaacatgacttgttgagcaggcttgactcatgtaactctactgaaggtggtggtaggaagcaggcagagccgtccccattgcaaagctgaaggcatcttgttcctctataccagagagtttgtgtaaggcctgtcaatggggcttcttgtggtgataaaactgatggctttagtcacccaatgtcatgtacactagcatttttcctagggagcttagttcgccagacggcgcttgtatgttgttaaccgggatacactatgagctgtgccccgatgccctggtgctataatccaatcgcaaatgatgaaatcaagcatagcgtgcgtccgtatagtttatgattgaattgtaccttggaatgattgccctacattcgttcattcctacctagcgttgttacttcgatggttctggggtgctgttgataggtgcacacggcttgggatttgttgcatc

SEQ ID NO: 38474 - DNA, 2759 bp, Zea Mays
cagttactgttaatagttcttcctataggtgccggagtggtctgcttggctgttgacattctccctacagaattctctaaagaggcctcccaacattttggaaacatactatctagacttgttgctagtttggcctcagtgaagcaaccggcagaacttccttcctacttgagaagagcttgcattgcacatgctggcagattaactcctttgtatgaatatatccctaggatgagaaatactatgatagatttggcacccgcaaaaacaaatccattgcctgacaagaagtatagcaccctggtatctctcagtgggcacctatttgataagttccttataaatgaagctttggacatcattgagacagctggaggttcatttcacttggttagatgtgaagttggacaaagcacggatgatatgtcatactcagagcttgaagtaggagcagatgatactgccacattggataaaattattgattccttgacttctttagctaatgaacatggtggagatcacgatgccgggcaagaaattgaattagctctgaagataggaaaagtcaatgagtatgaaactgacgtcacaattgataaaggagggccaaagattttaattcttggagctggaagagtctgtcggccagctgctgagtttctggcatcttacccagacatatgtacctatggtgttgatgaccatgatgcagatcaaattcatgttatcgtggcatctttgtatcaaaaagatgcagaagagacagttgatggtattgaaaatacaactgctacccagcttgatgttgctgatattggaagcctttcagatcttgtttctcaggttgaggttgtaattagcttgctgcctgctagttttcatgctgccattgcaggagtatgcatagagttgaagaagcacatggtaacggcaagctatgttgatgaatccatgtcaaacttgagccaagctgccaaagatgcaggtgtaactatactttgtgaaatgggcctagatcctggcatagatcacttgatgtcaatgaagatgattgatgaagctcatgcacgaaagggaaaaataaaggcatttacatcttactgtggtggattgccatctccagctgcagcaaacaatccgcttgcctataaattcagttggaacccagctggtgcactccggtcagggaaaaatcctgcagtctacaaatttcttggtgagacgatccatgtagatggtcataacttgtatgaatcagcaaagaggctcagactacgagagcttccagcttttgctctggaacacttgccaaatcggaattccttgatatatggtgacctttatggtatctccaaagaagcatccaccatatatagggctactcttcgttacgaaggtaagcaactgcatacctttttgcttcagtgaggcattgctttgcattgcaagtctgatttccgttcaccattttgctgcatatgtgcaggttttagtgagattatggtaaccctttccaaaactgggttctttgatgctgcaaatcatccactgctgcaagatactagtcgtccaacatataagggtttccttgatgaactactgaataatatctccacaattaacacggacttagatattgaagcctctggtggatacgatgatgacctgattgccagactgttgaagctcgggtgttgcaaaaataaggaaatagctgttaagacagtcaaaaccatcaagttcttgggactacatgaagagactcaaatacctaagggttgttcgagcccatttgatgtgatttgccagcgaatggaacagaggatggcctatggccacaatgagcaagacatggtactgctccaccacgaagtcgaggtggaatacccggacgggcaacccgccgaaaagcaccaagcgacgctactggagttcgggaaggttgaaaatggcaggtccaccactgccatggcgctgaccgtcggcattccagcagcaataggggccctgctattgctaaagaataaggtccagacgaaaggagtgatcaggcctctgcaaccggaaatctacgttccaggtgtgctacgtagtttttcatgcttgtccttgtggaattaccatgacgtgtaacggtgctgacccgtgtgtttgcgtgtctgaagcattggagatcttggagtcgtcgggcatcaagctggttgagaaagtggagacttgaaagttccctgatacacagataaagatagtatgatatagcagggcacatgtatcttttgtattaactccgttctggaatatatatttgtgaactaaaatgtgacaaataaaaagaacgggtggagtatattgtaagagacggcaaagaaacctctgtatatatgacctgtcgatatcaaataatgccgatcagttagttggcttggctcttttgagggtttagtttatactagtaaatgagagcaaccagcgaagcataaacaagatgagacgtcagagcagcaacaacaacctgcgttgcctttggtttatattgcatcggttctccgaatgaactttgcatcctgtgcacatcagacatgtcccagagggatttcattttcattaaattgacatatcagcaaatctgcttatgcgtcgagatatttatgagaggggaagagagcttcatgaaaccaaaccggtcctcacgactacccaggcgatgaaatccccgctaggctgattgcttgatctatctactgcggctgctccag

SEQ ID NO: 38475 - DNA, 4231 bp, Zea Mays
tctgtgtagtttgaactcttctgcagacatggagggatacaggaacaagagccggtttctatacggcgagtccatgggcggagccgtggctctactgctgcacaggaaggatccgaccttctgggacggtgcagttcttgtggcgccaatgtgcaagatatcggagaaagtgaagccgcacccggtggtggtcaccctgctaactcaggtggaggagatcatccccaagtggaagatcgtccccaccaaggacgtcatcgactccgcattcaaggaccccgtcaagcgcgagaagatcaggaagaacacgctcatctaccaggacaagccccggctgaagacggcgctggagcttctcaggaccagcatggatgtggaagacagtctgtcagaggtgaggatgccgttcctcgtcctgcacggcgaggccgacgcggtgaccgaccccgaggtcagccgcgccctctacgagcgcgcggccagcgccgacaagaccatgaagctctacccggggatgtggcacggcctcaccgccggcgagcctgacgacaacgtggagctggtgttctccgacatcgtctcgtggctcgacaagcgcagtcgccactgggaacccgacgagcgggtgagaagggctccgccggagcctgagaacaagcgccgcgtcaccagcagcagcagtcaacggcccggcagcttcctctgcggactaggctgccgctgccggcaacaccagcaacagtgtagtaggatgtagatatggaaaacgcttgctttttcctcctcctttaagttgttgacaaagaactgagaaaagtcatggtctcaacaaagatcttgttccatcctaagaactgtgtttctttgttctagtatagtttctgggagcaggataggcattctccgcgtgtcaacaaagaaagaactagacccaccaaagcagggcacacttgcaaaagcaaacaaaaaaaagtgagctataccatatatatgatgctatgctctcaacaaagaattagatcatccaggtttatccccaacggttcaactggaattttttttgtatagctaatggctgagcgaactgagagagaaaaaatacaggagaaagaatagcattacagcatcaaccaaggtatttcagcgacacattcccgacgaactacatggccatagcttttgtcagtaaggagaggagggtcgaccaagcagctagaagcaggccaccaaaaatttccaagtcccgtgctcctcttccgtcctagccttgctggtttccggtggtggcagccgcggtgtcttggtcgccgaagatgcgcttgcggaagtcggtgaccatgaggggaaggccctcgcggagggggatcttcggctcccacccaaggagctccttggcacggccgatgtcgggcttgcgcttgtgtgggtcgtcctgggtgttctgacggaactcgatccgtgcgttggggtcgatggtgtcctggacaaccttggcaagctccagcatggtgaactcgccggggttgcccaggttaaatggtcctacatgctcgccttccatcagcttcatcagaccctcgacctgggagaagacccacaaatcagtacaatgaatgcaaagaataatagattcccttgtaatgaatagttcgagcatcccacttgctggctaggccactaagccaccggaaaaaaaaaatcaaatctggtactctggcagtgatgttgaatcgagtgtctcttatttttttttcaatatatgttgagtagaggtagacttgccagatcagaaacatattggaaactcctggtttgctttccatcaccataaaccgtcaagggctccttcctcagtgcctgagcaacgaagttactgacaacacggccatcgtcaatgcacatgcgagggccatatgtgttgaagatacgtgcgatcctaacctggaaacaacaagaaatcaccaagatgaatctacttcatcgcagacgaaatgaaattccaaccgaccaaaccgacatttttggattgcgacttacctcaaggttggcaccacggtggtaatccatggtcaacgtttcggctgtacgcttgccctcatcgtaacagctcctgacacctgtcattcagaaatcgtacccatcagtaaaactctgcagagagcaggcaagagcttgcctactctgtaaagaagccgtcgagtatccaacggccaacaaatgctatgtaaatagctcaacaaacttcattcattgttttaggtgcaatggttggtgggcgtttggttaggcatagttggtcaagtatagttgtgttctcctattgctttattgaaaaggatttgcacctcaaagtggccctcttggagcaaattccaccaaccaacattgtccttttccaccaaaaagaaccaaaacatgcaagagacccaccaagttaagattccatagccagcatctccaagatacccttttgcatattgcttatacaagacttctttcatgcaacagtaagcttcaagtctggaccagcactgttttctgaaaagggctcattcctgcttactacagctcggattaaaaaaaaataataaagatttgacaacgtagagccttcctgtttgcaacagtacattgtccagcttgcaattccctcctccctctctttttcttggttttgttcactaaaagactatggctgcagggtatatgtttaggacaacccctcagtcgtgagtcgtctatgctctctccaaagttatactcatacaaaagcatgacaaagaaagaatgcgcatgagagatcatttatttggtggctgacagttccctgccatatgcatgacacaactaacaattagctaacctcatcatgctagatctaagaaacatgaatgatcatttgtcgctgcaacaaattaatttcaagagttcaaccaagagagtataaacaacaagagttattaccgatgggattgacattgccccagtaagtctccacctgcgggtgctggaggggatcaccatagacctcactggtactggtgaggaggaacctagcattgatcctctttgccaatccaagcatgttcagagtcccaaccacattggtcttgtgctatcacaaaggttaaggctacaaaccatctcaagaaagcaaaacaagcagaaactaaatgaattagccacccttttgacttcgtcacattgctactccccaatcagttgcaaaacaagtaaagcataaagaaatcacgtgaagtgaacagtaagcaaagttgtttcgaaagtggaaagggcaaaggccacttgacgtcaacttttgtgttgttgaaaattgaaatgcgccctttatgtcagaactcagaagtaagcaaagtccaccactgacccagatccaggcacaccttgcgcttacttttcgctcccatgaacagatcatgaagcaaagtaaaacagtaaggaacaattgagttcatatctcggctttaactgttgctagtacgttttctctattccaaacgcacgggaaacttaagtcagcattcagaaacataaaaaaaaagtttttttctgagaaatacaaatggtttcgacagggaaatgatgcgatgatttgagatcttcagttgaatctcgagaatttgagttcaactgaacatttgacgccagatttcatagatgcaaataaacagaagaaatttcttttgcgttaaatgaaaaggagggattgcccttgagcaaagggcagcctagcagacagagatctgaaacggccgacctggtggctgtgctttgcatcagttgagcagaaaactccaaaatcagagtgaaacgtggcgcaaatctcgagctccggacaaaattctcctactgtgccatattcccatttcatggaccgacccggaatctcagggagtagtgaatcgggcctcatcctcccagaagcattgcgtgttaaccgataaacctggagaaaggaacaaattccccaccaaaatgcaatagaaaccaaatccatccctataacaatataaaacattttgtttggcaccaaaagaagaaaaatagaaccgatcgcgatccaggcatcaatcatgaatcagtcatggaggaaaggaaaagaacgcaacagaactgaaggaattcgtagagaaaggatatgattgttttgatggggttgtatttgtagtggacgggggacgcggggcaggcgaggtggtagatctggtcg

SEQ ID NO: 38476 - DNA, 3224 bp, Zea Mays
ctagtgcatggagcatgtagtacagaagtagcaaccagccaagctactctccacggaagctctactatcatcaagctcaaccagctagccactgtgtgtgagctcatttctagacacgtaccacagtgtgtgctattgtgacgcagtggatgcgtgctagaaagtccgtgtgtggctgtgtgtgcattgcttcgaccgaggcagtactggtcataccgtacctttcttggatctgaagctcagaagaagctagggttctctcatcaggttacaaggctaattaacctgaggtaagaaactgaagatctagacatcagcagctggtgcagctagtagcagcaagcagccaggcaccgtcacttcactagcacagcctaagaacttcgaaaggccagccagggcaggctgtgttgttgtcgggagcagcaccaataaacggttgcgcctccgatcgagagcccacacactgatcgggagatcggccgctacggcgctatacctctaactgccgggcgcgaactacgtgcatccatggcgccgccgagctcgtggtggggcggcgaggaccaggacggcacgccggtggtggtgaagatggacaacccctactccctggtggagatcgacgggctcggcgtgccgcccgccgacaaggcccggggcaagaacgcaaagcagttcacgtgggtgctgctgctgcgcgcgcaccgcgccgtgggctgcgtggcctggctcgcgggagggttctggggcgtcctgggcgccgtgaaccggcgcgtgcgccgcagccgcgacgcggacgacgagccggacgccgaggcctcgggccgcggccgcgccatgctgcggtttctgcgcgcgttcctgctgctctccctcgccatgctggccttcgagaccgtggcccaccttaagggctggcagttcccgcagcacctgccggggaacctacaggagctggaggagcagctgcagcacctccccgagcacctgcggcacctccccgagaacctgcgccagctgccggaccacctccgcatgccggagcggcaggagatccagggctggctgcaccgggcgtacgtggcctggctggagttccgcgtcgactacatcgcctgggccatccagaagctgtccagcttctgcatcctgctcttcatggtgcagtccgtggaccggatcgtgcagtgcctcgcgtgcttctggatcaagatccgcggcatcaagccgcgtgtccccgcgtccggcggcaagccccgtggaactactggaaggaagagcgcggatgccgagaacggtttcgccgatggcgacgccgacggctacttccccatggtgctcgtccagatgcccatgtgcaacgagaaagaggtgtacgagacgtccatctcgcacgtgtgccagatcgactggccgcgggatcggcttctgatccaggtgctggacgactcggacgacgaggtgtgccggatgctgatcaaggcggaggtgaccaagtggagccagcgcggcgtcaacgtcatctaccgccaccgcctctcgcgcacaggctacaaggccggcaacctcaagtccgccatggcctgcgactacgtcaaggactacgagttcgtcgccatcttcgacgccgacttccagcccaacccggacttcctcaagctcaccgtgccacacttcaaggagaacccggagcttggtctggtccaggctcgttggagcttcgtgaacaaggacgagaacctgctgacgcggctgcagaacatcaacctgtgcttccacttcgaggtcgagcagcaggtgaatggcgtctacctcaacttcttcggcttcaacggcaccgccggcgtgtggcgcatcaaggcgctggaggactcgggcggctggatggagcgcaccaccgtcgaggacatggacatcgccgtccgcgcgcacctcaacggctggaagttcatcttcctcaacgacgtcaaggtcctctgcgagctgccggagtcttatcaggcttacaggaagcagcagcacaggtggcactccggccccatgcagcttttccgcctctgcatcccggccgtcttcaggtccaagatcccgttctggaagaaggcgaacctggtgatgcttttcttcctgctgcggaagctggtgctgcccttctactccttcacgctcttctgcgtgatcctgccgctcaccatgttcgtgccagaggcggagctgcccatctgggtcatctgctacatccccgtgctcatgtccctcctcaacatcctgccggcgcccaagtccttcccgttcgtcatcccctacctcctcttcgagaacaccatgtccgtcaccaagttcaacgccatggtgtccgggctattccagctggggagctcctacgagtggatcgtcaccaagaaggcgggccgcacctcgtccgcgtccgatatcctagcgctcgccgaggccgactcccacgcgccgctgccgccgccggccaagctcgtgcgccgggtctcggagggtggcctccaggagtggagcaggctcagggagcaggagaccgccgagtgggccaacaaggaggaagctgctgcggctctggccgccgctgcgccggccacgcccaagatgaccaggaagaccaagaagcccaaccggatcttcaagaaggagctcgcgcttgcgtgcctcctcctcacggccgccacacggagcctgctctccaagcaggggctgcacttctacttcctgctcttccagggcgtcacgttcctcgccgtcggcctcgaccttatcggcgagcaggtcagctagccgccgccaccgcaagaataaacttttaaatagcggccgggtcgccatgcacggcctgctggccacatatgcacaggcagtcttacatgcatgcgtgctggtgtaaccattaccatcgaaggcacaacttcgattgacggatcagattaatatttagactttcttctcttaattttatccttttgatatttttttttgttcagagatcaaagaatatgtgtggtgaactctatttttccttgctctagctagtgcttcttcgttgctactacgtactaggggagggaatcgggttgttcattgcattcacatatcagcactactgatctatgtattcagtagcctcttgttttctttcaacagtacattatgatctatatggtgtaacaaatacatgtcaatggataaatcaatcttgt

SEQ ID NO: 38477 - DNA, 2006 bp, Zea Mays
cgacgaaagacgcggaggttggtggtgaaggaagaaagaaaacgaaaggcggcctcccactcgcagtcgcagtcgcaggttctagaccaccaaacccagcggctcccgctcatctcagttcggcttcggccttcgcattcctctacagatttcgcagttttgctgggggtaactacggaatggggggcggatccggatctttcctcaaggtcttggtcaacaacatggatgtcctcgcggggcctttggtttcacttgcgtatcctctgtatgcctctgttagagcaattgaaacaaaatctgctgtggatgatcagcaatggctcacgtactgggtgctgtactcatttatcactctattcgagctcacctttgctccggtactcgaatggcttcctttctggtcttatgcaaagctgttctttaattgctggttagtattgccacagttcaatggagctgcacatgtttatgagcattttgtgaggccaatgattgtaaatcagcaagttgtaaacatctggtatattccaaagaaggatgaatcaagtaggcctgatgatgtaatttcagctgcacagagtggacacttgatgactcgggctgggagagctatccaagtgcagtatgtgctcatggcaacagttatgtatcacgccgtggctttggatttacctaaatgggctatcaaagccattgacaaaattagacatggctttctttggaaaggacgaaaagatgtgctcggtggtcactgcttagttgcttggggcaaagtgacacgtacaaaggagcttggtggtcttggcatctctgatttacaaaaactgaattgggccctacgggtaagatggttgtggttggaaaaaacagacccctcgaagtcttgggctgatttgcctctccagagttccagcatgctgaaatctatcctctctacaactatgattacagaggtgggtgatggtcgtaacaccttattttggagggatagatggttgatgggacagaggattgaggacctagcccctcatattttcgccctcgtcccgactaggattgccaataggagaacggtggcagaaggactagtggagatggcttggatccgggacctgagaggcaccatcacttgagctgtcatctctgatcttttgacttttagtgaagttattgcagaattctcccttagtcatggagtgccagacaagcatatctggagatgcctcgtccggccaatactcttcaaagtcgacttatgatatgctattcctaggatccacttcttttggagcctttgagcgtgtttggaagtcttgggcaccttcaaagtgcagtttcttcctttggcttgccatgcacagtagatgttggaccgcagatcgtcttgctaaaagaggactaccccaccccattgcgtgtcccctttgcgaccaagaagaggaaacaatacaacatcttctcatctcttgcgtttttgcaagacagttctggtacctcttgctgcgcaggtccgggttgcctaatctttcaccggacaatgctctttgcagcttaaaagactggtggagcagggctgtggagaaggttccccgagatctccaatcaggcttcaattctctagtaattcttggcgcttggagcctttggcgtcatcgcaacgactgtgtgttcaatgggaggtcgccgagcctagcaagtgttctcaccctcgctggtgatgagcttaggatgtggtgtcttgccggagctaaaaggttgaacctgctttcagctgtagtgtttgtgtttgaccccgggtgataatcttgtgccttgttcagagtgtttgtgtgtggtggctgtgctgtgtcttgttgtgtcgtgtggattgagttgtgtgtgttgtgttgtaccttcttctatctattaatggaaagatacgcagatttcctgcgtgttcgataaaaaaagtaggtgatacactttgaaataatgtcgccagaatatcttagtttgttctcaaa

SEQ ID NO: 38478 - DNA, 1095 bp, Zea Mays
caaggcatcccaattcccaggcaatctgaaaccgctccaaccctaatctaattggtagtcgccgccgcctgagccaaatctccgccccctccgtcgtgctgtctccgtgcatcgcccgcagtcgcttgcatcgccaccttctccatctccaaccccgccatgtagaccccatgccttcttcctgcctccgcggaccgtcgtcacaccatgaatgcgaagctcttcgccatcgaggcctccgtcttcaagaaggaaaaggtctccctggccatgaggaggtttgatttgtaggcctagccacctcctccaccagttacctcgccatctcccgcaaaaccctaaatcctgctccctccataggcacagccgccacatccatccccttctctgccacctccatccccttcacttactccagaaattttgttgccaacctaggctaggtggttcggtagatcttgagattttaggcgagtatccgatcaaccgcgactgttggattgtagaatggaggagacggaggcatcaagcagcagtacgacttccggccaattgagcccatcaggtttagtggcgctgttagagacgacgccgtcgtcgacatcccactcaagaacatggggagcaaggcgggggagctctcgttgtgggaatcagatttgaagcggcgagaggcggatatcaagaggaggaaagaggctctgaagaatggtgcagatccacatttgtttttgcataattgctgccatagctccaccaattgtatttcatgagaaaccattaatcatgtttgctttgtgaccctagaaaccagctaggcacaagcagcacctcggccccctcctcggcgagacggctactgtctcgaggcgtacaatgaccgctcacctcgcgggcgtgcctagctcgtcatcggtctccaatgccacgttcgtgctactactccaatcgttgctgacccgtgtgatctccactgacttccgcaaggagtgcgggcaccttcggtcccatccgctgttaaggagagcacacgcttatggtgttccacagagtgacattttattcattcatttacaggcttacctcgcttatggt

SEQ ID NO: 38479 - DNA, 311 bp, Zea Mays
gcgacgagaactttccgatgaactccagttttttaatagaaagtatatgtcgtggtttcggaaaccggggagacaatagatttgagtttggtggggaatacaggcacggactcacaccgaatggtgaatcacgagcatccaggctaaggagctgagacatagggagttatactggttcacgctagggccctagtccaatatagtgttgatcgatgtattgcttaggagcgtgttacaacaagtgtgcttgtgtggagaaagaatgttgtccagcacttttatagctaaagggtggactttacagttgggac

SEQ ID NO: 38480 - DNA, 2886 bp, Zea Mays
cacaagcccaacccttcctgacgctccacgcgctcgtctctctccttccttccatcctccctccctccttccctccctcgctcgcctctggaggaccctcgccatcctgcccaagcgcaccaccaaacccccagcagcggcgctagggttcgcgcctcggcgcgtcggcaccgtcacctgcggcgatggcggggcaggagcgtaggacaatcgatctggaggagggatgggcgttcatgcagaagggcatcaccaagctgaagaacatcctcgagggcaagcccgagccgcagttcagttccgaggactacatgatgctctacacgacgatatacaacatgtgcacgcagaagccgccgcaggactactcacagcagctctacgacaagtatcgggagtcgttcgaggagtacatcgcctccatggtactaccttcattaagggagaaacatgacgagtttatgctgagggagctagtgcaaaggtggtcaaaccataaagtcatggttcgctggctgtcacgcttcttttattaccttgaccgatacttcatatcaaggaggtcacttacaccacttaaagaagtgggccttacttgcttccgagagttgatctatcaagagattaaaggacaagttaaagatgcagtgatagctctgatagacaaagaacgtgagggtgaacagattgaccgggctctgttgaagaatgttttggatatttttgttgaaattgggttgggtcaaatggagtgttatgagaatgactttgaagatttcttgctcaaggatactacagagtactactctgtcaaagctcaaagctggattcttgaggactcatgcccagattacatgattaaggctgaggagtgtttaaagcgggagaaggagcgagttggtcactatttgcatattagcagcgaacagaagttattggagaaagtgcaaaatgaattgcttgctcagtatgcaaccccgctgttagagaaggagcattctggatgttctgctttgcttcgcgatgacaaggttgaggatctttctaggatgtacagactcttctccaaaatctcccgtggtctggagcctatttcaaacatgttcaaaacgcatgtcacaagtgagggtacagccttggtcaagcaagcagaagattctgctagtaataagaagccagagaagaaggatatggttggcatgcaggaacaggtctttgtgtggaaaatcatcgagctgcatgacaaatatgtagcttatgtgacagaatgtttccagggacatacactcttccataaggcacttaaagaagcctttgaggtcttctgtaacaaaggtgtctctggcagttcgaatgctgagttgttggctaccttctgcgacaatattctgaagaaaggctgcagtgaaaagctcagtgatgaagccattgaagatgcccttgagaaggttgtgagattgctggcatacatcagtgataaagacctgtttgccgagttctatagaagattacttttcgacaaaagtgctaatgatgagcatgagagaagtattctgacaaagctcaagcaacagtgcggggggcagtttacttccaaaatggagggcatggttacggaccttactgtcgctagagatcaccaaactaagtttgaagagtttgtagctgggcatccagagttgaatcctggcatagatttggctgttactgttttgacaacgggattctggccaagctacaaaacttttgacataaaccttcctgcggagatggtgaaatgtgtagaggttttcaaggaattctatcaaacaagaacgaagcacaggaagctgacatggatttattccttgggaacctgcaacatcaatgctaagtttgatgctaaacctattgagctcattgttacgacatatcaggctgcattactactactgttcaatggatccgaaaggcttagttattctgaaattgcaacacaattaaacctgtcagatgatgatgtagtgcgtttgctccattcactttcttgtgcaaaatacaagatccttaacaaggaaccagcaaatagatccatctcgcccaatgatgtttttgagttcaattcaaaatttactgacagaatgagaagaattaagattccactgcctcccgttgatgagaagaaaaaggttgttgaagatgttgacaaagacaggaggtatgcaattgatgcatcaattgtgcgcattatgaagagccgcaaagttatgggtcatcaacagctggttgctgaatgtgttgagcagcttagccgcatgtttaagccggacttcaaagccataaagaagaggattgaggatctcatcacaagggactatttggagcgcgacaaggacaacgccaatacgtacaaataccttgcctgattggtggttagtgacaaagtccaaaacagctccgggactatgcgataccactgggatggcaatcttcctgcaatgtcgtggtagatgcgtattctggctccgttgtcacctgttggtttgtggaggcagagtggattggtcagctagctgacggaagtcactgactcactagaagctattaagtggttttgtacttactgagtcaaatatatgtcatacgttgaaaccatgtttcgtaattatgaatagtttctttaaaattaaattttgcgcaatcaaatgcctttctctgttgcctaaggacagtcacgctctgatatgcgatcatttcacatttaccgagtcaaatagacgtatgtatatagaaaccataccagtatacttaagttcattttagctcgttataaatgttctctctctcttaacgtccagccatcagtcgaaatattgattcttgtgtaaatgacatctattttttttt

SEQ ID NO: 38481 - DNA, 4853 bp, Zea Mays
cccagcccaacactttgaactggggaaacggccgcctccttttttaacgcaatcatctctaccgggcgtgttgctcgcctttttgcttccgctccgcctgccaagcaggcccggcgtccaactctggtggcaactgccagggcagcccggcattactggttgtcttgaagaagaagatgatggtgggctcttcccgccaccagctgctgcagaggaaggggaagtccgtggctgacaagggcgccgccgccgccgccgccactgtggcggcagagaaggtggtggtcgcggtgagggcagccacgagggagatctccaagacggccatcatctgggcgctcacgcatgtcgtgcagccaggcggaagcatcatacttcttgtcgtcatcccggcacacagctctggcagaaagttctggggctttccgctgttcgctggagactgtgcaagtggccataagtctatgttggatcagaaatgtgatttatcagagttgtgttctcaaatgttgaagaaaattgatgtgtatgacatagacaagataaatgtgaggtataagcttgtttccggctctccttctggtgttgtagctgctgagtgcaagcaagcacaggcaagctgggttgtgctagacaaggatttgaagcatgaggagaagcgttgtgtggaggagcttcagtgcaacattgttgttatgaagcgatctcagcctaaagtccttcgacttaatcttgtgggatctcctgataaagagtctaaagcaacatgtgcagttccacctgtgctagatggttctaccagtaaaattgcaactgatgttaaggaagcacggagttcaattcgaggacctgttgtaaccccaaatagcagcccagacctggagacacctttcggaagtactgaagcgggaacttcctctgtctcgagttcagaccctgggacatctccgttttctgcttctgaaacaaatggttctctgaagaaagaggtgcaacaaacaaaggataaaattcagcattcagatgctaatatttctgattcagacagtgaaacattgagccctccagcaaatttctcacttcagccatggatgtctgatattctacagggaccagcatcgtcaagatcacttggaaaagttccacgaaaaaatcgcactgcaactgcagatgttttgttggaaaagttttccaagctggatctcctgaatgaaattaatgctatgagaagcaggtcagacttaaacttccgaggagatgtcagggatgttgttttgttggcaaggaatgcacctcctggaccacctccgctttgttcaatatgtcagcacaaggcacctgtttttggaaagcctcctcgctggtttagttatgctgaactggaacttgcaactggtggtttctcacaagcaaacttcttagctgaaggtggatttgggtctgttcatcgaggtgtccttcctgatggccaggctattgctgttaagcaacacaagcttgctagttcccagggtgatgttgagttctgctcagaggtggaagttcttagttgtgcacaacatcgaaatgttgtaatgctgataggtttttgcgttgaggacagaaggcgtttattggtttacgagtacatctgcaatagatctttggattcacatctctatggtcataatcgagaaacattggagtggactgcacgacaaaagattgcagttggtgctgctcgtgggctgcggtaccttcacgaggaatgtagggttggctgcataatccatcgtgacatgagaccaaacaacatccttgtcacacatgatttcgaaccactggttggagatttcggcctggcgcgatggcaacccgatggagacatgggcgttgaaacaagagttatcggcacattcggctatctggctcctgaatatgcacagagtgggcaaataacagagaaggctgatgtatactctttcggggttgtgttagtggaacttgtcactgggcggaaggctgttgacattaaccgaccaaagggtcagcagttactaactgaatgggcacgcccattcttggaggagtatgcaattgacgagctcatagacccacgactcggagagcgctactctgaaaatgaggtgtactgcatgctgcacgcggcaaacttgtgcataagacgcgacccacattcaaggcctcgcatgtcccatgttcttcgcattcttgagggtgacatggtcgtggaatctggtggttctgttactggcagtagtgattctgggagcagaagctggaggatgctgaacgaacagcaacattgccaggagtacagtagcccggctcaacaagagtcgcaaagggcaggcgaggggaaacgctcctacagtgccttgagggcctcttgggaccgagacaagcagagtatctccaacagatattagtgccgtctcataatgcagtgcagctgagattgtttagtcctgtattattccttcgccctacctcccggtctcaattttttttggcttgctcttttgtcttcacttcgtagcaatttgtaggccgaaagcttttgctgatacattgccctggtgtatagtagaaatgggtaatttcctatattacaaagccggttggaaaacggcgttgattaaggtatccacgtcacctcatttgatatcagccgtatgatctagatctactggatacgagccatcttgctcccacctgccgccagccgcctccacataaatatttttttcctgaatctccacactaccagagtcttccagcggcttcctctccctcctcagattcctctcctcgcgttctccctcgctaccacgcttgcgtgaatgccctcaccgcctctccccgtgctcgcccaaatcaccgcctctccctccctgtcgcccctgcgccacggtggttcacgcctttgaagtcacctcactcatcctgccgatgcagtcacccacaccgcctcctcccctccgctcaagccgcaccgcgatagctacacgccgcgacatcagctgccagcagcgccccccctaacaacgtcgcggcgtcctcgtgggctaaccccctccatcacttcttctcgccgggagctccatccaccttctccagcacccccacccccgctcaaatggtgtcagaagggctgagagaaaattgggaggtggaagagatgcgctcaccaatcatctctgcgagagaaagcagtgcgcagccacatgggcccagcaatagcagcgtcacatggtggtggccatcgtcacgtcgagctagagatgtcaatgggtaattccccatcgggttatagcatcccagacccatccccatcatgtttgatacatccccatacccatacccatacccatcatgggtacaaaactcatcccatacccatctccattcgggtttcgggtccccaatgggtccccatccccaattaaggaataactaggtactaacatctagcacaaactatccagatttcatacatcaccacatcggcaagcactcatccacgaactattgtccattcatccattcatcagaagagaaatcagtacttgggaccaatataagaaatggagtctgccgggtttgatggccgactcggcctcaactcattcatacaaacaggacatgtgtacgcatatgaaataaccatgggtaatcgggttcggattattgcttcccaaacccatacccgtttacccaatgggtggagattttgtcccatatccatacccatggggacaatttttgtcccatacccgtaccctaataggggaattccccatgggttatcgggtatcgggtccccattgacatctctacgtcgagctctccctctccaccaactaacagttcctgacagtggagcagaaattcattaagagcatatagggattcacaagtgattttgagcccaacaatctcgctgccaccgatactcctggttcgtatatttggttactcaaaacatgagatgatcctctgaagtagaaagggaaacactgaatacgctcttgctgaaatattctatagaaagacacaattccattttggcagatgcaagtgaaagatctacagggaaggtatcttttgttcttatattttggttgcttaacaaataccttacgtagaaactataatcttctctctaatcatatcttagtggaaagtttattcttccattgaacatcccactgagtgtaatacatatgcagaaattggggtagcatataaccgccgcaagggaaaatatggtgtagcagatgaggatataatcttatatggtcaatgtgtttgaattggtccaaccattgatattgcttcacggttgctagacttgagagtcgcggttttgcatagtcctatattttatctgcactaagagtaatatatacagccaagcagacgtttggtttaacatttacaaggtatgtttggtacttttgtttttttggaattaatggttgtccgatgcttgtcattcatatgagttctaatatcatgcccccttaaagtactcatcatcaaaagtttccatgtgaatgttttaaatgtatatttaaagggttggaagacatcagactgttattcaaacaggatcttaagtgtcgtgaaagactacaagtgaggttcaacttggcaaattatttttccagtaactaaggagcaacaattttatgtattttagcttgacatatgaatctaggtacttacatttttggaatcgggcaaacagtgatagtttgaatcacatgttttgccaaaaggaattattagaactgttcaaagttggaaaaaatacatatttatgttttcttatgcatggataaattgct

SEQ ID NO: 38482 - DNA, 1148 bp, Zea Mays
ctcccctcgggcctcgccgcctcgccgcctcgcaccttttactgaaggtttgacctcacctgcccctcctctcctctctccgccccctgctcctccgagtgaccgtacgccgtagctcgacccggccgatccccgaaaccctagacgcgccgctggtcgccggaggccgggccatggacgtcggcgcggagctgcgcgaggcccaccgcctgacgggccacgccgaccgcgtgtgggcgctcgcttggaaccccgccccgggccccggctccagccccgttctcgcctcctgcagcggcgacaagaccgtccggatctggaagcgcgcccctgacggcgcctggcagtgctcggatgtgctggaagacacgcacaaccgcacggtgaggtcctgcgcctggtcccccaacgggaagctgctcgccaccgcgagcttcgacgccaccacggcagtgtgggagtacaacggcgccgactttgagtgcgtcgccacgctggaggggcacgacaacgaggtgaagagcgtgtcatggagcccgtctgggtcactgctcgccacatgcagccgggacaagatggtgtggatatgggaggtgctgccagggaacgagttcgagtgtgtctcggtgctgccgggccacacgcaggacgtcaagatggtgcagtggcacccaattcttgacattttggtctccgtcagctatgataattccatcagggtctgggctggtgatggagacgatgagtggcactgtgtgcagacactaactgaagccaataactgtggtcattcatcaacagtatgggcattatcctttaaccttaaaggtgacaggatggtcacatgcagtgatgaccaaacgttgaaaatatgggacacaagtgctgatttgtctcaaccaaaaactggcgaaggtcatgactcttgcgaagtcatccacgtcgtctaaattatttacattgttccgttacgaaacgtactctgcacacttcccttgcacgtgggtctggaactttcccttcaaagacatccgtgccaggctaaggaggataaggcactaggaggataaggcgaggcgccacagggcagccatcgtgcgctctcgccgtcccgcgcagatccagcttccttgcgcggacgcccgtgg

SEQ ID NO: 38483 - DNA, 4957 bp, Zea Mays
cgaagcgaacagggctcccgcaccccaacacctaatttgtgcgcgcgcccgtgtcacaaagagagtgaagagagagcatggaaggctcacccgccgatgccgccggctccggccgccgcacgcgcacccggggcgcggaggcgtcggggcgtgccgccgtgctccaacaactccgcgccgttcgcagtggtcaaattcgtgcctccgacgccatccaggtgaaggttgacgccccgatttacgacaccgtcccggaggaggagtacaacgtgctcgtcgctcgccgccgcaaggaagcaggcgagttcatcatcgacgacgacgggctcggttacgtcgaggacggccgcgaggaggactggagccaccgcgctctcccttcctcctccgacgagggatctgaaggcgaggacggcgccccccgcaagcggaagcagacgcgccctccccaggcgaagcgccagccgcagcagtccgccaaggtggcctctctctccgccgctgccgcaaagacgggccagcagatctcctctatgttcacatcctcggtatttaagggacgcggcagcgaccgcgccaagaacttggcactggccgccgacagcatcgtggacgacgtcatcgccgagtttgcacctgacgagaacgaccgtgaggagaggcggcgacgggttgctagggtttgtgcgccgcagcctgtcccaacagtttcctacatcaagcctcaaaaggtaattctcgatgctgaaatggtcagatcggagaatgaaaatgatatggtggtggtggaattgaagaacgatactgagatggaaaccaatttggaagaaattcctggttctagtgctgaattggtggttaataagagtttggaggagccgaagcaggaggataatggggaagtaaagatagaaaaggcacaccgcctcaatgcaaagattaaggcggaggagtgcagaaataatgatgtgacgagtgcaacagaaggatggatgaagatatgtgggaatggggagaatgcagtaggtgaagaaggggtggctgttgatggtaacaccaatgtggatgaaagttcagagtttgagctgaaagatggagcactgcccttctacatactggatgcatacgaggaaccatttggtgctaattcaggcacagtgtatttgtttgggaaggttgaagttggcaagcaattccatagttgttgcgtcattgtaaaaaatattcaaagatgcatatatgctattccaaaccggtcagtgtttccaatggactccatatcagggatagaaagaaaccccactgctgaccttttgccatcacttcgagcaactctacatgagttggcatcaggattaaagagtgaaatagctgacaaattgtcagacctcaatgtgtcaaatttcataatgactccagtcaagaggaattatgcatttgagaggactgatctaccaaatggagagcagtatgtcctaaaaatcaattatccttacaaggatcctgctctaccagcagacctcaggggtgaacattttcatgcattgcttgggacaaacaatagtgctcttgaattgtttcttatcaaaaggaaggtcaagggaccttcatggctgtcggtttccaagtttgtgacacggccatccactcagcgggtcagctggtgtaaatttgaagttacagttgattgcccaaaggatatatctgttttgacaacaagtacaaatctagaagttcctactgttgtagttggagcagttaatctcaaaactatcataaatgagaaacacaatgtgcatgagattgtgtcggcatctctcatatgttgtcatcgggtgaagattgatagtccaatgcgtccagaagattggcagaaacggggaatgctcagccattttactgttgtgcgcaaacttgaaggtagcatatttcctataggtcttgctaaggaagcttctgataggaaccagaaggctggtagcaacgtgctagcactagaaagcagtgaacgtgcattattaaatcgcttgatgattgagctgagcaaacttgattgtgatgtacttgtgggacacaatatttcagggttcgacttggatgtgcttctacaccgtgctcagacatgcaaagtgccaagcagcatgtggtccaagattggtcgtctcaggcgatcattaatgcccaggcttaccaaaggaagcacactctatggttctggagcaagtccaggaattatgtcctgtgttgctggccgtcttctctgtgacacctatttatgctctcgtgaccttctgaaggaggtgagttattccttgacacaacttgcagaaacacagttaaaaaaggtcaggaaggaggtttctccacacgatatacctatgatgttccagtcttcaggcgaactgctcaaactggttgaatatggtgagacagatgcatggctttctttggagctcatgtttcatttgagtgttctcccactgacacgacaattaaccaacattagtggtaacctgtgggggaaaacactccagggtgctagggctcagagggtagaatatctactactgcattcattccatgcaagaaaatttattgcaccagataaatttgcacgcaacaaagagctgaactccacaaaaagaaaaatgaatcctgatactgggggtgcaaatgctgatgatggtgctgctgatccttccgttgatgatgaagtgcataatggtgatcaaagtaaagctagaaaaggaccttcatatgctggtggattagttttggagcctaagaagggtctatatgacaagtatgttctacttctcgacttcaacagcctttacccttcaataattcaggaattcaacatatgctttaccactgtcgagcgttcttctgatggcagtgtacctaatttgccagcatcaaaagttactggtgttttacctgagttgctgaggagtttggtggagaggagaaggatggttaaatcatggttgaagactgcttctggtcttaaaaagcagcagttcgatattcagcaacaagcattgaaacttactgcaaatagcatgtatggttgcttgggcttttccaactccaggttttatgcaaagccacttgctgagctgattacactccaagttatctatggtgatacagattctatcatgatacatactggacttgatgacatctccagggcaaaagcaattgcaggaaaggttattcaggaggtgaacaaaaagtaccgttgtctggagattgatcttgatggcatatacaagagaatgttacttcttaaaaagaagaaatatgctgctattaaagtagcactggatggcagcttacgagagaacattgaacgcaaggggctcgatatggtcagacgtgattggagtttgctgtcaaaagacattggagatttttgtcttaaacaaattctgtctggagggacatgtgatgatgttgttgagtcaatacatagttcacttgtccaggtgcaagagcaaatgagaagtggtcaaatagaactcgaaaaatatgttatcacaaagagcttaacaaaagcaccagaagattatccagatgctaaaaatcagcctcatgttcaggttgctttgagactcaagcaaaatggttactctggttgctcagctggtgacacagtaccttatataatttgctctcagcaggactcagataatgcacattctgtgggaatagctcagagagctagacatcccgaggagttaaaaagagaccctgacaagtggatgattgacattgactattatttatcacaacagattcatcctgtcgtttctcgtctgtgtgcttccattcagggcactagtccagctcgtctggctgaatgtctgggccttgattcggctaagttccaaccaagattgactgagtcgagcaaccaagatacatctatgatgctgttatctgtaatcgatgacgaagatgagagatatcgtggttgtgaaccactgcgtttgtcatgcccaagctgttctggtaccttcgactgcccccctgtatctagtctgattactagtgctagtgctacaagtgtatcagatccaattgaaggaaaggatgctactgctaatttctggcgccatatgcggtgcccaagatgcctagataatactgttgagtccaaattttccccttctatgctcgccaaccagatgaaaagacaggctgataatttcattagtctatattataaaggtttgcagatgtgtgacgatgagggttgcaaatactcgactcacagcgtaaaccttagagttatgggggattctgagagaggaactgtctgtcctaactacccacgctgcaacggtcgcctagtaagacagtacaaggagtcagatctgtacaggcaactatcatacttttgttatgtacttgatgcaacccggtgtcttgaaaagctggaccagaaggcaaggctccccttcgagagagagtttgtagcagtaggccaaacaattaaattggcactgctagagatccagaaaatccgagacagatgtgcatttggatgggttcagctaaaggaccttgccgtatcaatatgatgtttttcttgtgtgaaagggctcaattagataagtttgaattaaccgtgcaagaaattcatctctctgtaggttattctagatctcgttggtaaaaggaacaggacacggcaaacggtgtatcgaaacaccagccgtctttggtatttccctgcgtgacagaccttgtatcatctatacatgtgttttagccagtggctgtattgtacaactttatgttgtgtccgtctccataggcctcggtgcatgtgccaatgtagtcttgttaatataattatacgcagcgtgtgatgagaaaaaaaaaacaagacactagattactaatgtcgcgagttgcggtagatgggaaaaatatgggagggaca

SEQ ID NO: 38484 - DNA, 5098 bp, Zea Mays
ctgtccgcctgcactgcccgattctgccgcctgtccacgaggcgaggggcggtaaaaggctgggtgtgtgcctgtgtggggtgtgggtaggggaggcagagattgctgcgcgcgccccggagcagagcgagtgcttgccagttgccattactgttcggtgcggtgaggtagtagagggataaagaaagaagggactggaaggaaggaaggagtgagggagatgccggcttcgcctcgtatggggaggggataagggaaggccgatggcaatgccgccgtttctccctcttcgcgctagtacgcgttcaaagcaactgattggctgttgatcagcaagatggatgggaaaggattgtttgcggagatagggatgaaggaggaggacattgccacaatgctgtctgggaagaaagtttccgagctggcagaggatgcgtttgatggttccaaggaagaaagacagatctttgagggtgtcttctgcctaacaaacgttgatggtggattgaatgatcattatcatggaggcattggacatactgttcatgcagggaaagtggtgacaagttctagaaaaccatcaagctctgccgacaattacaaggcagcacactgtcgcatagtagagtccttcactgctggcaacttatcaagctatcgtgtctcctgtcttggtgccgatgagcaggctcatggagcaatgcattctcctgatgctgtccgtttcaagcttgcagtgcagtggacgcctcctcgccctgatcgggtgtacactcgtagggtggtgactcgcaggagcgagagggcaagaatttgcagtgcgatggatttggagagcatcgacatttgcaatttcagtcgtcagagggatggtcgtggccatggacagctttggaaccatcttcggatgcatgcacatcttctgatggtggatgccgggtggaagattgaggccaaggaaagagacaacaggagtaaagttgatcatgtttatgtggcgccagacaatgtgacacgcctgtattctcttcccagagcatggaaatgctttggccagtggttgcttatgacaacaccctgcgtcaatggaaatgagtcaattgactacggaaaggagtggtcgaacatgcatgaatttctgtatgatctgaagaacacactgctatgcctacagtatgaggtccaacgtacgaagccagcactatctttcctctaccagtggcagctccttgatcctttcatggctgttgtttgcatcgataagaaggttgcagctcttaaagatggagtggcactgaaagctgttaacagcaccgtgacttgcctcaatcgcagtgagtgtaagatgttggatgccaagaattcaaataggtcacttggggtcaactccacaagtaaatatatgaatccatatctcagctcctgcaaaaaaagtcttctgccgcttctctctgaatctgattatcagcctgataaggaagggaatactatgcctaatgaagaagcttctctattttgtacaaacaagactagcgaagatgaagctgatcggcggtcattgtgtatgtcagaaatgaatgaaataggcataagaagcacagctcatcacatagttatgggtttacatgatgcaacagcttttcatggctcaagccaaacttgttcggggaggaaaagaaaatttccgtgcatcaagtctaaagaggataatcaaactgaagacaagtctgacccattattctttccacccagctattcatccacattaagtcatctggttgaaaatgttcaaataaatgatgttagccctcatggctatgaaaccacggagattccaaacatgggcaatcgtacagatattcttgataagatgtacctaggagagaatttattgtttgcccccgaaactggtaatatgctacttgaaactacagatgatatcaacaatgaacagcatgatgatgcagctgtctctgagccccaatcggcagataatgatggaagtggaccttctggtgcatcatcactaccaccagagaaagatgcatacatgggatctaaagaggattctattaacgactatcatgatccttcagttgtctctgagttccaaattgctaataatgatgcaaaatgtgaaccttctattgcattcttgccagaaaaggataaagatttggaagctaataaaacgagcttggaaggtccagcaaaaacaggccaattgtcatctgaagctagtggcagcactttgatgatctcagagccacaagtattgtttgtgtccccacaagatgggactctgtctttcatgaacaataatacgaacaaccaagagatgtggaggttcctgaatgtttcccctgataccatggataccgaaatgcagatggactctaattcattggtttacgaggcaagcttgattcagggtttcttgtaccttgacaatgagggttctccaatttgttggacagtgatgaacccggaacctcctaggcgcttgatatgtgctactgctctggaaccaaactcaaagctgtcgaaacagtatgttgaaatgaggttggagaatgatgcatcaacgtctgaacacaagaagggaggaaaattgtctgataaggctgcagatatccaagacaatgtcagtagaaaaaaacagaaagcaaacattgcttctttaaataattgcgtaagtatggacaatttaactgtcaatcctattgatcctgtagttctcaatgagggagagcagacaggtacagcaatcactgagcaggttcctgttcctttgaatctagtgcttgagaacaaaaatgacaaggaccaaggtgagcaaagcagtgaaacttcagaacaacttatgtccaaagaaccacaaaaaagggacatcaaaaggcaaaagagaacatggtctcatacatgcaagtttgatgatgatgaccttctgatgacagctgtaatatataagctgacagcacgttacaggaactcttttcatcggaagctcagaaataaattcggtttcaggcgtcttccaacataccactgggagaatgaagataaaggtgacaggaagaagtttcctggagaagcaaggacggtgttgaacaagttacttgaaatgggcattgttgctagagtggatattcttcaatgtcatggtccaggaggcaaaaatgtgttgaaggatgggaacataactgcgagtggcattcaatgccagtgctgtggtaccacattcacaatgtccaagtttaagtgtcatgcaggtctcaggcaagaagtcccatctctgaatcttttcttggatacaggcaaatcttacagtctttgtcagcttcaagcatggtctatagagcagaaggtgaggaaagagcatgcaaaggatacaatgtcccttcaagcagaccaaaacgatgatacctgtggatcatgtggcgatggtggtgaactgatatgctgtgacaattgtcctgctagttaccatcaagcctgcttgtcttgccagatggcaactggtactgctctagctgcctttgcgacatttgtggtgaagtaatcgattcaaaggagcttgtaacttcccttcctgctttagattgctcacagtgcgaacgccaataccatgtaaaatgtgtatctgccaaagttccgtgcaatgaggatggatctggtacctggttttgtggaagaaaatgtcacgagatctatatgaccttccgttctcgtgttggagtgcctgatcacatggacgatgatctgtgtttcaccgttcttcgtaacaacggtgataagaaggttcgcacggcagaggagattgctctcatggctgaatgcaacatgaaactcatgatcgccacgagtatcatggaagagtgtttcctgcctattctagatcccaggacagggatagacattattccctccatattgtataactggaggtctgatttacatttcaattacaaggggttctatacagtagtcttggaaagtgatgatagcatggtatctgttgcctccataaggttgcatggtgcaattttagcagagatgcctctggtagcaacttctaaagagaatcgtcagcaggggatgtgcaggcgcctcatggattacattgaggagatgctgaaatccctgaaggtggagatgctgctcctatcagcaatcccgcacctggcggagacatggacatcgacatttgggttcagagagatagatgagtcggacaagaagaggctgagtaaggtgaggctggccgcagttccggggaccgtcctactgaagaaggacctgctgtgtgaatgttcaggcgcggacgccggtgagccgccgagccctaagcccttccaagtttactcgcgcgtgccgagaggccgcaccggtttggatgcagtgtgccaataaagatgacgcagtggatcgaatgcgccgcggtcagtcgtcgtcgtcggtgacagggggcagctggtggtcgtcacggggcctcgtctccggttgctgaagccgaggccgagcacatcagcacgcgccggtttgtgtggtggaaatggaaagcctcgttgctctggtaggagctctgaagatcgctgtcgtctgcttgtagtctgtaaatagcttctccgtcggcgagaagcccagggtccacggccattgtagaaccgaacctgtatgataaaactagaccgtgttggcgccccaccagcgtttagtagtttccgttgccctttgaactcaaagtttcaggctagtccattgtgttcgtttcagaagcctgcggttttcagggggaggggaggtgccagaaagggaggacataacgcacgtgcagaccgagtattatgtggtggtgtcgtagacacgcacgagttgacgaagctataggagcagctcgtgatgagcaatggttggtgcagatgatgatgtcaatgagctcctcccgcagggaccggacctgtggacacggatggagctgaacttgtttgaaggatgcgtagtactaataatatatgcagtcaagccagcctgaacttatttgaatgaggtgtagtactaataatatatgcagccaagccagcctgacactttcata

SEQ ID NO: 38485 - DNA, 3186 bp, Zea Mays
tccttaagaccataacgagggcgtccaccgcatcaccgtgcccccgcccccgtctacgagcgaccctctgcgctcgcgcgaatcccgcccgagatcgccgccgatccgaagcaacggcaccgtgcccctccccctcgcgagatccgcgaccgccccatcccggcgccgcgggatccacgcctccgccctcgcccttccccacccccacccgctaatctcgcggtcgatccgcgcccggtcctgaccccgcctccgtcctcagcaccgccactccgtcccccatcttcggcgccgccgtctcccgctcccctggcacgcattcggggtccttgcgggcgacaagcacctccgtcccggaggcatctgccgctgcagcatagaccaccatgtcctcgctcggcagcaccgatgttgacgatggcaacgaggaggaggacggctccgcgagcacccccgagatctactgctgccactcccacgcagttcttgctcacgagatctgtgtgcaggttgatgtcctcgtggtgccacgccgacctcgccgccaccaagcgcgccacccatgtcctcaccgacctcgccaaaattggacggatcgaagcaccataataagtgtttagctttcctccgcgcctcgggcggccgcggcacaggcgccgccgcgcccgctcgccgcgaagcacaaggacgagccggaccccgacgacggcaggcagagggtcactgtcttcttcggcacgcaaaccggcaccgctgagggctttgccaagtgcatgactcgtgcccgcgccaggactcgttgccaatattgcactcttagtgcaaagaatagctgagcttgttacagataatatgggtggacctgtcaaagatgctaacgacatgctcacaaggtggctggagaagagtactgagctgagaacatcgctacaaacaagtttgttgcctattggttgcatcaagatagggttatcacatcaccgtgccctacttttcaagatccttgcctatagtgttgggattccatgcaaacttgtcaaagggagcaattatactggtggtgatgacgacgatgctataaacataattaagatggacaatgaaagggagtttttggttgatctgatggctgctcctggtgctcttattccagcagatatcttaagttggaaaggcaattcgttaaattctaatcgaaaactcggcctgaatcgaacagctggatcatcaagtactgttgatgctaatgtggatcctactgtattgccacttgaacctaaaggtggccaactgcctttgttcagcagtggtgattggatgtcagacattgattctggatatgaggcagcagaaattgcagcttctactcaaacctcttcgggtgtcacaccatatctgtgttctgctggaagtgtttttggcagttcatggatgctggttaatcatgaccaatcagatggaccatcaacttctgctggtacatcatcgcagcagaaagttgtacctcaaagcgagcatcagcggaatttaaaccgccttccagatctgcaggaaattccagagtcaaaaaacctttttgctgaccttgttccttctggggataataagtccaagaaaacttcagtaccattcaaaggaccagatcataggaacaatgagttgcaaaagcgcagagagaacattgtccctaatgctggaagaccacatcagcggttagttatgaagaattggtctccttacaatgatgtttccaacaacaaacagtacaattatgtcgaggattcgtttgctcgtagaaatgttggtaataatgctgcaccatcatcatcccagatgccacgaccagccgcaagatctaaccttaattctagattgcataatgatgcatcatatcataattatgatagcattatggctggtacctctgccatgaacattacatctacagctgagaccgggaaggttcctgaaagggttatgcgtggtgatttggacaaaggccaaacaaattatagattggaggatcaacatgtcatagttcaaccaccacagggaagacttccatggggtattcctgcagaaggaagcgttccaatgaatagagttcagagtcaagcaaaacaacacttggaaaacatggatgcaaagcaagaccataagaaattgctccctgatccaaaaaaatctccccttgacaaattcatggacacatcattgccttcaagaaacatggacatgaggtcacagaggcttgacttcgatgatgtctctgagtgcgaaattccttgggaagatcttgtgattggtgaaaggattggcttaggttcatatggagagatttactgtgctgactggaatggaaccgaagtagctgtaaaaaaattcttggatcaagatttttatggcgatgctctggatgagtttaggagtgaagtaggtgaacttttatctgtttctatcttggagttttcctaaataaactattcaattttcatatttactcagttcaattgttgatttattgtttgatatacggatatactttttgacaagattcgaattatgcgtcggctgcgccatccaaatattgttctctttatgggtgctgttacacgccctccgaacttatctattgtatctgaatatattccaaggcggcgaccagaatatgcatcaggcgggaggaatggggcggtcgctggagctgctgctgatccagtttttgatgccggataacgacacacgtcggcaggcggaggagcagatccgacggctggcccgtgacccgcaggtggtccctgcgctcgtccaccatctccgtacggccaagacccccaacgtccgccagctcgccgcggtgctactccgcaagaagatcacctcccactggcccaagcttccccctgactccaaggcatcacttaaacaagcccttatcgattcaatcacactcgaccacaggatgcaaagatttttcaaaggaactttgtgattgatctattaagttacgaggacaattcataccgctatgccatccctgcaaacatacaacagggacttatataggtctacatgatattgatggttgcaatgtagtggtgaaagggatagattaaaataacaaaatttatatgtatagccaggatcatcaatggattacaaaatcttttctcataacaatataac

SEQ ID NO: 38486 - DNA, 2592 bp, Zea Mays
gcacccgctctcgtactcgtaggcaaggcaacttcgcaaaacggcaaaaaggcagccacgccttgttcatttttatttttttaatctcctcccgtcggcgaaattttacacgccagcaaaaccgccctgaggatgaaatagaaaaaaccccaaacaagccctaacgcgtcccccggaaccagaacaagtccagtctgtccagaaatacattagaaaaaagagccaaagaggagaacaccggccggcgaggtggacgaagcggcccgccgaggaaatggcgtcgatgcagagctggcgcaaggcctacggcgccatcaaggacaccaccaccgttagcatcgccaatctcaactccgacttcaaggatctggatgtggcgatcgtgaaggcgactaaccacgtggagtgcccgcctaaggagcgacacctgcgcagtgcgttgatttgttcttataccccgtgtttccgcgtatctaggcttcggcctaatttagtgtttttctattgggggcgggcggaattagatcgtgcctataagtggcgaggggaggctctgaaggggggagggaagggcgtgcgtgcttttgggttcgtgcagtgtttaatgatggttgattgttgcgtggtggtatcacaggggttgttgcagcgacgtccatcaccaggcctcgggcagatgtcgcctactgcatccacgcgcttgcccgccgtcttgccaagacccgcaactggatcgttgctctaaaagcacttgtagtgatccatagacttcttcgcgagggtgatcctacatttcgagaagagcttctcaactttacacagaggggacggatcctgcaactttcaaactttaaggatgactccagtccaattgcttgggattgttctgcctgggtgcgcacatatggtttgtatttggaggaaaggttggaatgcttcagagttctgaaatatgatgtcgaagctgagcgcttgtccaaacaaggtcaaggtcctgaaaagggtcacagtagaacgagagagttggattcacaggatctgttagagcagctgccagcattgcagcagttactgtaccgacttgttggatgtcggcctgaaggagctgcaaataataactacttggtgcaatatgctcttgctttggtgctaaaagaaagctttaaaatttattgtgcaataaatgatggaatcataaacctcgttgataagttttttgagatgccaagacatgatgcacttaaagctcttgaaatctacagaagggctggccaacaggctgggaatctatctgatttctacgagaattgccggggattagaacttgctaggaattttcagtttcccactctgagggagccaccacaaacatttcttgctactatggaggactatgtgaaggaggctccacgcatggtcccagttcgagaacccctggaacttcctgagaggctgcttcttacatacaaacctgaagaatcagaggaaattcttgagcctgctcctgttgaagaggaaaaagtaccagttgaagaacctgttcttgtaccacctgttactgaagttgtttcacctcctcccaaggctgaggtgcccgatactggtgacttactgggcttagatgatacaaatcctgctgtatcagctatagaggaaagcaatgctcttgccttggctattgttccaacagatggcgcttcaacaactggtaacactgcatttcaagataaggggtttgatcctacaggatgggaacttgcccttgttactgcaccaagcaatacaacttcatctacttctgttggtcaattgggtggtggactcgacaagctcattttggagagcctttatgatgatggggcctacaggcagaggcaacaacaacagctgtatggttcagcagctcctaatccattcatggcaaatgatcctttcgcgatgtcgaaccaagttgctcctccaccatcagttcaaatggctgccatgtctcagcagcatcagcaaatcccaacgatgatgcaaccaaatccctttggaccacctatgcatccacaggtgagcatggcccctgcaacaaacaatccctttctggatgctggcttcggggcattcccagcggcgaacaacggccatcagcaacacaacccatttggcagtgcccaacttctgtaggtcacttagtcacaagagcaaatttgtgccccagcagatgcgatttttgtgtgattatatcatgcattgtgctggacctttcttgcatgtgacgcgtgtattatgttatggcttcaccacacggagagctgtgcctatgtcgtgacccaactcttgttgtaaagaaattagtcacctgtgtaacatccaatatatgtcaataaacagtaggcagtgttattacatctataaacaaaagaacagtggtatgtaggaaattcttaatattgtttattccattgctttttatcttcttggaaagctgttccgttgttgtttgattgccactcttttgcatgcattgtgattgatcatcatgtgctcattcgaatattctaagccaataatggagcgttgctgtagctactacctttatatttt

SEQ ID NO: 38487 - DNA, 2699 bp, Zea Mays
ataggtgttggcccgttgttacgagaagctatagaagagaagaagaaaaaaaaatggtaccatgtcacgtggtgatgggctgacagtctgtctgcatatgattcgtgggccgttctgggcatatatgctggatgaatactttccacaagatagataagcgaggcctcttcgttcacctctgtctcgctttcctttcccgttcaccccaagcccccaacctgcgagctgcgacaagttcgtctctctcgtggccacgactggccgccgcccccgcctccgtcccctcgcagattcccaggtcttcgccgctcccttcgccgccaaagagcacccactaggttaaatccgccagggggaaatctccatcaagtggctcgtgctaattatgcgatcttcatgggctgactcagttgcgaacgccgaggaatcggcgcccgcgactgctgctgctaatggctctgttgcaactcatagcacctcgcgccctacgcgcagctcctacgtgcctccacatcttcgtggccgctcagctggtgctgctgttgaagctcaagcaggcttagtagcaccagcacaaggtggaccactgccattggctgctgcacaaccttctggtcagggtgctgctgttggtggccctcgctgggctggcattgtgaatggtggtggtggtggtggcagcattggtgctcctcgccagggccatggtggcggaggcgggggccgtggtgcttggaactcccgtcctggtggttgggaccgcagagaccgggagccagatccgtttgcgaaagccgaggctgaagaaattgatttcgacggccaggagaatactggcatcaattttgatgcctatgaagacatccctgttgagaccagtggccatgatgtgcctgcaccagtcaacacatttgcagagattgatttgggtgatgcattgaatgacaatatccggaggtgcaagtatgtgaaaccaacaccagtgcagcgttacgccatcccaatctccattgctgggcgggatctcatggcctgcgcacagactggatccggaaaaaccgccgcattctgttttccaatcatcagtgggatcttgaagtcaccaaagccacaccagaggtcacggagtacaaggaccgcttgccctctagctctgatcttatcacccactcgtgagctttcagtccaaatccatgaagaagcaaggaagtttgcataccagactggtgtcagagttgtggttgcatatggtggcgcaccaataactaaccagctgagggagttagagagaggtgtggaaatcctggtggcaactcctggtcgcttgatggatctgttggagagggctagagtctcacttcaaatgataaagtatttagctcttgatgaagctgatcggatgcttgatatgggttttgagccacagatacgtaaaattgttgagggcatggacatgcctcaacgtggtgagaggcagacaatgttgttcagtgcaacattcccaaaagagatacagaggatggccgcagatttccttgctgattacatctttcttgctgttgggagagttggttcaagcaccgatttgattgttcagagggtggagtttgtcctcgattcagacaaacgaagctacctcatggatcttctgcatgcacaaaaggctaatggcacacatggaaagcacgctcttacattggtctttgtggagacaaagaggggggctgatgccctggaggactggctttttagaaatggatttcctgcaactagcattcatggagacaggacacaacaggaaagggagcatgcccttaggtccttcaagagcggagcaactcccatccttgtggcgactgatgttgctgctcgtggtcttgacataccacatgttgcccatgtgattaattttgacctccctaatgatatagatgactatgttcatcggattggaaggactggacgtgctgggaaatctggtcttgcgactgcattcttcaacgagagcaacactacgcttgcaaggccgttgagtgatctcatgaaagaggccaaccaggaggttcctaagtggcttgagggatacgctgcccgatcagcctacggaggtggaggtggtagaaaccgcagacaaggtagcagtgccagatttggtggccgtgatttccggcgagataggggcagtggtggaggtggtagaaaccgcagacaaggtagtggtgccagatttggtggccgtgatttccggcgagataggggcagtggtggttcctacggaggaggtggtggtggtggtggaggatatggcggatcatcaggatacggtggtgcttatggcggcggcggcagcagtggctatggtggtggtcagagtacgagttcttgggactgaactgaattctggttagaagtgaaaaatgggtcaacctgttgggtgtgaaaaatgggtcaaccgttatcgattagtccctgttggatggagcgaatgcctgaaatttgttgcttgacttgcgagtacggtgtcaggaggtttcccagtgccttaatcttgcattttgtgttgtactagggattgcttatgttattatctgaattggtggtttcttttctacgcctcatgcttgtgctgtcttcttcacaaagtatcttgtgctaacttctgatcatagatataatttcatctaggtctcatttatatc

SEQ ID NO: 38488 - DNA, 4004 bp, Zea Mays
gctcctggtggttcctgggattgattcttgcatggttagcggctgcactgcgttcgtcggccatttctcaaaaaacaagtcagtgtctttccagactggagatggggactatgtttggagcgtgtgttggcccaagtgagcttcacttgaggaaggaacttactgctttgcaaaaggcgcgctgcttgcaggaccctgacacttgctcaacatggagatcacctttgagttctaggtcactggtggcaacttcaaggattacatacaacggtggtatttctagtaatttagcaccaaagcacaatgagtcaccttgtgcacctccaaacactgataagaaaagaagaaaggtttatctctacaattggaggcagaattcttataaatctagtgaaagcggaatgaagatagatgaggatgtcaagcaaccatctggtgatctaagcctggacagtccatgcaagtctaatggggtaaagtccaaaggtgatgcatatctggatcctccagccagcatctacaatgttcagagttcaacatcatgtactcctgtcaaaagaatagctagaaggagaaatggtgttttgtccaagaaaggagcagtcagaaaccaagctataccgaagttgtcagatcttcaggttaactctggtgagccatctgaggatactgagaactgcaactcagaggctctggagatacttcgaagaggctacttatctcatcctgcatctccgctatttgctgcatgtggttgtgtcagctcttcaaatccttcaaaactactgaaaataggtagaagagagggatcttccttttcttgcacaccggtttctactagctcctattacaggcatgtaagaaggaacaccagcactgttggttcttgggatgctaggactgctacttctcttgatggtgatgagtctaaccaatcagcagttctgagaagtcagaggtcgcatgtcccttgctatgtatcaaagaggagaaaacatcaaggatctgaaggaagtaattattctccttcactatccgctatacttcgaagaaaaggtagcagcctaatatgtgggagccagacaatgcacaagaagaagaaatcatttggttcaatgaaatgggcacattcgaagaagtctgctcagggaatgccacttttgggtaatagctgtgattttggttcgtcgtcatttgattcatcaagtgatgatctctcaaccaatataggggagcttgatatggaggcttcaagccggttggatgggaaaagatggtcaagctgcagaagccaggatgggatggatctatctgttcattgtgctgatctgcacgagtcagacccgagaagcttgagccaaaaatatagaccaagagcattcccagaaattgttagtcaaaatattgcagtccaatcacttagtaatgctataacaagggaaaggatagctcctgcctatctttttcaaggtcctcgtggaacaggaaaaacatcgactgcaaggatattttcagcagctttaaattgccttactactggagataataaaccctgtggggtatgtaaccactgcactgacttcttcagtggaaaagctagcaatataaaagaagttgatgcaagtaacagaaagagtataggcataattaagcacttgctggaaaatttgccgccatctgcgcctttgtcccggtacaaggtgtttgttgtcgatgaatgccacatgataccttccaaattatggtcagcatttatgaagtttcttgatgaaccatttccttatgttgtgttcatatttattacaatcgacccgaacaacgtacctcgagcagttgtatcacgttgccagaaatatgtgttctctaagatcaaagatattgacactgtgtgccggctgaggaaaatctgtgtaaaggaaaatcttgatgttgagctagcagctttggatttgatagctctgaattcagatggctcgctacgagatgcagaaacaatgttagatcaattgagcttgttagggaaaaagataactccttcacttgtcaatgatttggttggtgttgtctcggaagagaaattgcttgatcttctggagatagctatgtcaggagacacggctgagacagtgaaaagatccagagagctgatggattctggcactgatccaatggcattaatgtctcagttagctgggctcatcatggacatcattgctggcacctacaaattggctgatgttgcttgttgtaatggctcagcagttggtggtcgaagtttaacggaagcagagttagaaagattacaacaagcattgaagattctttctgatgctgaaaagcagataagcctttcaagtgagcgtcccacgtggtttactgctgccttactacaacttgggtgtggtcatagttcagatgtgaaccaacaaaaaggcagtactcaagaacaccataaagtagccaatgatgctatgtctgagatagcaagggaatcatccagcagaactttttctcattcattatctgcctttggcatttctaagagaacgcttgactccaaaacaattagtgtgcactcgagtcctcaggtccttgcctcacattcatctcggttgagactgaatgacaacttggtttatggagagtgtaggtctgttgatagagttccactcaattctaatcaactgaatggcaactgttcccagcaaagggccctggtaaatggaatctcagatagccttgctcaggtttggataagatgcattgagaactgccactcgaagacattacagcacctacttcttgaccatgggaaactagtatcaatcaggcaatttgagggccacgcgactgcttttattgcaattgaggactgtggcataaaatctagagctcaaagatttttgagtagcattaccaattcacttgagacggtactgaaatgcaacgtggaagtcaagattggtccactagcagaattgatggacggagaagtaacattagaggctggtcctaatgtaagaagatacgagtctgacgtcttgagttgctcatcaaacagtgaccgactaaagggagctttagattcaaggagaagctctggtcatcctgatgaagtaaagaaagaactggaaacgtacaaagaagttcccatccagactacaaaagaaccaacaattgacgaccagcgactggaaagtgcatggctccaggttactgagaagcacacacctggtctggtggatcaggcactacacgatcaacatcaggttctgtctcaattttctggcaaccaacaccaaaggaagtcctcgatgtccctagttgtgccctcaagccatgtagatgaggatcttgctcatcagatagaagcgctgaagattgttgacagttatggttctcagaagcaccagagtggaagaagtgaaagcggcttttccgtttcaccaagcagaatgcacaggaaggatgacatggttgattgcgacaaagagagcgtatgctctgagcttggaaaatcgagatgccatggccttttcccttgttggaaatctcaaaaaccaaggggagtaaagacgaagaggcatatgcgggtgaaatcttcttcgtctggcagacttgtttaacatgccgatgatgatgtagcgagcctgggagtagaatacgtgttggaacggaattcgtgtttgaaatggttcttgtttttgcaaaatgacacattgttgtttcagaagaaaaggaaatttgaattgctagaacattaaattcagcatccttctctcgtggccgcatatttttggccttcatggggtagggcaggattcagggacggaggtcaatttctccagcaatcagctgcacgtgtaatcttgattttgtatttatatgtgtcctagtaaagttattatgtgctccttgttatcttggggaaaaagaaagagactatatcttcaggaacctcacatgaatgaaactgatgaatatagatttaagttaccaaatct

SEQ ID NO: 38489 - DNA, 368 bp, Zea Mays
ggatcccgaggaggcttgttctcgccgcgcggcggcttgtccgcaagggttggagtccggtgatgaattaccagtcgcccacatgatttctcacttggccgagcccccgaagacgtcctacgctcgatgccgatcctcccagaccaattgtcccggaccaatggcgacgaggaccaaccctcaacaatggcggctctctgatctcacactcttgcagtcaatggcagaccctggcgcggcgtggagaagctgggagcggtttgcagacatttgatgaccgagacgggggtcgcagccgccatataggccgcagggtccgggcgactacaacggcccggagatcccggctaagctgtttgagccgcgct

SEQ ID NO: 38490 - DNA, 1105 bp, Zea Mays
ccgctgttgctttccgctggtcatccatcccaccaaacgcccagcatttttcttttcttcatccaaaaaaaaccccaacccgagactcgggcagattcacgggggacgaccacgaaggggcgcgcgcacggcagcctggctataaaaggcgctccgccccccgctagctcaccagctctccaccaagagctgtaccccacaccactaggcactagtccactacctaacgctacctgccttttcaccgcgtcgtgcgccaccgccacgttgagctcgcgtccgtcccagatccgccgtgctcctccatcgctcgcgcaagatgaagatcacggtgcgggggtcggagatggtgtacccggcggcggagacgccgcgccgccggctctggaactcggggcccgacctggtggtgccgcggttccacacgcccagcgtctacttcttccgccgcgaggacgcggacgggaacgacctggcgggcgcggacgggagcttcttcgacggggcgcggatgcggcgcgcgctggccgaggcgctcgtgcccttctacccgatggccggccggctggcgcgcgacgaggacggccgcgtcgagatcgactgcaacgcgggcggggtgctgttccaggaggcggacgcgcccgacgccaccatcgactacttcggcgacttcgcgcccaccatggagctcaagcgcctcatccccaccgtcgacttcacggacgacatctcctccttcccgctgctcgtgctccaggtgaggaaaatcgatccatccccacctaacatcttcgggcttcagttctctgcatttcactagagttttgacgatttgatcggggtcggggaagggttgaaacaaagtggtgggcttcggttatctgagtcgccgccagcgcacaacgtctgggtcaacgtaggtagactcgtcacaattgttgggtgcatgtgcggcgtgtgtatagtatacatgggctggcgccgacgcggatcgatgcgcgtggagacaacctgtcaggcctgcatccgttgttcagctgactagccgaggtgtggaggacgatctccagatcttcttacatttatgaatgaaagatgtggccaa

SEQ ID NO: 38491 - DNA, 2912 bp, Zea Mays
ctccttccgacctcgccgcctccctccctaaactctaaaccctccaccagccgaagctactgccgcggccgcagcagaggtcgcgacgacgaacgctgaagaagcgccggcgagggagagtcctttactttttcctatgctgtagcaaaacaagcctataccatcttccaaatatactcgttccgtgccggcggcctcccctcctacgcccctgtcgattcttcaatcttcaccaacgtctgcgcgtagcaggctagcagtcggcacggcttcctcagatctgccggacgacttgttgttcgtcaccgactcaccagcaaccaatgtcggccatcagccggcagcaggggaagctgggcggagggtcattgcggcacggcgtccaggcgtacagcaggcaccagcaacagcccatggcaaacgccgcagatgaccctatggtagatgaagccggagtagaagatgccttcacacatgagatcaccgattatttgtacgtccctagataccatgtgttgagttggatggaaactgtggaggggatggtggccggtgtggcggcgcttccgccggtgtatttgatactgaacagagatcttcttgagacgggatggggatggaagaggctggtgccctacagacctggttatgttgagtggcatgtgttcaagaaataccttggggactatttcgaccataatcgtgaagcttttctttgtgccgagcagaagcctgatccatttggatggattattgctgaaaagagtgccctgattgctgcagccaaattgtgcctcaagatggagaaggcacttctcaggtactgtgctagctttctcactcctgacgacaaaaggctgatcctcgggatcaaggaccaggcaaagcaaatgatccaatcagaggtagtgcagagaaacctgtgaagcagcgtacgtgatgagtaggagatatgttttcataagctaagctgccatctcctttcactagacttattaattggtctgtcgtctatacacgtaaggaccatatatttaccggccggagaaactcccgctggtttttggaggcagctgcacacgggcacaaaggggtcgttgtattcaattagggttctctcacagtagctgagacgtgcttcaagcaatggttcaaatgggtgtccttgttcctactggagatatgactgttgtcagaagaaccgctcaatttttccttaatagctttcaagagtgcctaacagcacaaaggaaggagagagaaatggcaaccgcagaactgggtttcaaaaagcaattaactaaggaggagaagtttgaaaagaggaagcagagacttgctacaatcggagaggatcttttggcgattgctgctgatcaaccatttcgcttccctgccacatttacatttgtggtcagagcattctcaggtgtgtggagagacatgtgtattcctcctatgacgaattcctcaggctccatgaaggtaagcctgtcttaatgggcttgattgttgaacctgacttagtacttttatccatgtcacgacattgaaccagacagtcactcatgtccttaggatattaacggtatacatcaacaattcattctattttaattgcttgcaaaacttttttggcccttcaaatgagttccacgcatcaagaagtcaagattccaggaggcctaaaataggagaggagggcgcagcttgattcaatccatgtcaagtcaaaggctgctgcgaagtttgcacatgcaagtagaatttagatggtgaggttttgtctctgttcccatttttataacgactaggtgtttgaattcctaagattaaagtttatgtagattcttatttgtaattagatctctgttaggcatctaactgaataaatgatctcctaaagaattgacagattccatcactgagcagcccttcgccccggtggctgcggtgtcgcactggctgacacctgctcgcagttgcattacaagttttactgactatgtattttcaggtttattcaatttcggttctaatgcttctgacagcagttgtatcagtcctcttgttcagcttacatgtatccctcgcatccttccttggatccacataagtgttaataataattttgttgcatctcctctgctgatcagagctttcaaactcatgacagaataatgtactaaacttcagtttggtgtctatctcagtgtacctacactcagttggaaaacttcaaccacactgcaacaaggtttataaaaggtttgctatcaggaaaaacaaatttatgggctcaaacaaagtgtgatagtgaaagtcattttgcttccagcttaagaaccaagccaagaaaacagatatcaactgtgacgccacactcaaaagcttgtttggtgggagggacaaggttgggatgctggagatctccaagcttttgagtcgtggcttcccgaaaatctccaagcttttgtggtccatggagccagggatggctctttggtaaaagacttcgttgtggatggcctcttttatggtccatgttaagtcccaagtcccactaggtggttaagcagaaaaatcttgtgatggcattaagactttcagactttgtttttgggtctgatgcatgtaaaaaggattcccagtgtttctgttgctcttgcgatcctgtgaggacacatatgagagaaatatttagtttgttgatggcaaatcttgtcttatgttcatgtctgtgcctatctgatcaagcgttatgatatgatcccatgcgtggtactgtgttctttagagatgtacttaattatgtttctcttgcatttcatattgctttgtctaattgttaccgcaaattaagattttattataattccaatttgatatgcctcatcataaccatggttact

SEQ ID NO: 38492 - DNA, 4182 bp, Zea Mays
gtcatgtcaatatctaattttctccagtatatacttgttctatctgtcgatgtggtcatattcttctgtgatggcccatgtatgcgctctttccatgcaaaagaaggaagtggtgaagactcctgttgtgttacccttggatacactgaggcagaagttgaggcaatgaaattatttctttgcaagaattgtgagtataagcaacaccagtgtttcatctgcggagtgttggaaccttcagatggagaagcagccaaggtgtttttatgtaacaatgctacatgtgggcacttttaccacccgaaatgtgttgcccaacaacttcaccccatcaacattgatgaagcctcagaattggagaagaagataacagaagggttttcatttacatgcccaattcactggtgctttcattgcaaaggtttggaggatagaacacaagaacctttgcaatttgctgtttgcagacgctgtccaaagtcatatcacagaaagtgtttaccaaggttctgttttagaacaagctatttttcttgtttttttaaatactttaagtgtataatctcttattcttcaaatatttggaattatttcacagcgaaatttcctttgacgaaaatgaagaggacgatatcatcatacgggcttgggaattatcaaaaagaattttgatatactgcctggaccatgagattgatagtgaacttgagacacctgtcagagatcatatcaagtttccaaagattgaaaaaccacttcaatttgtaaagaagggatctagcttgttgcctaagaagaaaaagaggacttacagtgagacagttcttgagcaatctcccaaagatactgtgaaaaggaaaagcaaggttcacatgctagaaagggaacaaaacaaacaagacaccagagaagtttctgcaaagagtttcactcaaaaccttgttgacacacctgtaaagaaaaaagccaagttgaaagagaaaatacagttgccgtatgtggccaaggatcattttataagcagtccaaaatctgtgaaagagcaagaacaagagttggtacctttgcccttatctgccatcaggaagagttcatttcctaaagtggacagtgaaactgaaaagaggtgagtcacttgtgtataaagtacttggggaatgaaatctccagatcatatggtatgtaactttatgtgcaaaaattgctagcattcatgaatttcctacaaccagacctgatgaggcattgaaattttgtttgtttgtcaggtctgatgaggcattggattttttttgtttatcatgttgcagaatcctctcctatactcatgttttaatcttaatgccatgtatccacattctgtatgataatgtaaacgatgtttgaagtccgcatactgttatatgactatatgagatcttctatttgcagggtgattaccatattgggaaataaagtgtcttcattgacaataaaagatgtaacgaggaattgcagtttgccatcaactcatgtatactctggcagattgactgacaagataccactgggaaagattgaacgttctgttcaggctgtagaagcagctttaaaaaagctggaaaatggaggtagtgtcaatgatgctaaagcagtatgtgaacctgaagttttaaggcagcttgcaaggtggcatagtaaactcagagtgtatatatcaccttttattcatggcacaaggtacagttcctttggtagacattttacaaaggtggagaaacttgttgagatagtagatttctgctgtggggcaaatgattttagccgtcttatgaaagaaaaactcgacaaagttcagaagaagtgccatttcaagaattatgatcttatccaaccacagaatcgcttctgctttgaaaagagggattggatgactgtgcagccaaacgagctgcctcatggatcccaactaattatgggtcttaatcctccttttggagtcaaagcaagtcttgcgaacaaatttattgacaaagcattgacattcaagcctaagctcattgtactaattgtccctaaagaaactaaaaggttagatcagaggagaacaccttatgatttgatttgggaggacagtgagtgtctttctggcaagtccttctatttgcctggttctgtggatcttaatgataaaatagttgaagggtggaatgcatctgcgccacccctctatttgtggagtcatcctggttggacaaagaagcacatgcaagtggctgaagagcatggtcatacttgtatggggaagatagcttgccatgttgaagagagtaatctatcagatgacctgtccgtgaggaaacaatctgatgctacaaacaaactgaactcgagatcagggaaagagactccattcaatgacagaatgtccaatctacttgatgatggttctgctaggaagcaagcaagatctgaagaagagaagagaactctagggaagatagaacaccatgtgaaaaaggctaatataccagataacctcccagtgaagaaagaacctgaagcttccagcaaagtcatgtcgcattctggaaaagatagaaagattggcagatacaacaggaggagacatgacaacaggagcagcaaggggacacctgatcacacagagagcctcccccctgaaaagcaagtggaagttgcatatgaggaaacaagagttattcctagcaaaaagattgctcataatgaaaaaaagagcgcgcagtacaactacgagcaaactgcagcagggatgccaaacatgaggtctagaggaggggattctgacatgagtatctcacccccagtcagttgcaatgctcgaagcaaacccatgagctattccctgacgagaccaattgaacacttggatacgaatgctcaccttttggcagaagaacctagtgactctgtgctcaatagggttccaaatcatgacagttatttggcaatcaaagaggaatactgtgatggatttaagaggaaaaatgatcctatcttcagtcacattgatgatagctcaaggatgaggggctccagcatcgaagaagtgaccaagccgtatattactgctccaaacagtgatccgtggtctaaaggagatggcagcttttacaggcatccgagctcagaagatttaaacgctaatgctgatgtgcttatgccaggatacagtgcaagatatggacaaattggtggtgacagtaacccacaagctagtatggtcccactagcaacagattcaagactgcatggtggaacggttgctgataattacctctcggcaagatactcccttggatcttcaggtgctcgcgttagccaaccagctccaactgttcccccttttgggctctcaggtgcaagttcacaacgaggctcagtaatggacaggtattcgtatgggctttcgggtccgactggaacacagcgctcagttattgacaggtatgcgccgtccctcgatggaacgaacacaacaagatcgaggagctccttgcctgagcagtacccgttcggacaacctggctcttccggtggcgggtggcctcatcactgatcgctggaacttggtcctcagatttgaccagcaaaagtgcaaccgatttcttgagtccggtggagcctacaacctatctacggcctaactttttggatcctactagtcgtttcttcctggcgccttcgacgaagacatcacctgtgtctaccaatacagaagtgtagacttcaattcctacaaatacagaagtgtaggcttcaatcctattgtttgctctggatttctgtttatgagcgtatttacaagagtatgtttggtctatgttagtatattaggaatacaattccaaaaccgttgtaccgtgccaaagtttaatactatacgtttgggtctgtcgatgagaaaaaaggacgagtgggtgagaagatgctgccctccgcagaactcgatcaggccggttcctctgcgcgtcctgctatgagaggctaacctgagcccgacagaaccggcttggtcgatttgggacctggtaggccggtatttttttattgaagtgtaactttctaaattaggtcttgttggtttgcgttggattgcgtccggaatcgtttcaagtttatataaattagagaagcaatccggttagaaatcgtttcgat

SEQ ID NO: 38493 - DNA, 3644 bp, Zea Mays
ctggaacgaccggcgtgccgcctgccgcgcctggtgggggagtgcgtgagccctgaggcacttgttgctctaaagaaaggcactcaactccttaaatatggtcgcaaaggaaagcctaaattcattcccttcagactatcgaatgatgaatcgactcttgtttgggtttcaaataacaaagataaaagtttgaaactagcttctgtgtctaggattctctcaggccaaagaacgctggtttttcaacgttttctgctccccgagaaggaccatttatccttctccctcatatataatgatggcaagcggtctctcgatctgatctgcaagaataaagtcgaggcggaggcttggtttactggtcttagtgccttgatatgtcgaggacagcatggatcccaggtccaacatatagatggaatccggatcgctggacttccttttgatggtgcaagagaaagtagcctaagtggtagctctactttcacttcggattcctttgagaataagctgagctcggtaaactcttccaaggatcgttcttcgggagaatatacatattcagaaaggactgatgtgtcggatatgcaagtgaaaagtgtttcttcttcagacattcgaatcagtgtttccagtgcccttagcacatccagccatggctctggaggtgaagattccgaatcgtttggagatatttatgtatggggggaagtcatctgtgataccatctcaagatcagggtctgatagaagtgcttactctcctggcacaactacagatgttcttgtaccaaagcccctagagtcaaatgtaatgctcgatgtgagttatgtggcttgtggcgtgaaacacgctgcccttgttacaagacaggcagaggtatttacgtggggagaagaatgcagcggtcgtctcggtcatggcattggaacaaatgttttccagccacgtcttgttgagtcactatcgacctgcaatgtcgaactaattgcctgtggtgaattccacacttgcgctgtcactgcaactggtgatctctacacctggggagatggcacacataatgctggattgcttggtcatggtagtaacgtgagccactggatcccaaaaagagtgtcaggtccactggatggtcttccggtatcagctgtatcttgcggcacatggcatacagccttgataactagctctgggcagttatacacatttggtgatggcacatttggagtcttaggtcatggaaacagagcatcatgctcatatccaaaggaagtggagtctttgaagggtctgaggacaatttctgtttcgtgtggtgtgtggcatactgctgctgttgttgaggttatcatttcacagtcaaatgcttcatctggaaagttgttcacttggggtgatggagacaaatatcgcctgggtcatggtgataggtcttcaaaactgaaaccaacatgcgtcccctcgttgatagattacaacttccataaggctgcatgtggccatactcttacgattgggttgactacctcagggcacatttttactgttggaagccctgtgtatggacagcttggcaatccaaataatgatggaaggtatcctcgcctggtcgaagagcagcttgggggtggcggtgttgtggaggttgcttgtgggtcttatcatgtcgcggttttgacaaatgctggtgaagtttacacatggggtaagggtacaaatggaagattaggccatggtgatattgcggatcgtaaagtgcctacactcgttgaggcattgaaggataggtctgtaaaacgtgttgcttgtggatcaagctttacagcagccatctgtcagcacaaatgggtgtctgggatggagcagtctcagtgctcggcatgcaggcagccatttggtttcactcgaaaaaggcacaactgttacaattgtggtttagtacactgccattcgtgcagttcaaagaaggctctgagagcagcattgtctccaaacccgggtaagccataccgtgtctgtgattcatgttacgtgaagctaagtaaagttttggattctggtgttagttatagcagaaatactatcccccgcttacctggtgatacaaaggccgagagaatagacacaaaggcaaccagagttgcacagtctaatagttcagatatgattaggaatttggatgtgaaggcagccaagcagacgaagaagtctgagtattcgtcgcaagttccagcgacgttgcagctgaaagacatccctttcatcagcgcacctgacctgcagaacctgtctacagtggctaatcagtacccttatgaccccagatctactttaccatccttgagaatgccatatctgaactactccagctccatgtcctcggaaagctccgagagtcttaaggatgcaaatgaactcctgaagcaagaggttcaaaaactacaagcggaggttaatagtttgagacaggaacgtgaacagcaagatgctgagctgcagaaagcagatgctaaagcccgtgaagcgatgaaccttgccaccgaggaagcatccaaactgaagacagcgaaggatgtcataaattcactaacagcccagctaaaagaaatgtctgaaaggcttcctcctggagcatgtgacgtgaagaacaatggacgcgttatgggcgatttagcgcccgaaatggggagagagaagcagatgcgatatggtgatcggttcagtggattgcctgctcaagtttaccaaacaagcaactacagtgaaacagccatggttcctccacaagggagcagcaggagcgagcacgtcgacggtgtccgagagttcttctcccctgtgcagcagatggccaatggaggagggtctacgactattgggtatcgttacaggtcagatgaccacgaccgaagggagacagacaggttccagataaatctgcagagcttgaatacgagaagctctaattctcccagtaaccaagtcgacgcggagtggatagaacagtatgagccaggagtgtacctgactctagtttctcttcgtgatggaaccaaagagctgaaacgcgtacggttcagccgaaggagatttggtgaacaccaagcagaatcatggtggaaagacaactgtgagaaagtgtacgacaagtacaatgtctgcggaacagatcgtctctcttcggtaacgacagcctagcgtaggccctgcatgcatgacatccaaaaaggagggcaaagccagtgcgcctgtagcatcgttgtgccctctttctttctctccatcatttgaagagcgggaggcatccagcttggttttggaacgtgcgctgcttaatcgacttgtttatctttttctgtcacctgcttggattcccctctctctcgttgtcgttgtatagaggagatgatggaaccaaagcagttgttgctcctttgactgagatatactatatacacgtagctgggcgtaaatcgtaatgcaagccccgttatcgtcgccttgtgatgtatctcttctgtcagtcgtcatgcatactctgtctgtaacacctggtacactctcgtattgatggtacatatttctgacagtcctttttaaaaccatagctcatccttagatcaacactagtcttttgtgcg

SEQ ID NO: 38494 - DNA, 2546 bp, Zea Mays
taactctagacctctaaaccaaacacggatcaaattagaatgatctcatcccatctctctttatccttcatcgtctctccatccaaacaataccttatgctgcaaactaagatcccctagcggtgcacgatcgacgtccatattgtcacgctctgatcgactcttggtacaccagatcagtacactacgcctacgcggtagccgctcacgcaaggcaagacacatcggccggccacgccagtgaagcactgaagctacacacacttcccactggagcacacgctcctcacgtgcccgcacccgaaacgtccaaagaaaaaagagggaggaaacccaccgacccctgctcgctcaacacgcaacgacgcgcctcggcctcgcagaaacaggggccaaaaaggaaaagagaaaagaggaaaagaacgcagggaatgggcaagcagcagcaggcgccaccggcgcggcggtccacggcgatgtcggcgcctccgccaccgaagcgccggaagaagaagggccggccttccctcctcgacctccagaagcggagcctccgcctcgagcagcagctccagcagcagcagcccaaggggcgacgctccaaccgccggagcgccggctccgcggacgaggacgacgacggccccgcctccggctccggccgccgcgagaagaagctgcgcctcgtcatgggcctccacgacggatcacccaaggtagaaaagacgaggaaagcgacggatgggcatgaagagccgtcagattccgggcccacaacacctttgccaaacaaaaagttattgctcttcatccttgataggctacagaagaaggatacatatggtgtattttcagagcctgttgatcctgaagagctacctgactatcatgacattgtaaagcatccgatggatttttcgacaatacgtaagaagctcgataagggtgcctattccaacttggagcaatttgaggacgatgtgttcctgataagcaccaacgcgatgtgctacaattcaccagatacaatatactatcgacaggcacgaggtattcaagagatcgctaaaaaggattttgagaatcttaggcaagatagtgatgccagtgatccagaaccggaaccagaattggagctggagccagaaccagaagaaccaaagccacagcctcgcaggggcaggcctccaaacaagaacaatgccaaacagaaagttgggaagccaccaacagaacgtgctactgcagatttttctggtgcaacgcttgctactgccgcaaatattggacgccatgcacaggcagatgttgatctgtcacgaagagcaatggataaagcgatgatggatatgctgagagcttcttttgccaatagaaggaatgagcataattggtctggcgagcggaaatttgaaagatttgaagagtgctcaggttataggggtacatggtccgcaaaaatggggaagaggccaattctgatggaagatagtcgccgaagcacatattgtgagactcaaccatccaattcaatatatgagctgccggtatcgtcatcctacaatgggacaaagaagctgctagtaccagttggggttcagttacagcagtcctattcccgcagcttggcacgatttgctgcacaacttggtcctgtgtgctgggagattgcatcaaggcgaattgaacgaagccttgctcctggaacaaagtttggtcgcgggtgggtaggagatggcgaaacaccaaactcttttcagccacccgtactagctgcattttcagaaacaacgacaccgcaagaccgtacagcagcttcaggtgagcagccatgcccatctatgagcagccctcctgccaccgaggcctgtgctggcaacgacagaagccatttggcgggatctcagccagatgctacgccatatgcttctaccagcacaacgcagaggatgagttccgaagcattagcaagccagcaatgtggatcactaccacaaatttcgataaaccgagctgaacgtacccttgagatgatgaagggcagccccaataatcttcacggacacccaggcatgcagcaaactgcgaatggtttcaatgctgttccaggaccaatgatgttcccacatgtggctcaactggtggtgaatcagatgcagacacatacggctgattgataacgttgtgtgtgtgtgccggggggcggggggtgtcgcctttgatccgtcgtgcctcaacctggggctgcaactgtgagcctgttgtgtaattgcttaagtagtcattaggatgatagcgtgcatagatgtgttgggtggatgctgtaacagcggtgaccggtgagttgcgattctgaatgtgtagcagaaaaaccacaggcgaaatgaaacatctgtatagattatcgaggaatttttttagcatgaaaccgtgcgaatcagtttgtctattgtctgtatggtttatatacatcaacctgacggtgttctcggactgcagatgccacaatgtagataagaagtactgcttccgttcttcaatatttg

SEQ ID NO: 38495 - DNA, 3278 bp, Zea Mays
cttccctcactggtgctcgccttggctgctccactcccagctccaaaaccctaaccccgcgagacatccagcagctaggagcgggtccaggagctcaccgtcgagcgaccgctacactcgacctcaccggtttctaatgctgatcaaagcatgagcttcactcctgttccaaggttcaggggggcagcctattcgcagttgtgtcctcagtctagcagttgtgctgaacatttggtaaatgtggatggggcgagtgcaaaagacttgtcagttgacccaagcacattttgtattccgcaagatgctaatcagggattttgtagccgagctttacagtacactagttctgtttcaaagcagggatttgcagctcaaggtcttcctgtaaatgctgcagagtttggtctgaataatgattcttctttggtgggaggatatcaacaatttgactaccttctggggcctcctcaaactgaagtgtgtgaaggaatgtggatgaaaaatatcaacacaagtatcatccaccggcgtagaccttctaatgcatcctgccttgatcatacagaagaactaacttcctatgaaaatgatgagggagctatctcatttggaagtagttgtagcacaggaattgcgagttatccatatagtactcctttgcaaagaaatagccacatttcggatacgcgggatggaacttgggatgctctcgtgcaaatgcaagaggctttggaagcatccaacagtgacaatggactcaatgaagagtgcagtgatttgactttcaatcatgcagaactttcaggtgggaatgccgtaaagcataaagttgtttgggacaatggctctttaaacagtccatctttcacctcaaatttattgtctttccctggtgatactgagaccaccctcacaagtgcctccactgtttattgtacctttcagaactttgctgatctccaacataagatgaacaacaatgagcaaaacaaattatctagtgaggttgaactgcctcgtcagaaagtgcccatgacaaaccatgttaatggaagtggaggtgaaatgcattctgctgaatggggaacgaaccctggtctcatagaatcttctggctttatgccaagcaatgaagacagacaaaacgatatatcacatcaaccgtcaagttcatttgtatacagtgcagatggaactgtggatcattgctcaaaaaagtcacccctcatgtatgaatgtgaagagcagatggaaattgattcacttttaaattcattcggtgtatcaactgattcattttcacaaacatatggaatgtttgagcgaagcaacaatttggttgagtttgatatgaagaccgaattagatgaaagtggttctgctgcatgctttaataataatgccccatatatgcaaactggaccacctgagtcagctatatctgatggatcttcttatcctgaacagtatcagtctacttctcaaacatgtggcttagtttatgcttcagcatctcagtggcaaaatatgtcaagttctggattgcctttactggattgtcgcaaaagtattggtgagcccacttcaataattagcctggggggaaatggtaaaggacacttgctgcccacaagtgaagatactttattacagaaaccacagagtgttgctcctgatgctagattggaaatgaccgacaatgttgctgattgctatctggagtctgctgctagcttggatggccattcttgtccactaggagcttccgcatgtcatgatgaagcaatggcagccaaagatttgcagacagcacaacatggcgtagtcacagattgcacctttggaatacatacttcaaaccacgctggacattcagacatgctgctacccattacacagactacttctgttcaagagcctggcttgagtttgtccaaggatctgaactcatcatgtattcgaggaacagaggttaagaaagtagatttaacagcaacatacaattctgaacgccatggcatcctccgcctcaagtcttttgaacaaaaaactcctgagagtatgggtatgaaaacatacatatatcattgtggtgatcatagccagattgttgatcctcagcagagtatcatactcgctgcaagcaaaccttcacactcaagtgttttgccagttgacaaatctgatggcaaggtcgtttcacagcaaaaaaagcggaaaagggctgcagaaaaccttttagcgtggcatgatcacatcatgcccgggcatgggagcatgcatcgtagaagaacacctgaattggattgggctcgtgctaccaaaagattggttgagaagctagacttcttgccgcaaatgttactaattccattgaggccattgtataccacatttctaaatccgcactcagtgacgcatgtgacactgctctatctgttgtgaatgacacgctaccgaaccagagcagcacttctggtaaggaaggctcaagaatcctatcagaagttctggaaacatatgagtcgaggcttggcaagctggaaatttccttgttaagctctgaaaaggcgacgacattgcatgatctggcatcagagctacaggacttggggcggtggtatattctctatcatcttgcaaagtggcatgggtacactaacaattctgagctcgaccctggcgcagctactgtcaagaaacatgaaggagctgctgcagcaccagtaaactcgctgagtgatatcaagtgtcgcttactgaactagggcagctcagcgactactaacaagtcaacccaacccgtgttatgctgaactgcgtataggaatatagaaccatagaacatactgctgctgtggataggcctggcgcggtggtgagaagccttctactgagccaaaggtcttgggtttaacacaacctttctgcaaaaatgtagagataaaggctgactctgttatttcttctctagaacctcactcatgtggaagtcgtcatcactgggtccgtctttagaacgtactgccgccccgttgccttgttggctttttttttgtttgtaaatgagaggcaacctctccgtttagacttaggaatatggtgatgtgacttaccatgtgctatgtgatcattagatgtaggagcacgggaagatcattttgcaagtatagctaacgctagctgtctggaacttccagatgttactgttcttttggccagtttgctagatggttatgatccggtggttgcagtttttgattgtcttttatctggtg

SEQ ID NO: 38496 - DNA, 290 bp, Zea Mays
ctctattctgtgtggctcaatagaggaaacaaaggagtaatgttcacaaaaatgagcaacacgagatcgagtagttacccccttttgaatatcgccgagaatggtgttcatgggggtgatctcgttggatgcttggtggactcttggatgcggcggtcttggtgcttgttcatcttccttatctgatcatgggcatctcctccttgatcattgctctccacttgaggcagctcattatcttgatcttttccttcatcatcttgagcctcatcctcatcttgagttggtgg

SEQ ID NO: 38497 - DNA, 665 bp, Zea Mays
aagcatttgcagataacttacataaggatagtggttagccataatattttggaatatcatcttccttataaaaacaggtatacgcaaactttcagtgataacgtttgcatatattttttcattcaaaatatccatctcctagtgtgtgaatgagtttgacaaatttgtagcaactagcacaggcccaagggatacacgtcccggtgccccccaccacccgttcattatccttggtcttcacctccacctacacctacatctccatctaccgaacatcagacccctccaactaccttgccgacgcatgaacgagaagacgggttaggctttgtcgaaaccctcttcgctagtggaggtatcgaccatcactcgtcactgtaacccgatggtgatcggcgaccgtgagcttccatgttttgtgttctgatacttgagacttttattatgactatgtataagatattgtctcttattagtattggatgatgagatgtatcttattatgactatggatgagacttttgtgatgtaattgatgagactatggatttaaatattgttatgtgattgtgtgtgagatgttttatgtgaaaaatatgttgtgctatataggtgttgatatatttgttatgttgtcgaatgtggcgtaaaataaaaataaataa

SEQ ID NO: 38498 - DNA, 199 bp, Zea Mays
cttcgaagccttatatggacgatgatgtcgcactctgttaaactggtctgaacctggtgaaagaaatttcttcaggcctgatatggtaaaggagacagaagagaaggttcaacgaataattcataatttgaagaaagctcaagctcgtcagaaaagttacgcagacacacaccggatacccttgtactttccagttgga

SEQ ID NO: 38499 - DNA, 476 bp, Zea Mays
atgcagcagggtgtgggcgcaatgcggaggagccatggacggccatggagctaatgtgtcgcgccatggggaggagatagcagggggagacgccggtcgggcctaggcgtccatggtcggagtggagcaggtcgacggcgcactgctcgcctgggcgcgctagggaacagagatggcagcagagagcttgcggcttgtcctgggcgcgtgcacttggagattttctgctggcgaggtgcgctagggagaaggagtggctggagcttggggcgccggccatggagagaaggggaggagacaccatggatgggggagagggacatcgcgccatggatctgatggggaaggggcgcctggcccatgggtgctcagccatggaggagaggggtcgctggacatggggcagaggaggctggcgttgagggagttgaggagagcggctgccagggagcctctgcgcacgggggaagaagaat

SEQ ID NO: 38500 - DNA, 864 bp, Zea Mays
taattgtgtatctgaatgcgataacttggaaactttagtcagtagaccaatgccaaaataggagcaatatttcgcagccaaagttgaaagcttatatggatacaccaactctcttctaaggccctgcatatttccacagggaaggctgtgatatgattcttgaaagatgacgactcagttcctgttgtcgatgattggggaggttgtgttggtattgttcaccgtgatgattgtaccttgattgtaccaagctggatgcacctcttcttgtgcctacttcaaccaccgtggagcacgtcattgacctactcctcagggagaaatccgagatggtggtggtgaagagcggtaacatgtacgaaggcagctcaagacccttgggtattttctccctcgccatgctgtggagtttcaccagcgactactcgtcggaatcagatgtcctcgacccaggcgtctcctgggcaaccaaaccaaaacaagatgtcgacacctacaatcacggctgattcagcagctagtttggtgtcctttaccagcttatagcaattgtagtttagatggttagctggtctgagtatgttcgagttgtcttatctgtatgtcagagtttttttctttttcttttttcttatagcaagtccgcatcgtgatgccgcgcaaaccagtaatgtaatggtcctccaattcgacaaggagggggcgaaatggttttttgtcaaaggaagccgctaggctgatcatgacctgcccgtggatctgtatgatgttttctgatgcacagagcaaaagtgacagtggagcggagattccggattcccgcccagccaccgcgcgcgcagggatatggtcctgagtcctgac

SEQ ID NO: 38501 - DNA, 2160 bp, Zea Mays
tgcgtgtcacccccgtgttggcctggcagcacgacctcatcacggcacggcgtccttaagcttcccttccggccttcccccacctcccacccgcgatctccgcgaccgcaagcagctcggcaggcaggcctccaccgctccaccacctccactcggtctacgtgctccgtcaccaaacccacccgggccaacgccgaagcaaccccccctccgtcctccccagatccggcgccgcctccgccctcacttacactagcacgcacggcggacacgtcgcctcccccgcgcgatctgatgcaggcgcacgcggtggccagcggcgatgcggtggaagcttaactcctccgtctacaagcgcgtgccgtccagggaaaccgccatggaacccgacgtcgagacgccaatgagaatgacggacggcggcggcagcggcgcggggccgtcgtggcgcatgtcgttgccgcatgtctgtgtcgccacgctcacctcgttcctctttggataccactccggggtggtgaacgagcccttggaggtcatctccgctgaccttggcttcgccggcaacactcttgctgaagggctcgtggtgagtatctgtttgggaggagcttttgttgggtgcctcttcagcggctccatcgcagatggtattgggcgacgccgtgcgttccagctcagtgcgctgcctatgattattggtgctgccataagtgctctctccaatagtttggagggtatgctccttggaagatttttggtaggaacagggatgggattgggtccaccagtagcttcactttatataacggagtgaggggtacatatggtagctttgttcagattgcaacctgccttggaattatagtatcactactcattggtacacctgtcaaagatattgatagatggtggagagtgtgtttctgggttgccgttatcccagcaactttacaagctctcggtatggagttttgtgctgagagccctcagtggctttataagtgtggaaaaataagtgaagcagagatgcaatttgaaaagcttttaggtccccttcatgtaaaatctgccatggcagaactttctagatatgaaagagtagatgatggagaaagtgtcaagtactcagagttgttctatggtcgccacttcaatgttgtttttattggcacaacgctctttgctttacaacagttatccggcataaattctgtgttctatttctcatcaactgtattcagaagtgtgggggtgccctctaaccttgccaacatatgcatggggatttctaatctatcaggatcaattgtagcaatgcttctaatggacaagctaggtagaaaagtgcttctttcagggagttttcttgggatggcttttgcaatggggcttcaggctgttggagcaaaccgtcagtatcttggttctgcatgtgtatatctttcagttggtggcattctgttgtttgtcttgtcattttcactaggagcaggccctgtcccaggacttcttttgcctgagattttccctaataaaatccgagctaaggctatggctctctgcatgtctgtacattggatcgtgaacttctttgttagtttgatgttcttgcgtcttctggagcaacttggtccacagcttctctacacaatattttcgtcagtctgtgtggtagcctcaatatttgtgaggcgccatgtgttggagacgaagggaaagactttacaagagatagaggtttcactcctgcaaccacaataaaggtacatatttgacgtggctggaaccttgggcaggctgtttgctgaacagaaacaagctggccctgcagaagttgattcctgaagtcatcggcaacgccctacaaatggtctcagggaagttccagatatgcgcctgcgacagctagggcggtgtttccatagagcatcatgtactgaagttatgcctgtatcgcccgccctagataggatattttcatacttgtgttgtcatctgttctatctatgagtcgtaatatcagaaaaaaaaggtactactgttttaccgttgatgagcacagttgaaaaaaggaactatcatcttcattttacatgtatgtactcagtaaccatactccgaataataacactgcatggagattccttgttagacggt

SEQ ID NO: 38502 - DNA, 2179 bp, Zea Mays
acaaattcaaataactcgctgacctccactgctccacacctctacctgcctgcgccaaaacctagccgccgcggcgccgcccgccgacctgccgtgccgactgctgagtgccgaccgacgtgcgcccgctggccgctcgacgttgttggcctccctcgacgccgctggccggtggccgctcgacggagtcgacgcctcacagcctccctcgacgcgacgccgctggccactcgacggagtcggcgcctcagtcacagcgagaattcagactgctgcgcgccttcatccccttcccggcggccgacgtccaactccgcctcacagtgcttctgtggttctgcctagcgcctgctcctgctcgtagtgctcgactacgggctgctcttctctagccttgagacagagagtcggagactccagtgcccctgctagcctgccctctggttttgtgttaagtgtgggggtgatgatgagccaccggaggcgttctcgcgctgccggctcgccgcctagtgacgccagtacgggtacagcccctactcctgagaagtcgggatggatccggccgtgggcagcgacagggtcggaccttaaggtgctggagcttgcgctggcgttccgcgcggccaacgcgttgctcgtgcgcacatacttcaaccccgacgagcactggcagtgcctcgaggtcgcccaccgcgtcgcgttcgggtatggtcatctcacgtgggagtggaagcggggcctgcgcagttatctccacccgttgatctttgctgctttgtacaagaccctggcgctactccatctggacactccgtgggttatggtgatggctccacgtctcgtgcaatctttgtttgcagcttttggagatctatacctatataaactttccaaacttattttcaatggtcaagttgctaagtggacgttattttctcagttggttaactggttcatgtttttctgtatcacacggactctatcaaacagcttggagactgttttgaccgtggctggactctattactggtttgctgcaatagagtcttccaaggcaacttcaatcgtttcaaagcagcatgcggcctgtgaacaaagtatcccatcaagaaaagtggctcttctgatagcagccttatcatgtgccattcggccaacaagtgctgtaacatggctatatgttagccttttggattttattcagatgaaatcaaaatgttgctttatccttcttgatgtcattccagtaggggcaattgtccttgctgtaacaacactccttgattggtggatgtatggttcctgggtcatagtgccgcttaattttttgaaattcaacttattgtcttccggaggagactactatggaacacatgtctttcattggtactttacacagggttttccatccatgatttggacattcttaccatttgcattgtgcggcattgtaaagtctcaggaatggaggctttcaggtctaattgcttgggtattaggggtttacagcattcttggacataaagaattcaggtttgttcttccagtgctacctttagcattgatgttctcaggttactgcttagcttccatgtcacggtccaagggcaaaaatcagcataggaaagatagtctttcaaggatgcaaccttttgttattcttctcgtcataaccaacgttcccatggctttatatatgtccttattccatcaatgatagcaaagggaccttggatgagtcagatcgtttccttacaagtccatctgagtttgtcggcgaggtttttggaaatttatctgcattcagtcacattgtaatatttgagtcagaagaaagacatgttctccagttgcttctgcacaattcctttcttgagatgaggaggtttttccactcacatttcaaggttgacagagaccttcagtcggctgttgtggtttattcacggaggaatgtgctctgatttagtactgatgtggcagaaaatgcctgttagctcgtgtagcaatccccacacgttcatgttgtttcagcttttcacttgagaaatgagatgtaacactgccggatacttctgatgtattaaacccctttgaacgagatgttacgttacttttactcaagtgctttacaacgacaataacaattctctgcttcttctaagataaaagtctg

SEQ ID NO: 38503 - DNA, 2375 bp, Zea Mays
aaaatgttatcttttttgagagtggagccatgcagtaaaccgtaaatggaggactcaacacaaaagaagcacaaacaaggtggcgaacttggcctcctctcctcactcctatcccctcttcccccaaacaagatgtcgcctctccctgtcatggcggataatttaatctcgccacccccacatgctctgtttttatattgcttcctcctcactgtacccatcccgccatgtcctctcctctgtctctctctctttgagcctcctttttcaacctaacctttgacgctgtagctcgagagcaagcatagtgcctagtgcctaccagattctctccctgagcggctgagctctgccgatccgcgataggctcgcgccatgcagatgctctgcgacgtctgcgccgccgcgccggccgccgtgatctgctgcgccgacgaggccgcgctctgctccgcctgcgaccgccgcgtccaccgcgccaacaagctcgcccacaagcaccgccgcatccccctcgcccagccctctggcgacgaatccgacgccgacgccaagccgctctgcgacgtgtgtaaggagcggaggggcctcgtgttctgcgtggaggaccgcgccatcctgtgccccgactgcgacgaccccatccacagcgccaacgacctcaccgccaagcacacccgcttcctcctcgtcggggccaagctctccgccgcgctcgtcgacgcccaggcgccccactcccctgacgacgacgacaacgactgcggccgcggcaacggcgccgccgccgagcccgacgctgtccccgccgtctgcgcgcagggctcctgcgcggccaaggcctcgtctcttgagtccggtggcggcggcggcggcggcagcggcagcggcagcagcatctccgagtacctcaccaacatctgcccaggctggcgcgtcgacgacctcctctttgacgactcggcgttctcagcggcatcgaaggccgacagctgcgacgacgggcacgagcaggtgccgtccctggacgccgacctcttcgacgtggtggctggcgccggctggccggggaagcgcggcagcgcgtggtcaggagtcggagctctgggcttcgacaaggtgccggcctccgttgttgtcgtcccgacggcggccaagcaacagcaggggtgcgtgagggagaggacctgggactcggacagcgacagcgacgtgttcgcggtgccggagctcccgcaaccaccgcaggccaagaaggcgcggccggcgccggctccggcgccgactttctggtgcttctgagctgcactgtcccagtccggtccggccggcctgtgtgcactgtgtactagggatggcaatcgggcgggtagtacacggatatatagttcgcgaatccatacccacgagacaaaactcaacccatacacgtacccataaacgttcgtgggtatggatctgtatccatacccgtacccgtcgggtatccgctatccagtggatacccgttacccgcccgcccactacaattttagcattaaacaccaaacaacaattttattatatttcaaaataattatcattctaatagcattaaatgataatttcagcaccaaacaacatgttatggataaaagttgaaaaataagaatttatgataatatataaatctggatggcccacatgttagatatccattgggtaacgggtatggatactggatatccatacccacgaaaaaatatccgcggataccttattatatccataaccgtacccgcggatatcaaattccaccatacccatatccaatggataattatccgcggttatttacccatacccgtacccattgccatccctactgtgtacttgccgtgacttctgtaaccagtgtgtgtgagcgagcttgctcgtgctttttacccatgtactgttgttactgcatacacacacacacttaccactactattagtagctagcagtgctcaaacccaagttaattaagtttggcgcagtttatattatgacttaatcatgaggtgatattgctgttaccgtattgtaaactgcccaaagttacgtttcgaacttgtacgggctacaacacatgttttggtgctacatatttgacacaaaactacaagtattagcacagcactatgaaaaactacaataatatagagtattgatatttatttcagaactttctagaaggggacacaagtcatccttataaggattatcttagcctatatctcctctatcatgttatactcacttttttgtgacatgtcaaggaaaaagatcactggacccttagggcccaccggttcagagagcacgatataagaaccctcagactaccagggac

SEQ ID NO: 38504 - DNA, 2421 bp, Zea Mays
ttctttcacagcttcgctctctcaattctgttgagcgagtcctcttcccctccggttcacgtcttcgttacatttccacggctcccaccagcgtgagtgcgtgaccagccccaatgccctccaaaccctagtccacagctcctgtaccctggcggccatgccggatctgagcaccagctacctccctcccttccctgaactgtccctcgatgcgggggccctcgccgtcgaccacgcggggaatgctgcagccgccgcctcggccgatgcggcgtccgcgtacgcgtcttcgtctgcctctgtgggcagcggcgtagacgacctcgttattccagcggaatgccggtggaagggccatgtccgcaccttcgacatggcgggcgcgggcgctgtcaccacttgccccgccgcgcggcgtggcggcgggaagaagctgtcactgattccgtcactcgagccggcacggacgcaggcttcagcatcggctccgacgctcgaggaacgcgtgagcgagtgggcggctaagaaggcagcggccggcgttccgactcatcactgcgtgctgcctttcctcaccggggcgccaatggcggtcgaatgtcgtttgtgctccaagattatttatgttggagaagaaataaaatgttcagttaaaaagtgtccacaaatgttccatctcaaatgtgttgcggaagatacttcaaactttaccgttgaaagcttcaggtgccctcaacatgggtgtatggtttgtaagcaaaagatgttcttttggcgctgcggacgttgtacagttgcagcacatacgaaatgtgcaccatggccagtggttcacctaaaaaatgatcaaggaagtgcaatttgctggaggcatccttctgactggctgctgcaaaataaggaatactttgtttgctggtgacagaatgctgactttaccaacagtgtagaggaagtattttgccggctacctcttccatatgttaatgaagacttaaatattgattcaatcatcagggattatgctgaggctgtttataagccacccccctatacatctatcaggcgcaatgtatatctgataaaaaagaagcgcactggtgttcgcgtggatattgggtgcacaaactgcagggctgattctacttgcaaagaagactgtgaatgcaggggtctttctatgagttgttccaagaattgtcgctgctcagatctatgtacaaacaggccattccgcaaggataagaaaattaaaattgtgaagacaaagcgatgtggatggggtgctgttgcgttggagccattggagagaggtgattttgtaatcgagtatgttggtgaagtcattgatgatgcgacatgtgaacaaaggctttgggatataagacggcgtggtgacaaaaacttctacatgtgtgaaatcagcaaagattttacaatagatgcgacatttaaaggcaatgtgtcacgttttctaaatcacagttgtgagcccaactgtaaactcgaaaaatggcaggttgatggtgagacaagagttggtgtctttgcctctcgttccatcgaagttggagagcccttaacttatgattacaggtttgtgcattttggagagaaagtgaagtgccattgcgaagcagtgaactgccagggatacctgggcagccaaataaagaacccaattcaaagcattcttgccactgtagcaccgcaagtgcagttgcgagagtattcgcccatgcaccacgaagctccaagattgaagccaataaatcacttgttaccctggaccaactgtatagaggtctcttttaacctgagaagcaaaaggaaaattgaccggctatgctgggcccgcaagaagaagagaacatccctcgtgccatcttcaacaagcatgccagcatcgccgagtgaagttcctgccgcggatttctaactgcccttcgttgaagagcaagcctgccctgtataataatttcatggtacattctttacatgcattggttggaaacgattctttcacattgctcatcaatggtgttgtaacctgcaacattctttatttggtttcatagggcattcagtcagtttacgggtggtagtttgtcggaacatgtacccaatttttctgatgaaacaaatgtttgagcttcatgtaatgttggctgctgttttttttatgcgagataatgttatgaaactggatagtccctgtaaacatggcttaaaacatgacagaattattttcttttaggagaatgctaccccttttattttatgtacaaggaattgataaaaagagcagaggtcctagcggcctaggcgtgcgagagcctagagcgcatatctaatcatcagtttaatataaaggcgattaacgaagacacggaacttactgtcctgtcttgattgagttct

SEQ ID NO: 38505 - DNA, 867 bp, Zea Mays
gtgtcttgggaaaaaaagatcgatttggattttgaaaactggatccaaacaggtccgaaatgactaggaagttgcgattctggaatttaaaattataatcagaaatgaagactagaaaaccaaaaaataaaatatgcccccatgcaggatcgaactacagaccttcagtttacaagactgacgctctaccactgagctataggggcaattgtgatttacgtctttgtgtaggatatatatgtatttttcagattttttactatagtgtacaacccaccgcccgcgtctctctcgttactcctccgtcctccctccgcgtttacacccgccgccactcctgccttggcgccgtagctagcaaaggcgatatccatggcgagccctgcacggatcgagctggacaagctgagcgtggagcagctcaaggggctcaaggagcagacggatctggaggtcaacctcctccaggacagcctcaccaagatccgcaccgccgccacccgactcgagaacgcctccgccgcgctccaggacctatccctccgcccccaagggaagaagatgctcgtgccgcttacggcgtccctctacgttcccggttcactggacgacgcggagaaggtcctcgtcgatgtcggcaccggttacttcatcgagaaaaccatggctcaggggaaagaatactgtgaaaggaaaattaatttattgaagtcaaattttgatgaattggttgagattacccattgcatgtagaccgcactgttcgcagagtctgaaataggagatgagatggaagaaggatttgtaagctgctggagatagtctaagaggacttttgaacaaggaaataaacaaaggaaactaaaa

SEQ ID NO: 38506 - DNA, 1187 bp, Zea Mays
cttggatgcagagatgggttttgggtccgggtttgagggaggaagtgtacctcctgcttctaattctcggatgtcagcacttcctcatgaaccagctggcttctacaatgatcgtggtgcaacagtggacatacctcttgattcaacgaaggacctaagtaaaaaggagaaagaactgcaggcaaaggaagctgagctaaacaaacgggaaagggagctgaaaagaaaggaggaagctgcagccagagctggtattgtcattgaagataagaattggccaccctttatgcccattattcatcatgacatttcgaacgagataccaattcacctgcaaaggatgcagtacctggcgttttcttcactattgggattgacagcttgcctcttttggaacatcattgcaactacagcagcatggattaaatcagaaggtgtcatgatctggttgctagcaatcatctacttcatctctggtgtccctggggcctatgtgctttggtatcgcccgctttacaatgcgatgaggactgaaagtgctttgaagtttgggtggtttttcttgttttaccttctccatatcttattctgtgtctggtcagctgtggctcctccatttccattcaaaggaaaatccttggcatattttacttcattggatttggaatgttctgccttgaatcactgctcagcatcgttgtcattcagcaagtatacatgtacttccgtggaagtggaaaagctgcagagatgaagcgagaggcggcccgtggtgctatgaggaatgccttttgatagagcgacctaggcgactggaagagacacggtgtgacaatgggtaactacgttatgtacatatgctgttcgtctctgagattacttatactagcttatagccttcttgccttcatgcaatgtataccacctaccaccggagcttgatctcttacctaggttcagatgtgcttataggtaactagttttttttatacatttcctacatgatttgtactcttaactcgcgagacaattgttgttgttctttggatctcgagtgattctttgcacggcctgaaaccacttggtcttgaactttgtcagattcttgctgaagtggatattcaggtcatctttttttttctgtctttgcttactatctctttctatcaaggtttggttcagatatg

SEQ ID NO: 38507 - DNA, 477 bp, Zea Mays
cgctgggcgccatctctagcgccccccctctctgctctcagacccgacgccctgcagcctctagcacctatcctccctcgaatccaagctcccctggatccatggcatcttcttcctcttcatggccggcagcgacgcataccgcaagtccttcgtcgggtcggccgtcgagcactataaccgcgacgcggtgtttgccacggctgctgcgcagatcggggccacaacagcggcggggcacccaggcgcgcagtccgcgctcctgttcctcaccggcaccgggatgacgcgcctggcatcccgatccctctgcgcaggcaccgtcgtatccacagccagaggaagaaggccatctcacgcccgtccgatccggaatgtatgggtgggattggatccggagttaatccaataagaaccgtcgatcgtcagtttgaaggctgtgatccgatgccaggtaccccttcacctcgttagaat

SEQ ID NO: 38508 - DNA, 3323 bp, Zea Mays
gggaataaaacaatttgaaagtttgtacacggagccaagtggagagagggcatggtacttgagagttatgagcgagcgtataataacatggtgcgtgttcaacaactttcagaactggaagaggtgattgattactgcactcttcccatggaaagcccgattgctgacggacggagggaacttattcgcaatatgtggaatgaacggattaaaggaacaaaacggaatgtcgaggtgtggcaagccctacttgctgtcagggagttggttcttccccctaacgaagacagagacacctggataaagttcgctgaactttgctggaagaacggtcgtattagtcaggctagatctacgttagtcaaacttttacagtttgatcctgaatcttcccctgaattgacactgtatcatgcacatccacaagtagctctggcttatctaaaataccagtatgcagttggtgatgagcttaaaaggagggatgcattttctaaactgcaagagttgtctgtgcaggttgctaccaccatgggcaatttacctggaacatcagcaaaccatggcaccatgtcaaatgctggagtaccactcattgctcgtgtctacttgacacttggtagctggaagaaggcactatcacctgcattagatgacgattccattcaagaaattttgatttcttaccataatgccacgctaagtgcaaaggactgggggaaggcctggcacatatgggctttgttcaacacagaagtcatgtcacgctatactttccgaggccgaccagatattgctggaaaatatgttgttgcagcagtaactgggtatttttattctattgcttgtgcatctactacgaaaggggtcgatgatagcttgcagctttactttgaccaaaggaaaaataactcggccggggagggaaagaccgccctcccggatatccttcgtctgttaactctttggttcaaccatggggatacctcagaagttcaaacagcgttgcagaaaggtttttcccttgtcaagattgagatgtggctggttgtgctgccccagataattgctaggattcattcgaacaatagagtagttagagaactgatacaatctttgctagttcgaattggaaaggggcatccacaggctttgatgtatcctctcttggttgcctgcaaatcaataagtatattgagacaacgtgcagcgcaggaggtcgttgataagatccgccagcacagtggaggtcttgttgaccaggcacaacttgtgtcgaaggaactgatacgggtagcaattttgtggcatgaaatgtggcatgaggcactcgaggaagctagcaggatgtattttggtgagcacaatatcgaaggaatgcttgctgtacttgagccattgcatgcaatgcttgagaggggggatgagacaattaaagaaaatgccttcattcaggcttatgggcatgaattactggaagctcatgaatgctgtttgaaatatcgggctacaggagaggatgctgagctaactaaggcctgggatttgtattaccatgttttcagaagaatcgacaaacagcttccaagtcttacgaccctcgatctgcactctgtttcgcctgagctactcaaatgtcgaaagttggaacttgctgtgccaggaacttatgctgcagattcaccacttgtgacgattgagtattttgttccccaattgatttgttataacgtccaaacaaaggccaagaaagctgacaattcatggaagtgatggcaatgattatgcattcttgcttaaaggccacgaagatttgcggcaagatgaacgagtaatgcagctttttggtttggtgaatactctcctagagaactcaaggaaaacatcagagaaggatttatcaatccaaagatatgctgttatacctttgtcacctaacagtggtttaattggatgggttccaaactgtgacacacttcatgctctgatccgtgaatacagagatgccaggaaggtggaagtgtttcagcatgctttgcaaaatactgagggaaatgaccttgcgaaggttctgtggctgaagagtcgaacttcggaagtatggcttgagcgccgcacaaactacgctagaagcctggctgttatgagcatggttgggtatttgcttggtttaggagatcggcatccaagcaaccttatgttagatcgctatagtggaaaaatattacacatcgacttcggagattgctttgaggcttcaatgaatcgagaaaagttccctgaaaaagtaccattccgtttgactcgaatgcttgtgaaagctatggaagttagcggtattgagggtacattccgaacaacttgtgaaaatgtgatgcaagtccttcgcacaaacagagacagcgttatggccatgatggaggcatttgtacatgacccgttaatcaattggcgtctgttcaatttcaatgaggttcctcaagtgtcgaactatggtaatgttcatgctcacacggttgtcagtagtgaagaagcagtggctaaccgagagctcatgcaacctcagcgaggagcacgtgagagggaactgctacaggctgtcaatcaactcggtgatgccaatgaggttttgaatgagcgtgctgtagctgtgatggcacggatgagtgacaaactaacagggcgtgacttctcttctgggtcagctttggctggagcaggtagctctatccaacatggcagtgagcatttggcttcaggagatgcccgggatgcccaacctggtctctcagtgaaggttcaggttcagaagctcatactccaagcgacttcacacgaaaatttgtgccaaaactatgtcgggtggtgtccgttctggtgagctctcttggaaacagtagcagtttataacatgtaaatattgtgaataccgtgtgcatagaagtttcgtggtgacagtttgtatgtgcagctttgtaattagcagaacttcaagatgccttggaccatccttttgtcagtttcttagaccgtgtttagcagttcacccttatggccatccaaaacactgtttttgtactgtagattgtattgtttgtagattgtactgttcgcagggtggatttttgaatatgagtataagaatgtgtaagctgttgaagatagccttaggttttcttccgtgccacttgagggtttgttcgattagctctcaatttatgtggattgagtgagatcggattggtttaaatctcaagcaagttaaattttcttcttaatttttctaatctcatcaaatccatgtgtaacgggaataaccgaac

SEQ ID NO: 38509 - DNA, 2467 bp, Zea Mays
cggtctccgacgcgctgcccgctcgcctgccaaacccccaccccctcggcggcgatgctgacacgtcgccgtagcaaccacccgggctgctccttccccctcccgttcctcgtctgcggcctgctcctcgctgcggccgtcgcattttccccagctgcggccgccgaagcagctgacggcggcgctgggcacgagggccgcgcggggaaaccggaggtagaggccgaggcggaggcgcgcggggatggggttgccgtggcggaagccggcggcgaggtggtggctcagggcaatgccacggaggccaaggagggcagccttgccgacatgatcgaccgcgcgctggagaaggagttcccggagtccgagggcgagcagggcggtggagagaccgaccctggcagcttcaacaacacggtagctgagaagcagggagttcttgaaactgtagctagaagagtaacaaagaagaatgaaaccaaagataacaagtcatttccttttaaggaggttttcttggatcgaactgagcaagaggatgttcccacgttgatagatcggaaggataatgtttttatcatctcaaacccaaagtcaaaataccctgtgctgcagctggaccttaggttgatatcagatcttgttgttgttatcgtatccgctacatgtggtggaattgcctttgcttgccttgggcaaccggatctataattgggcctggaggttttagctttgtcaatgaaatggtgcaagttgaaacggtagcccagtttggtgtgatatttctcctgtttgcattgggacttgagttttctactgcaaaacttcgagttgttcgtgctgttgctgttctcggaggattgctccaaattatgttgttcatgtttctttgtggtattttggctaccctatgtggaggcaaaactaaagaaggtgtttttgttggtgttcttctctccatgtcttcaacagctgtcgttttaaagtttctgatggaaagaaatagtatcaatgctcttcatggccaggttacagtcgggatacttatattgcaggattgtgctgttggcctgctgtttgcgcttcttccaattttgagtggtacatctggccttcttcacggagttgcatcaatgatgaagtcgctggtggtattgataacattcctgaccattctctctatcctctcccgtaccggcgttccttggtttcttaaactgatgataagtctgtcatcacagacaaatgaactatatcagctggcagcagttgcattctgcttgttatttgcttggtgtagtgataagttgggcctgagtctcgagttgggttcttttgcagctggagtaatgatatcaacaacagaccttgcacaacatactcttgaacaaatcgaacccatccgcaactttttcgctgctcttttccttgccagcattgggatgctaattaatgtccatttcttgtggaaccatgtggatatactccttgcagcagtaattttggtgatcaccgtaaagacctttattgttgctattgttgtaaaagggtttgggtatagcaacaaaacatctcttcttgtcggcatgtcacttgcacaaataggagagtttgcttttgttctcttaagccgtgcttcaagtattcatctaatcgagggcaagctatacctgcttcttcttggaaccactgcacttagtttggtgacaacccctctgctattcaaaatgatccctgcaatggtccacctcggggttcttttgagatggttttctgtcgataccaatcaggtggagctgggcctgaaaaatgatgtcctccgcatcgatagcggcaagcgcataaatctgatagtccaaggctcacatgactcatgacacatttgacacactgcaagctactttttgtatggcttaagtttacaagctctgtaaagtgttttcacctgtactgaagagtttctagcagatatacgagggtggaggcaagagaactcaactcagatcttgctcctagtgcaagatcaatcctcccccgtcatgacggctgcaagggcaaagtcgggttttgccgttcttgagagcagtgtgtcttggatgattggtgcagtgagtggctgtcgaccccaaatgagggtctcgtgtaacatatgaatgtatggtgattaattaattggattagcatgataggatgtaggcctgatcctcagtaaaggttatgcccttgtgttctttcaccaaagttgtgtatcctcactacacgaaagtgtgtacgacatccatcagatcacgaattttgttgtgtagccatatatgtcagtttcttaacatgtccaagttcatgagtttttttttcctcacgggaagcttttgagtaacctttgttcagatatcactttgttggatcgagtccaggatctcaatgatgggtgtgtttcaatgaatttgttcactttttattataccat

SEQ ID NO: 38510 - DNA, 843 bp, Zea Mays
ccccgcgaaatcggcgcggcgtgaacaacctcacgttcttcgcacgggtcgttcctccaatcgcgcatctcgggctccttggcaccagcacatataaacccggccgcgcgcaaaacctcgtcaacaatctgggcacaaccctcatcgacgtccgtgcctccactgggcagggtaggtccgccgagaaggataggagagagagagttgtgccgcaagcgccacagtcaccccgtcaacggtgtacttgcgtcggtggttggttgaggataatccccgggctcgacagaaccgtacgtggttgaagggtgggggcatcgccatctccgacgactgtctgctcaccactggtgtctgcacctcgagctgacctgcgtgaccatcgtcaaccggactgcagtccacgtgcaaggttacgaggatctgaagaatcatcctggtaattggaagctcaagtgcgaggcaagttgtgcccttgatcatttatgtttacccagtaatgttctttaatatcacttattcatgcataggtttaattttgatgggacccaataggtcaccctagcctgtttattcattttaccttgttatccctgaatcacttgggtagtttttctattgctttacatggttttgggataatatttcattatatctatgatccaattattttgttattctatttatgttcatctcaagatcattaatgttaattggaacatgaagcttaacttgagaaacacgtgccaccacaagggtggaatgggacgcccttgactaactaattagaaaagctagtggaagactaccttacccaaaaggggcaagggcagtaggggagttgca

SEQ ID NO: 38511 - DNA, 1895 bp, Zea Mays
tcgtgtgctgccccacttgcagttggactcgccgccgctcgcttgctgtggcctgtgtccgagccggcctaccccgcctctgaacaccgcctcgccgcccgcgtgcgcccccctccaactcctatggccgcgccctcccacctccacctccacctcccgggctgcccccaaaccctagccctgcccctgccctccccggggggtttctccgcttggcccggcctccgctcctgctcccgctcccgccagccccgcatccgcccggtcgccgcgctcggacccgccgacgccggcgacctgctcggccgcgttgaggcgttcctctacaccgttgcggacgccgccgttaacgcggagcccgtcgcggcagccgcggacaccgggaccaaggaggccgccgccggggactggctctccggcatcaccaactccatggagaccgtgctcaaggttctgaaagatggtctatcagctctccatgttccttattcatatggctttgcaatcattctcctcactgttcttgtcaaggcagctacatttcctctaacaaagaagcaggttgagtctgcacttgcaatgaggtcactgcaacctcaagtgaaggccattcaacaacgatatgctggtgatcagggacttctgactgaaggctttttttggataccttctctggctggtcctacaacaattgctgctcgacaaaacggccaggggatatcatggctttttccttttactgatggccatccacctcttggctggtcagatactttggcatacattgtgttaccagttcttcttgtcatttcacagtacatatctactcaagtaatgcagccaccacagagcaatgatcctaaccaacaaggtgctcaggctgtaacaaagttcttaccattgctaattggttattttgctctttccgtgccttcaggactaaggctgtactggcttacaaataatatcctcagtactgcacaacaagtgtggcttcaaaagcttggaggtgcaaaaaatcctgtcaaagaatatattgacaagctttcaagagaagaaacgactactgttcagaagaatgattctactgttcagagtgaacctctctctaaacatagtaaaccccagcctagccaagagccgaaaccaagtgggccacaacgtggtgaaagatttaggaaactgaaggaggaagaatctatgagaaaagaggttatgggacaaggtaaacaatcagaacagtcaagttctgaatctagagtcacggatggaacacaaaattcggatgtgtcttctggagaccaaaaagaccaacaggggtctcatgaaaatggaccggttgtagctagtataaatggtggagtcaaccatattcgaaatgaaaagactcagaacttatcctcagaaaagaataatcccagtggggtgcacggagatcacacagtcacagatgtaggacaccgggcatgaggtgaggacgtcgtcacctgggacatggacaggacggtggcggcgccgcctactgctgcccggcgttctaggatctgctggacatggacaggacggtggcggtgatgccatttgtcaggcataattgaattggagctaagcatctacaacgatgagtttgcatgtcccatgcaacgatgctatgcttgctcacatgaattgtacacaacaatctcaggctcaagaacatgattcatttgcatgctctcgactagcagtgtttctacccaccggctaccgccaatttcgcctacagaaacagacacgagataccgaagactgcagatcgccaaaagacgatgccaaatggcttctcgatcatttgtaaatttgcccagcttaatatacctcgtatactatatacaactcaatcctgtacaatgttt

SEQ ID NO: 38512 - DNA, 2717 bp, Zea Mays
ctacttctgcagattaatgaccgctatgaatttcctcttcaacttgaccttgatagagacaatggaaaatatcttgctccagatgcagatcgaagtattagaaacctctatacacttcatagtgttcttgttcatagtggaggagtacatggtggccactactatgctttcattcggccgacactctcggatcagtggtacaaatttgatgatgagcgggttacaaaagaagacactaaaaaggcacttgaagagcagtatgggggtgaggaagagttgcctcaaataaaccctggtttcaataacacgccatttaaattcacaaagtattcgaatgcctacatgcttgtctatatacgtgagagtgacaaagagaaaataatgtgtaatgtcgatgagaaggacatcgctgagcatttgcggataaggttgaagaaagaacaagaagagaaagaacacaagaagaaggagaaggctgaagctcatctctacactatcataaagatcgctcgagacgaggacttaaaggagcaaatcggtaagaatatatattttgatctggtggaccatgaaaaagttcacagtttccgcattcagaagcagttgccttttacttcattcaaggaggaagttgcaaaggaatttggcatccctgtacagtttcagcgcttctggttgtgggctaagaggcagaaccatacataccggcccaatcgtccattgacaccccatgaggaagcacaatcagtcgggcagcttagggaagtctcaaataaggcacacaatgctgagctgaagctgtttctggaagttgaacttggaccggagttatgtccaattcgtccacctgagaagagcaaagaagacatacttcttttcttcaagctttataatgctgagaaggaagagcttcattttgttggtaggctttttgtgaaggctctgggaaagccatctgaaatattgacaaaactgaatgcaatggctggattttctccaaatgaagaaattgagctgtacgaggaaattaagtttgagccaaatgtgatgtgcgaacatattgacaagaaacttactttccgctctagtcagcttgaagacggagacattatctgtttccaaaaggctcctgttccagatggtgatgcacaagtgcgctatccagatgttccttcattcttggagtatgttcacaataggcaggttgtgcactttcggtgtctggacaaaccaaaggatgatgatttttctttggaattgtcgaagcttcatacatatgatgatgttgttgagagagttgcacatcaacttgggttggatgatccatcaaagatacggcttacgtctcacaattgttattctcagcaacctaaaccacagcctattagatataggggggtagcacatctactggatatgcttgttcattataatcagacttctgatatcttgtattatgaggttctggacattccactgccagatttgcagcgtttgaaaacgcttaaagttgcattccaccatgcaacaaaagacgaggttgtcgttcatagcataagacttccaagaaatagcaccatcagtgatgtgattactgatttgaaaaccaaggttgaactatctaatcctgacgctgagctccgcttgcttgaagtattttaccacaagatttataagatctttccacctcatgagaagatagagaacataaatgatcagtactggacattacgagctgaggagatcccagaggaagagaagaatcttggcccacatgatcgattgattcatgtttaccatttcatgaaagaccctaaccagaatcaacaaattcaaaattttggagatccttttttgatggttattcgggaaggtgagactgctgcagaggtaatggagcgcatccagagaaaacttagagttcctgatgatgagttctccaagtggaagcttgcattcatatccatgaaccggccagagtacctccaggacactgacgttgtatcagcacgttttcagcggagagatgtatatggtgcttgggaacaataccttggcttggagcacactgatacaacatcgaaacggtcttacacatccaatcagaatcggcacacctatgagaagcccgtaaaaatttataattgagaaaccttcatcaaagttcaatccattgtcaaaggcgtcgacagcagcatgcccaaggtgatacgacgcttcaaacagaaaaatctggtatagtatttgcctgtgctaaggcctgcaaggcgcaagcccaccaggccaccaatgctgcttccaaccttcattgttccaagcaaccaagcatgtgtttggtttttcttcgtcgtgtcgagtatgacggcccctgacaggctgtgggaacaatggcagagattgtataatgggtttggtataattcttcgtgctgttgagaaacgtacgaggataacccgatcagatagtagagttttgagacctgtcaaacagaaccttttgaaactaacctacccgttataccagaagggccgtttgcaagtcttctattatacatagtttttattatatatatatatatatatgcatctagaaaataagaacaatttagaatttagaatggagtagaatacatttctacccttatttagaaatagaactatcccctgtggagagatagaacaccagctagggacaaagctgccaagacttgttacaat

SEQ ID NO: 38513 - DNA, 1705 bp, Zea Mays
tgctttgctagttctgatggctgccaaagtctcgacttaggtttgaaaactgccataattgagggagacgtcgtgggtggaacttgtgtcaacagaggctgtgttccgtcaaaggctctccttgctgtaagtggtaggatgcgagaacttcaagatgaacatcacatgaaatcactgggcctacaggtctcatcaccaggatatgacaggcaggttgttgctgaccatgcaaataatcttgcatctaaaatccgcagcaacttgactaattcaatgaaagctctgggtgtggatatactcactggtattggcaccattgtggtaaaactgtatttactagtgatcatgcactaaaacttgagtcagtccctgaatggattgctattgttggaagtggttacattggacttgaattcagtgatgtatacacagctctaggaagtgaggttacttttgttgaagctcttgatcaattaatgcctgggtttgatcccgagattgcaaaattggcgcagaggattcttattagtcctcgtaaaattgactatcacactggtgtttttgcaagcaagattaccccagcaaaggatggtaagcctgttttgattgagctgattgatgctaaaacaaaagaacacaaggagacacttgaggtggatgcagcactcatagctactggaagggcacccttcaccaaaggacttggcttggaaaatatcaatgtcgttacacaacaaggttttgttcctgttgatgagcggatgcaagttatggatgcaactggcaatgtggttcctaatttatattgtatcggagatgccaatggtaagctcatgcttgctcatgcagccagcgcacaaggaatctcagttgtggagcaaatcagtgggagggacaacattttaaatcacctaagcatcccagctgcttgtttcactcaccctgagatcagtatggttggcttgacagagccacaggctagggagaaggctgacaaggaaggatttgaaataagtgttgtaaagaccagttttaaggctaacacaaaggccctggcagagaatgaaggagatggacttgctaagatgatttatcgccctgacaccggagaaattcttggagttcatattttgggcttgcatgctgctgatctcatccatgaggcatcaaatgccattgcccttggaacccatgtgcaggacatcaagtttgctgttcatgcacacccaacgttgtctgaagttctggatgaactcttcaaggctgccaaggttaacacagctggttcgcattctatgaatgagccagttgcggtgtagagaggagccatagttgaaacaatctatctgctgcagccccacaccccagttatattgcctttagtacttaactagcctgctactcagaaaactgattttgtagccatttgcggacattttcgttatgagattcaggattagtgccagcactatctatttcatgagaaaatagaaatccaatgatctgtcccatgtatggaaaaatgtaaattttgtagtccttgtagagtaaatgtagtgcctttacgtggcaaaactcgctcttatgaatctatgattacttcaattcataagatgggcttgtttggtcagcattatgaatttttacagcttaggtcagcagctaccgtatctcattctttatttcattcttatttcaatcttca

SEQ ID NO: 38514 - DNA, 3078 bp, Zea Mays
atttttatgcactgggctcacctgtcggccctccgctgcagctccagcccccagacccagaggccagatccccttccgtctcaactattccttcgcacgccgccggcacccgcagggccccacctgccagtgaaaacttctcccccgcagttccatctctccgtcgccgtcgtcgtcgcgtcctccgcgtctccggcgagtctagagagagagagagagagagagagaggaaggagggtggagggccgcgcccatggacgcggagcttctggagctgcagcggcagctagaggcggcgcagagcgcgaggtccagcgtgcgcctgtcggagcggaacgtggtggagttggtgcggaagctgcaggagcgaggcatcatcgacttcgacctcctccacaccgtctccggcaaggagtacatcacatccgaccatttgaagcatgagattaagatggagatcaagaagagaggccgtgcatctctagttgacttatcagataccctgggggtggacctttaccatgttgagaggcagtcacagaaggtcgtctccgatgatcccactctaatgctgataaatggcgagatcatgtcacaatcttactgggacaccgtgacggaagagataaatgagaagcttcaggagcgcagtcagattgccttggcagagattgctgctcagttacatattggatccgagcttgtcatcagtatcctcgagccgcggcttggaactattgtgaaaggaaggctagaaggcggacagctatacactccagcgtatgtctcacggattactgctatggttcgtggtgctgcaaggggtataacagtgccaacaaacctgccatctgtttggaactccttgcaacaacagcttcatgagatgcatggtgctagtggagtttctgtggaaggttcattcttccaatccattttcaatggtttgctaaaagaaggtgctgtactgggatcagtccgtgcaggaggacagtggacaccagctgttttcgcccatgcccaaaaggagagtgttgatgcttttttctcacaaactcttacattgggtacgacgtgcttcagaaacttgcaattcctcaacctaaacagttcttggaggcccgatatccagatggtattgcattggatgctgtctttgttcatacttctgtggttgatatgctcgatactgcggttggtgatgcaattgagaatggacactggattgattctctttcagttcttccatcatatattagtggaccagatgcaaccaaaattttatctatctgtccatctctgcagaaggctatcaagtcttctaaagcagtggtatttggagagtcatgtgtcttcagtaacatgtttattaagggtatttttgaccgacttgagaaagatatggactcgtttggtattagacttagtgttggtcaaggaagacctgtgaatacgaatctgggtagtgagcacaagacagggtctggtcagcactcggacacaaaagatcttggtggtaatggcactagcagtaccggtgcttcatcagacagagggtcaaagaagaaaagggggaaagggacagggtctaccaaaggtggatcacttgaaaaggatgatgacaatgaagaaagcattcctgttaagggcaagaaatctcacaggaaaaacaaggatgctggtgcatctggtgacataaaacatggtggtaaaaaaacgtcagagaaaatgatagaggagaatgcaaatatctttcctgatgaattgatagaagaaaaggttttggctgttgctccagagttagaagagttgggaggctctgatgactcaaatgccccccttaaattgttgtcttctcacctgaggccaatgcttgttgactcatgggcaaagaaacggaacaccatgctgtcaggaaatgctgaaagaaggcgacgcttgctcgataatctgcagaagcagatagatgaggctgtcctggagatacaactctatgaaaaagctttggatgtatttgaggaagatcctactacttctggtatactacacaagcatcttctaagaagtatgggcactccaatagttgacaaagttttgattacattggataaggacaacaaattgaagaatggaatggaggttgaggatagcgaagatcatgtccaattgagcactgctgaccgaagctctctggtatagttagcctatttttcattctgccatgtatcatgccaaggatcttcctagtgcattgtcattgaaggctcaagctttaattgaagcattagagggaaagaggtttgattcatttatggatgccttaagagatatactggaggaaagtggcttgacatttaagaagcttgataaaaggttagagaggacaatgctgcattcctatcgcaaggatttgacagcacaagtttcatcagagaatgatcctgttgcctttcttccaaaagtcgttgctttacttttcctgcaggcatataataaggctattcaggcaccaggaagagctgttggtgctgttatcacactgctgaaggataagctgccagctgcaacctacaaggtattgactgattatcacagcactactgtgaaacttttagcactacaagctgctgctactgacgatgaagaagattgcacatcagaccgaatgcgagaaaggaaggaggatctggaagaaaggctgatgccagaactgaaatccctggtcctcggcacaaacaaagagtgatcaacaacattcttgtgcataccggaccatttcggcgtacatatacaaagcaacactcagcttaaaagtttttttttgctctgtttttgcaatttgcaccgtttgaaagcaaaagatagcaggaaacaggtttactgattgtaagaatctgactagtttatactcccgtttacattcctgcactaggtttctactgataacaacaaaattatactatggtgtaatgaagagcatagtggatgttaacagggaatcagggatgaaagtagatatctgaattgttaggataatatatatatatatactctattcattacctagggtgatgatcc

SEQ ID NO: 38515 - DNA, 2470 bp, Zea Mays
ctccaatgagcatcatgcagaaagtgacatctatgatgttgttgaaagtcagagggaaacacaagatgggcagcttccaagaacacattcagttccagataccacatggactaaagcgaaatcaagcatgccaattggtgtgatttttcagtatatatggtatcagatgcgaagtaattatgattatgtttgctattgctgttttattctggttttcatgtggaattttagtttgttatccatggcctaccttggggcacttttcttatatgctctttgcgtgaactatggcccaagttacttgttttgggtcatcattctgatctacaccgagagctcgatcactgccaaagatggtgaatgggttccggtaacagaattcagctttcttagtgcaaggaacaacattgaagagaaacactgtgtagcttacagttggagagagaagctaaaaagtttgcccttgcctgtttttgatctcataaggatgattgttagaggcttatctagatactggatgtcattaacacatggagctgaatctcctccatattttgtgcaagttacaatggaggtaagccattggccagaagatggaatccagccagagaggatagagtctgccataaatagggtgcttgctattgctcatgaagaaagatgtcaggcaaacttgccttcctcttgccactgttgtagtaaagtccggattcaaagtattgaaaaaagcaaagaaaattgtaatatggctcttgctgtactagaagttgtttatgctgctcctgtagagtgccaatctaagggatggcacaaatctctcactccagcagctgatgtagaaagagagattcatgaatcacagaaagcaggattttttgaagaaataaattttccttacccgatcgtctcggtgattggtgggggtaaaagagagatcgatctttatgcatattattttggcgccgacttggcagttttcttccttgttgcaatgttctatcaatctatcctaaaaaataagagtgaattcttggaagtttaccagctggaggatcagttcccaaaagaatttgttttcatccttatggttctctttttcttgatagtggttgaccgcattatatatctttggtcctttgctaccggcaaagttgttttctatctttttaaccttgtgcttttcacgtattctgtcactgaatatgcttggggaacggagctagctcacagggatattggaggacttgtactacgtgcaatctaccttacaaaatcaatttccctagcactgcaagctttacagatcagatatggtattcctaacaaaagcaacctatataggcagttcttgactagcaaagttactcaagtgaattacttgggcttccgtctgtatcgtgctttaccattcttgtatgaattgcggtgtgtacttgattggtcttgcacaaccacatctttaacaatgtatgattggctgaagttggaggacatatatgcaagcttgtttcttgtgaaatgtgatacacttttgaacagagctaatcatcgtcagggagaaaaacaaacaaaaacgacgaaattctgcagtgggatatgcttattctttgtacttatttgtgttatttgggctcctatgttgatttatagtagtggtaaccctacaaatattgccaatcccattgttgatgtaagtgttaagattgatataaaggcacttggtgggagattaaacttgtttaagactactgcttgtgaaaaaataccttggaagtacttgaaggcctatgatgatgttgatcctctagattaccttggggcatacaatgtggatgacattcagctgatttgctgccagcctgatgcatcaacaatgtggttgatacctcctccagtccaaaacagattcatccagtcccttgaggagagagagatgctttttggaaagatggaacttattttaaattgggattttctcagagctagaccaaaagggaaggaattagtgcgatatgaatcccctattgaacactgcccgagtgtagatgatgttaaacgagtgcttaatggaactgcaaacagcttcagtataattgatgcttacccaaggtactttcgagttactggatcaggtgaagtccggcgattagaagcagcgatagattcagtaagtggcgaattgctattaaataatggcactccttggtggtcattctatgatacaaacccatcagatttggcaggctgtcaagggctgaatggtcccatggctatagttgtttctgaggagacacctcagggcattattggcgaaacactcagtaaatttagcatatggagtttatatattacttttgttctagctgttgcgagatttattaggcttcagtgctcagacttgagaatgagaataccatatgagaaccttccgtcatgtgacagggaagtttcctataaaaccattttgaac

SEQ ID NO: 38516 - DNA, 3277 bp, Zea Mays
ggcgtccacagggggcgacacccgtgaccctgcccccgttcgacatcagcgctcctccccccgaccaccgtcgatttggtgtctgagccctcgctagatctcgcaccctcaccgaagccctcattggattcgacgccctcactggaggttgcaccgcgatgggatctaggaaccgtagatggcctcgaccacccacgtgggttgttgcctctgcggatgagacgcagcgccaaggggccagaggaaacgacgtgatggacctcatatcacagctcatgtcatggttcatgcctctcatcgcctcccgccgtggttcgccgaggccgccccatgctgcacgccatgggcagcgatgtcgccttcacgaagctcggcatggagtgctaccccaaggaggccaccgctgttggggtcaagggattccccgacatggaaaaataaccgacgacgagatcaatgccgcctccgtcacttgctgccgcatctacctcagattgcagagctgagaacaccttgaagctaggagatgtcatccagtaccatgaatgtggttaccgcattctctataagaagcgggcaccgatccatgtgtagtaccagcaaacttcccattttctatgactccaagcaatggcagttgccgttcagtttggactatagaattcaattatgagttcagtttgttgatattaaaggaaagatacaggtcagcctcttttacttaacaaggattcatacttaaatttatctgatgcaatttttcaactgaacgtgaacttggcaggggtgagtacggagtagtgtacaagcgagttctgcattgagctgtcgtagagagcgtagacagacactctagccaacgttgttggctgggattggaacacaaaagcgagacaagggatgagaagcacaggaggagccaggtgaggtgaggtggcgacacacaggagtcgggcaagctcagctcatctcatctcatgctctactaaaaaggattagcccatctcaagagaaaagagtaacattgtcagcccactgcaataaccacactattaccagtcttgaaattcactttttgtttgtttgtcatagaaccagggattcatgacaggaaatgatctccttctcaagataagaaaattgcatttaagttactaatcagtgtatggtttactagtttggcggaggcctcaatccgggtctagaccaaggtcatggtggcgacgaaggtggaggccgaggtggagggtgatgcttccactctcagtcttggggtggggtcgtggggatgacatatgagagtggggtgcagtggtggctcgtcgacatcagccattggcacccttcccctgcccagttcgatgatgcaccctccctcctactacttcacgatggcaccaccatctccaggtaccgtgccgatggaggaaaggagaaacaaggtattttgaagattaagagtgatgccacatacttagcgatggggtgcttgatatcctagatattgtactagcttcagacctcgccgaattgacaccttcgaagaaatgaagtcgccagattggtaggctttgagtgtttcaccagaggaagtatgtagtgcagttaaggaaggaaatgaacttccatcagacttgatagacacactactaaagtggatcccaagcaatgatgaggagcttaggcttcgactgtcctcccatagcaccgccacaccgcatgcgtccgcggcggcgtccgcctcggcgccggtctcgcacaccgctccctagctggggaagttcatcgcctccgagcccttcaacgtggggggattcgattgggcgatctacttctaccccgatgggaagagcggcgaggatggcgttgtctacgtctcgctcttcatagccctggccagcgaaggcaccgatgtgcgcgcgctgttcgaggtcacgctcgtcgaccagagcggcaaggggcaagacaaggtgcatacccactttgggaggtctctcgagagcgacccatacaccctcaagtaccgcgacagcatgtgatgagtctatgtacaggttgtttcctacggtatgcttatctatggtggaaagaaaaagtgattgactcatacttgaaaagaaaagatggcctttgcccattgacgcctgagacaaccagaaatttgccatgacctcgttcctgaccaagaaaaactgtcaagcacagaatcacagttgatatattgggattccaaggtatcagaggctgatatggatgcaatgtggaaacatcctgatgtgtataaggagtggataaaatctggtgagagacgtggaaatgtacgattctcccatgatgcaaagaacatgccttacctttctcgcgtcgaggtgaaggatatgattgccttctcatgttgtgtatatgatggtggtgatgaggagaaggaaatggatgcagccagagaaataggttggagagggaaatttactaagagaggacgtgtaataagaccaggaattattagaatgagtggaaaatgtcctcttacacctttggaggttgggttaatgcttcgtggaatggatttcagcaataagactgcaatctttttggcatctggaaagatttacaaagcagagaagaacatggcttctcttcttgaaatgtttcctctcctacagacaaaagagacactggcatcagaagaggaacttgctccattcaagatggctgctgttgactatagtatttgtgcccaaagtgaagtttttgtgaccacacaaggtggaaatcccgcattttttatgggtcacaggagatacttgtatggtgggcattcaaaaacaattaaaccagacaaaagaaggcttgctgtactcttcaataatccacgtatagggtggacggcattgaagcggcacttgcttaatatgagagcatacagtgatgtcaaggggatcgaaatgaaaagaccaaacgaatctatatataccttcccgtgtcctgactgcatgtgccgcttgaacagaacagaacactcgaaatccaaacagagtagatagtatatttcgtatgtagaccaaatggctaaaaccatccaatattttcatagactgaaaatgcagagaaagcaacaaaggtgtatcaatacagtcgtacaagcttagtatcggatggtttttaatttgtatagcaaagcacgggcacatacctatatatcttttaatgtatgtaaatattcttaacctttaaaagatactaacaagcaggtataacgataattaatgtttctata

SEQ ID NO: 38517 - DNA, 903 bp, Zea Mays
ttggtacaagacataaatagggaacaacaaacgtcgctatgatatgtaaaatccgtgtgataaaatatcaccgtaacaccaatattatattaatgattggtttgtttctacatcagacatactcgcttggtttgtttctacatcagacaccagaccatctctcatgctaccagtattgacaattggagtggattcaccgctacatcatgagcatgcgcttttgcctgctatgcaatagtatggttgtccactacaattcgagacattagcttactaagtttacaacgcaacaacatggtgaacaaaggcaacctcattgttaattctatttgagtgaagaaccaaataaaggcacggtgggcggtttggtgagagggagccgctattgaggtcgcctgagccaaaggaacttcaagctgtccgtggccaacttgcttctgagcagtcaagatgtttcaaacttgaggttgatgttgcggaacttcgacaaaagcttcagagtatggatgcattggaaaaggaggtcgagctgcttcggcgacagagagccgcttcggagcaagcagcaatggatgctaagcagaggcaaagtttgggtggcatgtggggttggctcgctggaagcccgacaccagcagtttagttccgtgattcatatattttacttgtaacattatatatcatttgactgacaccctgtacaatttttttgtttggttatttacgacattcgtgttcatttggaccacacaaaaaataaggtgttccggcgatcgttatactcacaatcactcaaaatgtattctttaggtttagcaagggggtgttcatgttagtcgatatgctggttatccttttgacgttgtgctggttgtccatagatttttcgcttcacaaggggat

SEQ ID NO: 38518 - DNA, 3024 bp, Zea Mays
ccaaatccgttgctctttcccccttgcccccttcccagtctccactctgagcactctcctccgctctgctcctttgctccccacggcaaaccgtaaaccctagcctgaggggcacccctgtcgcagccatgggcgccagccggaagctgcagggcgagatcgaccgcgtcctgaagaaggtccaggagggcgtcgatgtctttgacagcatctggaataaggtctacgacactgagaatgccaaccagaaggagaagttcgaggcggacctcaagaaggagatcaagaagctgcagcggtacagggaccagatcaagacgtggattcagtccagcgagatcaaggacaagaagtgcctcttatgagcaggctctgatggatgctcgaaagcagattgaacgagagatggaacgatttaaagtatgtgagaaggaaacaaaaactaaggccttctcaaaagaagggttaggtcagcaaccaaaaacagatcccaaagaaaaggccaaagctgaaacaagagactggcttaataatgtggttagcgatttggaaagccagattgataacttcgaagcagagattgaagggctttcaattaaaaagggaaagcaaagaccgcctcgattggtacatttagagacgtctattacgagacataaagctcatataaagaaattggagtcaatcttgcggcttttggataatgatgagttgagtcctgagcaagtcaatgatgttaaagattttcttgatgactatgttgaacgtaatcaggaagactttgatgaattcagtgatgttgaggacctctatagcacattgcccatggagaaggttgaagcacttgaagacatggtttcacttgctccttctagtcttgtgaagggtgttgctcctgtttcgactactgcagttttgagcacaaagagttctgttgcaacttcacctactcagcctacagtatcaacagcttcttcacaaagtacatcacaggatcaaacagaggagacagcttcccaagaaagcaatcctgaacctacgccacaaacaccacctccaaaaggtggaaaccctggaccttcagtaccagctgtgcccattgttgtcagtactggtagtgcggctgtttctgtacctgcagaaacaattagttcccctgtgcgactaactgtacccgccacagcagccacagtgctttcttctgctattccacgaagtgctcctgagaatacacttgctgttacctcaattcctgcaaacttatctaccactttgaaggatgatgaaagcatgagtgttcctccacgacgaccatctcctgctactgaaattggaattggcaggggcataactcgaggaacaactagtcaggcattagcagttggttatgcctcttggtagtaaagttcaaccccagcaggttcccaggactaatgatgcaatcggctctgattctgctaacacaaatgaaaaccctattcttggtggaagagtattttctcctccagttgtttctggggttcaatggagacctcaagctgctgctgcatttcaaaatcaaattgaaactaatcagtaccgtggaaggcctgagatttctgctgatcacagggagaagtacatacagagactgcagcaagtacagcagcaaggtggcagccttctgaatgtttcccatataactggcataaatcagaagcaatttccaacaccacagccaaatccccttctacaacagagttcctctatatcttcccaagtgaatcttgggcttggagttcaaggatcagacgcggggcatataaaaagtgaagatcaacaaattttggctgaagatgttggtgtggaatcttccgcaacaacaggagcaaataaacaaacaagtgaagatgacacaaagattccatattcgaatccttcagcacctgcagcagaaaacactcagctgcctagggatactgatctatcacctggacagcctttgcaacctggaatgccatcatctggtgttggtgttatcggccgaagaagtgtatctgatcttggtacaatcggagataaccttactggaacttctggtagttctggtcatgatcagaattattatctgcaaatgcttgaagctgcattccacaagcttccacagcccaaggactctgagcgtgctaaaacttacattccgcggcaccctgcagttacccctgctagctacccccaagttcaggcatcaattgtatcgaatcccaccttttgggaaagaattggtagcgacacattagctaccgacatgctgttctttgcgttctactaccaacagaacacatatcaacaatacttggctgctagagaactgaagaagcaatcatggagatttcaccggaggtacaatacctggttccagcggcatgtggagccacaggtcacgactgatgagtatgagcggggatcatatgtatactttgatttccatgtcactgaggatggctcaggatggtgccaaagaatcaagaatgacttcacatttgagtacaactacctggaggatgagctatcagtacaaacaaactaaagtgccatggcagtaggtctggtcaaacctttatgtccaatttgaattttgtagttctcataagagcttgttcggttgcttctggatcaaagaaggttggaggggattaaattccttctagtcaaaattgaatagaaattgatttaacccccctcaatctcctttatccagacgcaaccgaacaatgcctaaggtgactgactgactgttataatctggacccttgacaaaatctccagctgtaaactaatgtgtgaagttggatgcaccgaacatgctgaaattataatcgtgttatgccagccgaatctgtttgacgcagctgtacattgtcgttattatctggatgcgcctgaaaaatattttggatctttcttggcgcctacctgtttatttttagctaactcctggctggcgctttcgatctttctggttcgtttttttatcaaaaaaaa

SEQ ID NO: 38519 - DNA, 1029 bp, Zea Mays
catatataggcatggaaaatctaagattgcccgtgagttgcgcttgagggatattggtggcattatcattgtggattttatcgatatgtcagatgattcaaacaaaaaactagtatatgaagaaatgaagaaagcagtagaaaaggatcgatcaacagttggtgtttcagaactatcaaagctaggtttgatggaaataactagaaaaagggtccgaccaagcgttactttcatgatcagtgagccatgtacatgctgccatggtactggtcgtgtggaagctcttgacacatcgttttcaaagatcgaacgtgaaatatgtcgacgtcttgctgcctctcgacgaaaatcagaccctgagaaaccaaaatcatggccaaggtttctgcttagagtggatcatgagatgtgcacgtatttgacgtccggaaagaagacaaaactaggactcctgagtagctcccttaaagtgtggattttgttgaagattgccagaggtttctcccgtggcgcttttgaactgctaccgtactcggagaaggaaaactactctatggagaaagaaacatcagagttgccccaaaaagagtccaggcccaagctatctgtctttcctatcaagaagtggatgagccgggccaagcgtgctaagtgattctcttttattagcatggggccttcctttgtattcacaacttagaatgagtaaagattcaggaagaggatcattcttttcgttcatgaaatctcagcgtcggatatctagagatctctcgaccagcttttgtttacatttttttaggaattcagacaattccatgtttagtttaatccagaaaattttcagcaaaaatgtgacgatatatataactgtgcaaatctagtacccttaatagtagtagatctcttaaatggttcttagtgttaccataagatacataatatatttatcatgagaagactacgattactcttttaagttactacattgttatgctccttaggatttgcttatgaggttcctcgtga

SEQ ID NO: 38520 - DNA, 1945 bp, Zea Mays
gcctctggttttcttccgcaagctgttatctctcgcacgcaaacgactagcgcagcaaacaccccacctcgctcgcgatcgcggcacggcggcggcaatccaccgcggctcgctgccttcgccagtgatctggcctcttcgagtttcgccatcagataatcatccccagccactcccctcatctcccatcccctcccttccccttccgctgaatcggcgcggagaggatggcgtcccggcggggcagcagcagttgcgcgctctgcgagggatccaacctgccgtcttgttgcgcctcgtgcgtcaacgcgaggctggtcgagtaccacacgaggctgcgcatgatgaggagcctccgcgactccctccacggccgaatcgccgcacgcctcgaagccaagatgagcagcggatctggagaacaagcaaagaacaggatatcatggagttgaggaatcggctcactgaattgaagagaaaaactgccgtagacaagaccgaggtcgagcaggcatcgagtgatcttaaggcaaaaattgtgccattgaatttggctcttgccacgctaaaaaagagacgagctgatgcagtggccatgcacaccaatgccatgaaagttgctcagatgaatctcatggcaaccacctcagattgtatgaaaatgcaatcaaaatctgtaaagcaactttgcagattgtttccaatgcgacgagtaattaaagagggagaaaagaaagacggctacaatggtccgtatgattcaatatgtggggttcgtcttcctcgtggtcttgatccacattctatttcatcagaagaactgtcggcatctttggggcacatgctacatttcatcaatatagcagttcgtatcttatcagcacctgctcttcatgtatcaggctgtaagggctcatgctcaaatatatggcagcggagttcctactggagcacacgacagtcccagagcaaggtttaccctctttttatacctaggaaaaatgtttgcacaggtggtgaagaaacttcattgacagaaagtggctcgagtaactttggggttgactctgtggattctgtcaagaaaccgtcttttgatcccaagagaagcaatagctttaacttttctggtgcatcttcccactccatggagaggcatcaatatttgcagagaggaatatcactattaaagacaagtgttacagccattactacctactattacaactcactgggcttggatgtgccatccaatctttctacttttgaggcgtttgctaagttgctccatatgttgtcgtcatcaaaggcccttcgaactgcctttgaattggacattgcttcaaggtcagagaagcaagcccagcagctgaacagatcgatttggaaggcaagttctgccatatcatcggacagcagttttatggacagcatgcacacaaccatcatgcccagcactctggacaacctcctcatgaactcagacgagagcctgtacactggtaagctggtgaagcatggtggtgcgccagatagcatatttgacagctgggacatagtagagcgtgaggttctaccaccaccaccctcgcgggttgaagacgtcgctcagtgggaatgggccatgtatgctggcagcaccaaaaagaaatgacctctatttacaaatcctccgtgaagcccaaactgttagacactgcaagagcttcagtttagatatgctccggtcccatgtacagtatcagtccagacctaacctcgccctgtggggctgacctgtgaatcatctatactgcaagaatgcacataggagaattgcagtgtagagttgatttgctgccatctctacatcagtacgtgtacatgagggcagccctgtaaatttgtaaatataacccctgtaccgtttagaaatgaaaataaaatacttggaatactgtgtgcc

SEQ ID NO: 38521 - DNA, 1338 bp, Zea Mays
cccctatccgcgagctaagctttcaacagaccacgtggatctcgcgtccgccaacaaactccatctagagattgcagagaccgtcgtcccctgggccataaaattcgtgcgccatggccttctatcccattccttcgccgttcctcagtcgtcgatttccagagagagagaaaggatgtccttctgccaggaacttggcggctccgcctcgggctcacgactgcgtgctactcggtgaaattaaaggggctagggtgtgtcgtcgaggttcgttgtccacgagtgtggtttgcggtggtcggaaaagcacgaggttactggggatttctcgccggaggtcatttccgtcgcgacgtcgaggacagccttgcgcccaccgtctcctttgcaatgaggttacgagtcacttgaagaccaaccttgtacctggaatctcaagtctaaggcaagttgtgcccttgatcacttttctttacccaataatgttcatgttaatcactgtgacatgctcaggttaatttgatgggacataattggtttccctagacttgtttattccacaccttgtttaccattgaacttttgggtagttttgctattgctctgcattatgatcattgttccagttatactgttgttttagttattgttcgtgacaagatcattgtgttaattggaacatggagcttaacttgagatatccgtgctaccacaagggtggaatgggacgtccttcgctgactaattaggaaagctagtggagtactaccttacccaaaaggggcaagggtagtagaggagttgtcgatatagggaggttctcgggtcgatcatgctgcgatggcttgtcggacggggaattcctatattgcgctccctagaactgtagcgggttttctgaaggtagtggaaatttttaaaggcctcgtagtgcatccctagtcattcacctcagaagtgtctatgggtctagctaagcctggctcgatgggatacacgacttgtgggtaaagggcgcaacctctgtagagtgtaaaactggtatatcagtcgtgctcgtggtcatgagcagctcaggactctcgcatgattaatttatagaactaaacttaatatgtcatatgcattgcatcgcgggtgttattatcaattttgatctcttgcttaattaggttggtatctatttatacttagtaactgctaataaaattttgaccaactttaaaagcaatgctcaattttagtcgtctcctttgataagccttacacttcacatgagctcccacctttggtgagttcatgcacattattccccacaacttgttgagcgatgaccgt

SEQ ID NO: 38522 - DNA, 2172 bp, Zea Mays
cggacaccggtgtctgcttggaccaaatccgatctcgtggccacggccagaacacacctcctcacgtccacctgacctcttgctcctccccaataatgcccagtgcggcagtgcctgccaccgtctaagcccaccccaagtctccgccgtcaacccgtcctcccccatggccgccgccgccgccatctctctatccttccactttcgtttccgcccgccctttccatctccacgtacccccacgcgccacgctcccttttccttgttctccccttcccttcttgccccctgccgcctccgcgtcgctcccggccgcccctcaccgtccccgtggcgccccgacgtgcgggcgcgcgctggaagcaccatcggggcggagcgcgcgctccaagcactcgccgccgacactgaaggcttcctggaggtatcggaggacggggaggtgctatacgtcttcccaaaggactacagggcaaagctggctggcaaatcgtttaggatgcgggtcgagcctctggttgacaaagccaagcaagtgggtgcttatctggtacgtgtttcatttggcactgcgctcattgcctcaattgtgctggtgtacactacaatcattgccattctctcaagctcaagtgatgaagatggtcgtgggaggcggaggagatcttatggttctactatcatcattccgacggatatgttttggtacttggatgcagattattatagaagacgtcgagtagaaaacgaaaatgggatgaactttattgaatctgtaatttaaaagggtattttcatttgtgtttggggatggtgatccaaacgatgggcttgaagaaaagcggtggaagatgattggacagtatatttcatcaaatggtggagttgttacagctgaagaactggcaccatttcttgatgtgccacctccatcagaagagtccaaggacgatgaatcatttgttcttccagttcttttacgctttcagggacatccagaaattgatgagcagggaaatatcctgtatcgattcccatcgctgcaacgtactgcttcatcaaaaagtggtaggagcagggaatatgtgggtaccaaatggtctgcaatgtttagcggagttgaaaagtacttagaggagaaaccgtggaaattcagtaaagcgaatgcaacagagaaggcgatggttgctggtttgggaggactcaatctctttggtgtcatcattcttggaaacttgttgaagcaaatgacagtgacacctggtggactaatctcatttgccgcacagttatatcctttgcttcagatatacgctggctccttttttgcaatacctttgtttagatggtttctgctacgcaagaccaacaatggcattaaaaagaggaataaggccagagaacagagagctcaggagctcgtgtcaccagattcttctctaagaagaaagttgctcagtgcacgtgatatggctgaacggaaagtaatcacgccagaggagattgtctatactactgaaaaggatctattggagcaggattatgaagtcaaggagtgggagaggagatttaaggagctcgagtcagagtgatggacatgaccgatatacttgacacttgcagtagctctacatggtcctcaccatacttgtcggtgatttttatccgcatccaacggagtggaagatggatctgactgaaccactcgagcaagcgaaactggatggtactggacctcactaattgtcgtgtcaccaccagcccaccactgaccacttcgctatggaagttttgtggaagctgttggtttaattggaaccgaccattatttgcaagatgatgttcgtatctgtgccattgacctgcatatatgtatagttccaatcacggatcaaattcagaatttgacacgaaaaagaaaaaaaacagggaatatggctaggatgctactcggtttgaatggagtccaatcaaaacatgtaaaaaggtcagcctgtgaacagggactcagactgtttgctgcggctttaatccactggctcctaacagtgctaggaatagacgtactgttataaaaacttccaggtggaccaattcacgatgggaacctaacattttcttgcattaagctgaaacgtgtatctcctgcctgcgtttgtcattgcgaacgag

SEQ ID NO: 38523 - DNA, 3699 bp, Zea Mays
ttaccctccactttccatgactatctcatcattctgaaggtggtggaaaatgggaatcttacggaacgcaggaagtggttccctgacattgaacctttattcaagcttctcagctatgaaaatgtgcctccatacttgaagggggctttgcgaaattcaataactgcatttataaaagtgtcacccatactaaaggatgcaatttggaattatcttgagcaatatgatcttccggtggttacagctccattaggtcaccatacagcaacacaggtctatgatatgaggtttgagttgaatgaagtagaagcgagaagggagagttacccctcgaccatatctttcctcaaattgatcaatgcacttattgtggaagaaagaaacataagtgacaaaggccggaggttcatgggtatctttaagtttgtttatgaggatgtctttggtccttttcctcaaagagcttatgctgaccccctggaaaaatgggagcttgctcttgcttgcttggagcattttcgcatggttttgagcatgtatgatataaaggatgatgatatttatgcttctgtgaacacattagctccttcctctcttgagagacaactccctctgctagaactactcaaagatttcatgagtgggaaagttgctttccggaatattatgaacatcatattagtgggtgttgactctattatcaatgagcgaactacccaaacatacggtatcattttggagagaactgtccttctatctcttgaaatatttattcttgtcatggagagagatcttgctcttgctgatgtttttcggccgctctaccagccattggatgttatattggctcaaagtcatagacagattgtagcattgctagagtttgtacgatatgattatcttccccaaattcaacagtgttctatcaaaattatgggcatcctaagttctagaatagttggtttggtacagttgcttttgaaagctgatgttggaaaaatggtaatagaagattatgctgcttgcttggagttccggtttgatgattttcagttgcttgttgacaatatttgtcgtccagctccaaacattacacatttgctcttgggattcgatgtcaatgggtccattgagcaaacagttctaaaaccaaaatctcaatacagttgtttgaagataatcttggacaatcttgaaaaagcgacaaagccggatataaattccttactgcacgaattcagttttcagcttctctatgagttatgtcttgatcctttaacttgcggacctgttatggatctcttgagtacaaagaagtaccagttcttttctaagcatgttggaaccattggagtgacaccgcttccaaaaaggaacagtaaccaatctcttcgaatcagcatgctccatgagggaagcctgcatggctattctttatcatacttttggtcagtgtgctgagaacttccagagcacaagcttgatccattcacatgatgctttgactagcattagcgatgtaccagcaaagaggaacaaggttttggacttgcttgaggttctacagtttagatgtccggatacttcaacgaagtatccacagctgctttccagcttgggaatcgaatcgaagattgaagagatcctaaggaactctgccactttcgaaaatggtggtgtatattattattcagagagaggtgaccgactgattgatcttgatgctttccgtgaaaaacttctccagatttcacaagaattgaactcacaattaaccgagcctgagaaagctggactaaaagaatcagttcatcatttgctcaaatgggcgtggcgatataacaaaaatcttgaagagcaggctgcccaacttcacatgttgactggctggtcacagattgttgaggttgctgtatcaagaaggatgtcattattcgaggactgttctcagctattgtttgaactgcttgatgcttcgttgaatgccacaacatctccagattgttcagtgaaaatggcatatgttttaactaatgtatcgttgacctgtatggcgaaactgcgggatgaaagattcatatgcccagctggtacagattctgatgcggttacttgccttgacattatttcgtcaaagcagctaccaaatgcagcttgtaactcattgttattcaagcttgtgatggcaacattaagaaatgaatcatctgaaatcttgagaagacggcaatatgcattattactgagttattttcagtattgtagcagcattctggactctgatgtccctccatctgttcttcggttcttgctactggaggagcaagatggtgatgatgaggacatcactcttcaaaaggttctcaaggagcacaatgaattagcacatgccaacttttccatcataaggaaggaagctcaagctatcgttgatttggttactaaggatgctttccatggtagtgaagctgggaaagcactttccttttatgttcttgatgcattaattagtattgaccatgaaaagtattttctaaatcaacttcaaagtcgagggatccttagatcatgcctgagtgatgttgcaaactatttgtcaaagggccagtgtttgaatccacaggcacagaggcgggagcagagcctgcgctctccatcattgacctacaaagttttggtactgggcttcactctggtttttggcccatctacagtagcccgccccttcaaaaaccctcccagccaccaggacccctcccagccgccagaaacccgccagaacccttcccagccgccagaaaccctactcctctcctctgtcctctctggtttctgccgacgtctctgctccagcctccaagtgctccagccagcagagaggcagagagcagatcagccgagggggagggggagctcgccgcggaagggggagggggtggagcctcaccagggagcaggggaaggggacttcaccagggagggagaggtcgcgggctcacggtatggggccgccgccgttggtgaactgagagctgccgtcacctggacctcacgtgaagccctaaccgcgtccttctctggaatcacatcaccgttgttaccttgtttggtgaagaacaagattgtacgagagatagtggacttcgcaaagcagcatcagtcagtttttaatagcattttaagggagaacatgactggaactaatttgctcacgttggagcagcttagcatggcggtttctattctcagcaaggtttgggcgtatgaggaaaatgaggaatgcagctacattcaagatctattttccttgatgcattctctttttagcgttgactttgggattctaaattttatgcaatcaccaaacatgattgagaatcagaagtcagaattgatagcatttggtctttgcttcagccttgtctcttacctttatgttctcgctacaaggaaaaacatgcgatttcaagtttcatatggccgtaacagtgatcagcagcacccaacactacaaatggtttctgatcttctgaattcagcaacacttgccctagaaagagttggtgaagaaaaatatatgcttttaaacaagatccgtgacttaaatgagttgtccagaaaggaggttgatgagataataaaagtgtgcatgaagcaagattgcatatctcctaacgataacatccgtaaaagtttttt

SEQ ID NO: 38524 - DNA, 1176 bp, Zea Mays
gtccgcgtgataaagcgccggcgcctcttctcgcgtggcctcccgaaggttctaggctcgattgaacaaattggagcggcactacactcctccacgcctccacctccagcctcccactgatctggcctctctcgaggtgagcgcgcctatcaatatgagaaggggctacagttacagtccttcaccaccaaggggctacaggagaagggcgcgcagtccaagtcctcatgatcattatggtggtcgtggtagggatctcccaaccagtcttctggtcaggaatctccgtcgggactgcaggccagaagacctccgtcgcccatttggacagtttggtcgagttaaagatatatatcttccaagagattattacactggggatccccgagggtttgggtttgtccagtattatgatcctgctgatgctgctgatgcgaagtactatatggatgggcaggtagttcttggtaggcaaataacagttgtttttgcagaagagaacagaaagaagcctcaagagatgagagctagggacagagtcaggggtcattcttatgatgacaggaggtattctcgctctaggtcgcctcgttattataggggccgctctccttcacgcagccaaagctactcgaggtctccacctcagaatccaagacacagacttagagagaggtcctactccggctcacctgtggacagcagatcaagaagtgggagcccttatgaggatggatatcgcaaatcatcacggagagagaggtctctttctgtcagcggatgaagcagttttacggtctagagctattgctgtgaatctgcgcatggtggcctacttgctatgtctttctgaaccatatatgttctgtctagattatcattcccagtaccagagaagtatcgtgagactgtttgctgtactttctagtcttgaggatacagaagggggtcaccgattctctcagtagatggactattgaccactagctacgccagttccactgctttgtgtatttacaggcagctttgcggtttgaataaaattgtttgcatcgtgaaagctaattggtaaaaagactgaatcatgaaacgaacgttttgcatccctgttccctgatggcatttggatacgattttttgttctttcgacgaacaatttggcaaatctgcatctta

SEQ ID NO: 38525 - DNA, 2521 bp, Zea Mays
cgaacgcgtccttaaccgaaatggcggaatcggcctcgcagagggatagccggaggcccagaagcgtccggaaagacagcgcacgaagcaatctttccctttccccaagatgggattcggcttcgttcgtctcgccgcccgcgccgcggtttctcgccggggcatgacgccagcaacctccgcccgccgcgcgctcgccccacccgccgtgccggcggagccccgctgcgggccccactggctcgtggccgcccgcggccacgtgggccactcgcaccaccgcggcggggaggacgagggcgagacatccgagaggatctttcgtctgggactcgccgctgacgtcgtactcaccgcggggaaggccgtcacaggctatctctccggcagcaccgccatcgccgccgatgccgcccactccctctcggacatagtgcttagcggggtggctctgctgtcttacagggcggccaaggctcccagagacaaggaacatccctatgggcatggaaagtttgaaagtttaggagctcttggaatttcaagtatgctgttggttacttcagggagttatgtcttctgctcctgatataattggcaatacattgcatgcacaccatgaccatggtagcagtgggcatcatcatggaatagatttggaacatccagttcttgcattgagcatgacaactttagcaatatctatcaaagaagggctatactggataacaaaaagagctggggaaaaggaaggcagtggtctgatgaaagctaatgcatggcaccatcgtgcagatgctatttcatctgtcgttgccctagtaggggtaggtggttccattcttgggttgcctcttcttgatccactagctggacttgttgtctctggcatgattctgaaagctggtattaagactggatatgagaggggggtaagacagccctcgggcattatattaagaagaagctctcacgcaggtcgagaaaacccccgaacccctgccccacccatacacagcggcaccgtagcccatgtgagaagcgaccgggacgggacggcgggaccaggaccaggccttagacctgtgctttggcgtgggacagccggggagatttttgtaaccacaccctgaaattcgctcccacggggagtcgaacctaggacctgaggagtgctactcagaccgcctaaccaactcggctagaggctcttccacactgcaatctgattacatctgttgcttgtattaagtgattatttttctgtacttccagaaatattattgtcgatgtgtagctttctgaagccaatggctgaaaatattcatgaaataaaagatgacatatgctcattttctgtgtgcctgcgctgctaggatcattgctttttcagtctcattcagctgatatcacttttgaacctaataagcacaaacctttcaaatattaacaaattattcttatatacaatttagtatacatgatgcttcacctttgtagtttgcatgatgttacttatggtgatgattctgcttgtttcgcttgcagtgttctggaattagttgatgctgctgtggatccttcacttttagaaccaatcaaggaaactattttgagggttcacggtgtgaagggatgtcatcgattgaggggaagaaaagctgggacatcattatatcttgatgtgcatatagaggtatatccttttctgagtgttagtgcagcacatgatatcggtgaaactgttcgtcatcaaattcaaaaggagcacaatcaagttgctgaagttttcatacacatagatccctcgtacttagtaggcccgaccatggacctaaaaaggatcctgaaggactctgatggaacaaattcagaagctatcccacggcaacaaagtgcagaagccatcgtgtctaatattatttcatctcatttttcggagaaaatggcgctcgaacatctaatgctgcattacgtgcaaggaagagtgttgctccaggtccaagtttcaatgtctccagaaattttgattcgggatgcaatggaagtcgcgaagcaagccgaagaggagatactcagggctgatgccagcataagccaaatcagcttgcagctaagattgggccaacaaatcaagcaacttcagctagcatcgcaagaacgtcgctgatctacatgcaggagatcactgatccatttgctggctgcttcatgagtctactcgggagtatttccttttgctaatttttctgacatacatgagcttggtctgctgatgaggcagtaggctataggattctaggaaccgactgtgtacattgtaatcagagtgttcggagacgtgaagctgagtttgtaataatacacaagcagccttgctcagaaatgtactgggcaacaaattgtctgccacatactgtcaatgtaaaatgtatgaacaagttcctcactggccccgctataataacaacgaaccatggctactgatgcaaaataaaatgaatattgttttttttctgtg

SEQ ID NO: 38526 - DNA, 1524 bp, Zea Mays
ccgcctccgcctcccccgccccgcccgcctgcgccctcgcccgccgctgcattttcggtggcctcgccgcgtgcggccgcgagaagtgggaggctgctgcggtcctcgcccgcgtctgcccgtcgtctccacgtgggggcgtgcccggtaccggcgcgacgagaagccttacgcctgttcaagacgtcaggtgttggtatttgggttgcaattgagtgattgggaaacctgattggacagaagcattgttggtcaaccaatgggaagcaatgaccctagcacaccctccaaggcttcaaaggcatcaaaacaagatcaacctccagctaccacatccagtggaacagtttcagtttaccctgaatggcccagctttcaggcataccaagcaattccaccacatgggttcttcccccctaccgttgctgcaaatccacaggcccattcatacatgtggggagctcagcccatggtaccaccttatgggactccaccaccaccttatgtgatgtatccacctggagcagtatatgcccatccctctacacctcctactatgcatccgtttagtcattaccctatgccaacaaatggacatgctgaaactcctggaaccgcgccaagtgctccagaaatgaatgggaaaagtgagcctggcagaacatctgctccatctgccaatgggattacctcgcacagtgagagtggaagtgagagtgagagtgaaggaagtgatgccaattatgaaaatgattcacattcaaaggacaatgatggaaaggaagatggcaattctcagaatagcatatcttattcagcatcacaaggagtgttaaaccaaaccatggcgatgcttccaatacaaccgggcgcaatggttggaggagtttctagctccacagctaacttgaatattggagtgcactactgggaagctccaggttctgcagctgtctctgcaacgcatggcaaagcaccagctggttcagctcggggagaccaatgggatgaaagggaactcaagaagcaaaaacggaagcagtctaatagagaatcggcacgcagatcccggctgcgcaagcaggctgagtgtgaggagcttgggcaacgtgctgaaactctgaggtcggaaaactcgtctctcagggccgagcttgaacggatcagaaaggagtacgaacagctactttcgcagaacgcttcactcaaggaaaagctggggggcagcagtgacccgattcctgatatgaatgaacagaacgacggcaacggcagcgacaagaagcaatctgattccgatgcccagcctgggagcgagtcttgacccgtttagctcaggatccttgggaatgcacattgctatttattttctcgaacatggttgaacagaacataggagaaaaagaattgtttatgtaactcttaccccttgactgcctaatgtctctgacggcatgtatataatgtatgccctcactgctgaactagtactagtaattgaggaattgcagatattgacagctt

SEQ ID NO: 38527 - DNA, 2859 bp, Zea Mays
caaccccatgcgtcaagggatcaaaccatggcgcgtgtgcacatcgccaccgtcggcgctgcccagtcaccgcgccgacggcgaaatatattccggggtcccacgtggaagcatccggaggaatacacggatacacctccgcctcggtccatcgcaactgcaatcttctgctccgtcctgtaggctgtagctgcagcctgcagggagcgagccataaaggagactacgtagcggccgcggagcgcggggacgacggagggagacagacgggcgcggcagggaccagggagccagcagggctaggcgacgctccttccagttctcctatccatgatttcattctgagacattcacatgcttccatgtgattgaccttgtccctaatgttctgatcaagattgccatggttgaaaggctatagtttcttatggtccatgtccacgattcaagaataaaatattgtttggcccatccattgtgataatggtctggttgcaagaccagctggaaatgcacaagttccactgtgtggcggcgaaagatcagtttaagctggatgaaaataattgccagatcgaagaggaagaattttgaaagaaaccatgaggttcctactgctgaacatgtttggaacacagaatcattgattcgtgcaaaaggaatgatgtgctgtgtatgcttggaatctatctcacctgctcagccccttgggcagatgatgacatcagaaaatatggttcaccgctgcaatgtttgcggtgcagctgcgcacataatatgctcttcaaattctcagaaagactgcaaatgcatctcaatgtttgggttcaaacatgtggtccatcaatggactgtactctggacagacatagctgaccaatccgaagaaggccagtactgtagttactgtgaggagttatgcagtgagtcttttctgggaggtcctcccatatactgctgcatgtggtgccaacgattggtgcatgctgattgccagtctgccatggctactgaaaccggtgaaatttgcgaccttggtcccttcaagcgccttattctgtcgccactttttgtccgggccattagcaaacctggtagcatcttgagttctataactcatggagcaaatgagtttgcaaccactgtgcgggggcgtttaaaccgaactaaaaaggagaagcatcagaacagattttcatctgacagcaacgatgattcatcaagtgataccacgttgaactcaaaccagagggctggagaattaaaaacaattggcgacagtgctcaaaggagtcctgagaatgagcatgatagcagtgagagtgatggtagagaactcatatcggagtccagaaggctcggtaatgatgagaccggtgaagttaaacttaagtacgcattgtctgaattgcctgctgattccagaccccttctaatttttatcaacaagaaaagtggggctcagcgcggagatcttctcaagcacaagctacattttcttttgaatccggtgcaggtttttgaattaagttcttcacaagggccagaaacaggattatttttgttcagaaagctggcactggcaatgatctttcgagagttttatcatggggaggtggcctaggtgctgttgagaagcaaggtggcctttgcacaattttacatgacatagagcatgcagcagtcactatccttgatagatggaaggtgacagtagaagataagaaatcaaagaatgtgcttctagtaaagtacatgaacaactatctcgttgcccttgacattcataatctccgtgagggaaatcctgagaaattctacagtcagttcttaaataaggtgctatatgcgagggaaggggccaagagcatcattgacagggcttttgtggacttaccatggcaagttcggttggaagtcgatggcaccgagatcgagataccagaggactcggaaggcgtgcttgtcgcgaacatcccgagctacatgggaggggttgacctgtggcaaaacgagggtgaggatcccgaagattttgacccgcagtcgatccatgacaagatgctcgaagtggtcagcattacaggagcatggcatctgggaacactccaggttggactttctcgggcgcggaggatcgcgcaaggccagtcgatcaagatacagatgtttgcccctttccccgttcaagtcgacggtgagccttgggtccagcagccctgcacgctcaagatatctcatcacgggcaggcttttatgttgaggagagcagttgaagagccactgggtcatgccgctgctatgatcaccgacgtccttgagcatgcagagtccagccatgtaatcactgcttcgcagaagaaagccctcctccgagaaatggctctacggctgtcatgaagcaagcgccgctcattcggacgtcgcagaagaacggtttcctgcctctgcctgcacatcggtggttagtacgaggatctgtgatctcaacatgagctcgatcatgttgttagcagaagatacaggcccggagggacgtgtccacgtgcacatagagtttttttttttggggtcatgttcacgttttggaaatagcgaggcaatgttgtgtgcagctatgtatggtgtgtagacctcgggtaagccagttccttccttctgtgcaaaactagttacgcctgcggcctgccattccgtgttaggttgactggatggatttttagggctgcgtcgctgccacttcggttggtgccccatatgtaaacgagatgggcttgaatgcttggttgtaacctttttttttaatgataggagctctgtcctttaattaagacgaaagaaaacatatgtacaagaaga

SEQ ID NO: 38528 - DNA, 2521 bp, Zea Mays
gaatggcccaagccttgatggtagctttgttagactacattgcaatttttacttgaatgacatgtatgtttaaaggacaatggtgaagataattctaaatgcatgcatatagaagctttctcttcatttggtcatatattcttcaaggcctgaaatattagagagttacatagctaaatgtactacatgctacgtgaaatggtacatttaagtagagtgcaccccaataggctttacattgcacttgcgtaagttttctccttttcaccagcacctaatttaccacaggtggaacaaataggtaatcttcaagatgaaagacaagatcgctacacaatgcacacaatagctcaggctcatgtgtgtgttgcatcccacagtctcatgcgcatgtttacttacagaagttcatgaaaagacacgtgcacttgtaagttgtaaccaccttgaagaagctaaagtaaaacaacatgtgttttctctaattacaacacattatgttctatcatttttttgtaaccttcacattttctgattttgaaaacctggtaaatgcgtcaaccatcaaactgtaaatttactaatcccagtccatgtatagtgatgccattattttgtgtcaacctaagttatgagtactgtgaacagataaatttatttgcctggtgtgtttctgcaagttgcatttgttttgcttctggttgctagatgaaaacccttgtttctgcactaagggctgctgtagtgctgttgggtacttggatgtgcggtgtaccttctgttactctacattgttttacttatgaaggtcgaatcactgtctggatgatgagtgaactacattttacatttttgagtttgttgagttatattgtccgtggacaagctgtatctggatgtggccaaccggcttcaggggctcatgcggctagcacaaggagcaaacaagcaacaaccttattctgagttgctatcattatttgttagttagctactagatccatttggtagtattttatcatcttgctgctagtatgtggttagagagggcatgtgatcattagttggaacttggcagactagaagaatatcaatcaatattgtcctagtcccattctcctacccttacccttgtggtgtggttgccggctatcagcgatgtcatgctgctgaggttcagggccatctagaccagagtttatcacaacgatatagttcgctactgtgacacagtttgttttgtagtgtatcgaatcctcgtgcaagacccttctcatgtttatccttactgcaggaggcttctggatacttcttctgcctagaggaccgtgcactactttgtagagactgtgatgttgctatacacacagtgaattcctttgtttcagtacatcagagattcctgctaactggagttcagtaaatcaaccagtgagacatcagccaaagagaagcccgacagttcaattttcagttgaagggagtgcttctgttcctactaaaaatgtaacaaatggagattgttcaaggcagaattttgtcccaacagccaggggagaagtggttgattggactatgaataatagtacaattcggtcagtagaatctccgcctaagtacatttcagaggaaagcccgacacttctgcaatctagccagaccacaacagtcttctccaaccaaattaatggcaacagtgatggggcctaccacttgtcattctcaggtggtaatgtgacagacagcctaccagattggcccgtggatgagttcttcagtaactcagaatatggtccaaactttggcttctccgagaatggttcttctaagggtgataacgctaagctggggggcgctggtggatctccacaatgccgtttggctgaaggctcagttgctgaggaactattagggcaggtgcctggattgatcaccgatgaatatatgagccgagtacctgagaattcatggacagtgcctgaggttccctctccaccaacagcctcggggctcaactggcacgggaatttgtgtttccctgcgtatgacagcaccatgtttgttcctgaaattacctcccttcagaactccgaaagtcacttcaccgtaccttccagtttcaagcgccggagaagagagtactgagaggcgacaagaagatcactagacaccactgtccggtctaggctatcttgagaaaggcttcttggtgggctaaatgacgaaagaaaatatccaggactgggtggtcattcaaacatcaactgagctatccagtagccaggttttaagtgtgttgtaatgcttcaatgtgtttcattttccaaagacctgagcttcgcttgtgatttgttccgagctgtacggtgtcgattttgtgtatataatataatataacgaaataaagggtacccagtatgagtatgatcattccgaaataaagggtatccagagtatgagtatgagcattcgcgagtacatcgcacactggtggtggcacatgaagttacttctgcaatac

SEQ ID NO: 38529 - DNA, 4076 bp, Zea Mays
agtattggtgagaatatccagaaggaaagccaaatgcccatggatccaagtgcttttcaaataatagaatgtgccgaagctcctaatacaggagttgttagtagtaagtttgctctgaatgtagcatgcgatagtcccatggatttaaatttgacaaatgttgggacttcagataacatcctgtacacttcagagtttgctgtaccaggtcgaaccgaggatagaagcatgcaagttgattttcatgatgcgaaagctgctttacataagccaaatcttcccctggaagtagtggatacagatacccatgatctgcagtcatccagaaatactgagagcacaattctgccatcattcggtgatgatcctatgaaggattcctctggtgctctgaataatggtctagggaggagcacttcatctcaagtaaccgaactgacacatcttcatagatcccacccgcctgctgactacaatccattctccttgcattcccatgattcaccatctgtatctggtaacagtgagcattctgttccgacagctttgacacttggtaataatatctatttcagtagtgcagagagtgagggacagcctgaggaaaaccataacctattggatgtaaacttaggatttgatgtgacaacgacagaatttggtaatgttgtcaaaagaaaaggtgaatctggcaatgacttaatgaatgcaggcagtcagaattggttgactttaccacttactgtcagctgcttggataatgcttctgctgttagtaatgggaggataggtttagagcagattgtggatgaaggtgtccctgttatctgtcaggatcatgatattatgctggatattgaccagcggggcagtattgatgttttgtctggccaggatcacaacctcaaactatgtggtatcagtattcctcaagcagtccttttggcaacagaagagagaaataaggatgttgatgatgagatcgttcgcccaggttcttctattaattctgtaaatgttttagataaatatagttattgcacagtgggtaaacctatagataatcttagtagacccattctcttatcttcacaatctgctgatgtaccaggtcgagacttagcttctcagatatctgttgattctgatcacacttaccatggaagtactgaggatcctgtgggcatgtcaagtacaacacctgattcggtatcctcctggattgaagccattgtaccagaagctaacaaggaacaccaatcatgcaaatcttctctacttcctatctgttcttcagaaaaggtatcagcaccaaaggaggatagcaagaaggcgttgtcagattcagtagtcaactctgtagtaaaatctcctcctcgaattaatattgcaagctccacagtattgaagttgaaagacccaagaccccacctttgccacttcataccaaatccatcagttgtgctgtgaatgttttggagccattgtctcaaaatttgcagcaacaggtccttgaaactgaaaaggaagattccagtgggcaggttaactcaggtgctgacaatctaagcattattagtttgcacaagtctgaagcccttgatgctggtaaagcaatttatgttaggccaaagttaaatcaactagttgcacaggggcggcatcttggtgagtcgagtaacatttccttggataaagtgacgttgctgcagccttccgcaacatctgatctctatttcaagaaaaggaaaaatcagattattttgggtccctctacttctgatgccccgagttcaaaagatacatttcaggctgaaaatataaagtcaggtgagagtaaagttctaatgtcttcatcttccaacaacaatatcactgtggcaaaggacaggctgcacaaagctcttcagacaacaaatactgtcagaagtttctctcatgtatggacacttaatggacaaaatcctcgaaagaaatcttatgtgggagctagtcatatgaaggtcttacctcgtatacttccatggaaaagaaaaatattctgccagaactttagaggcagttattcttcgttgttgaatacaagctctataggaataatgagaaaattattgcaaacaaggaagagaagtactatttacactgtctctactgatggattctctcttcggaaatctggagtgttaagtataggcgggtcaagtttgaaatggtcaaggtccctcgagaaacattctcgaaaggttaatgaggaagctacacaggcagttgctgaagttgaaagaaagaaaagagaaaagagaaaacggcagtctctccgtagcaagggaaggaatgatcggtactctgcatcagttgctgccaatcaattaacaaacagaagcagagcatcttcagattcaagggtgtcatcaacttgcaatgaatatgtgcgtgttaacaaaggtaaccaactggtcagaaatccgaagaaagtaatccgcatgctagcaagtgagaaagttcgatggagtttgcacactgttagaacacgattggcaaagaagaggcaatattgtcaattcttcacccgcttcggcgagtgtaaaaaatctggtggcaagtgtccctacattcatgaccgagctaaagtggttatttgtactaaatttcttaaaggcttgtgttctagtactagctgcaaactaactcacaaggtcctgccagaaagaatgccagattgttcttactttctgcaagggctatgtaccaacacagcctgtccctataggcatgtgaaagtgaactcgaatgctcctgtctgtgaagattttttaaagggatattgtgctgatggtgatgaggtatttatgatatcactagaattatatagatgtttactttttttctgcaccttgcatcgaagagtaggtaggcacatgaattcttatggagatggcatgaagcttgcttccattgggtttttagcgaacaatattttatatcagaattaatatatttaggttggagtcctttatttgtatatttgttccaacacgaaatgttctatgggacacgtagtgtcaacatatccacaccttctagttccttatatttttggatagtgttgattcttcatctgaaaaagcatgctgtctctgctttaaaacaatggtcgtattatcttttaaatttctgggaccttagatgaacctttacggttctgaatggatatcactaatcttttcatggacttgaaacaatctctgttacgagcagtgtcgtaaaaagcacagctatgtatgcctcgtctttgaggcaacaggagagtgcccacaaggatcaagatgcaagcttcatcacccgaagaagaaaagcaaatccaagagaagcaaagtagacaccgtccaaaacaacagttggggtcggtattttgagacaaacgttggccatggcagtggagcaagaatagtttatttggaggaagatgagagacagaaaccagagcaagtctctggtgaggagtttgctgacttcattgaacttggtgccggtattgaagtccctgaagatgcagacacttcggatgacatacagctgatggaactggacttagggaatctcgaggtgcaggctgacaataatgacgcgataatcaagccacttcggatcatgagaacggcaagagtttgatgagttctttggttggatacagctgcagtgttcctgggtcagggtggtattttacgctatgtttgacgtggcatataggcgctgactggagtttctatttctcgaagactggttctgacgggggcaatcggtttttgcttggttgaaggtttgattttgttcatcttgtacatcttttattaggaaatatattaggaccatatggcagtggtagaggccatgagggttactggctgttaacccgtgttttttcaacattacccagagttgaatgtaacaaacagtgctttacaatatgaaatgaatgaaggtttgcatacaggaaatgaagctttcattttgtgtatattgcacatttgcaccgcacatcttttggttataaattcgttaattccttccgtaag

SEQ ID NO: 38530 - DNA, 3281 bp, Zea Mays
cctctctctcgacactgtcactctcttcactcacttgtgctgctgctgccatcgtcgtcgatctcttgctccataaaaatcgtagtgttatatattaatatacaagaaatactctccccgtttacaccctttctctctcatcgccgctgatttctcctcccctctgaaagccttttgaccgttgcagtctctctctccctctgtccttccgttcccggccactcctctctccctctcttctctctctctgcagactgcacaaagccgccttcgtcttccactcgttcttgtttacacacacagcacagcacagcacagcagcctcccgggaaagagaaggcagttccctcactgtctctcaggattgtggtccaggtcatctccccgttcgctggcttcagcagcagagctcttgctggcaaacaagtgatctttctacagttttagctcggagattatgacacaagcatgactggtccttgaaaactatacacggctttggagagatgggatgtgctgcttccaggttagaagatgaggaagccatcaagatgtgccgggacagaagggacttcatcaagcaggcactggagcagcgcaaccgatttgcatcttctcacattgcttacatcgagtccctgaagcgtgtttcaatggctctccaacggtttgttgctggagatgaccaccatgagctcatcttcgatacattcatctcccctgtcaagcaacagaagccagagacgctcagcctgccttatggttcatatgagaagagaaccattcatgtctcgagatacttgaggtcagggcctaacccatcagtgtcagttgaggagcacccacgaccggtggaaacagtccgtgttgagtcacattaccctatggacaatcacagtggcatggataggttcttacaatcgcactcctcaccggtggtatcgtcttcatactacccaccaccttataccaggccaagctacccatctccatcgtcccaggaaccagttatgaatacttctacctattacatgccttatgacaggccaagatatgcacctccatcaccccaggaggcaatgaggacttcttattatgcatcttatgacaggccaagctaccgaccaccatcatcccaggagccaccgaggaattcttatcatgtgccatatgacaggccaagcttcccacctccatcaccccaggagcaggaatcatcaccatgggactccttctggaacccattctcatcgctggacagctttggatatccccgccctcggagtagctatgacaacgtgaccaatgacgatgaactcgcgaggttacagcgggtacgagaggaggaaggaatcccagaacttgaagaggaagacgatgagtgtcaagagcatgtacaaatgcatagaaaagaagaacaagaagatcatgataatgcggatgatgatgatgaagacgatgaggaagatgacgatgacgaatgtgagcattcagatgagtatatggtttctgacgagggcacttgctctgtcaattttgatgctaatatgaagcaagaaacaaagggatttgaatccaaaggtattcagtgtactgaagcaccagaacctcgcaagacagtagaacttgagttaaaggcacacaagaaagaactgatgagaaacagagtagcaaatgcagaagaaactcctggtttcacagtatatctgaatcgaagaccagcaagcttggttgaggccatgaaggatatcgactgtcagttctcgggaatatgtgacgctgctcgggaaatctcagtaatgttggaggcaagtagagctcagtactcagcctcaaacgatctttctgcgaagatgctgaatccggttgcacttttgcgctctgtgtcgtcgcgttcatcgtcttctcgtttccttcttgctccctctagctcaatagatgatctctttgacaatgagactagcagctgttactctgaagaatcttgtagtaccatgtctggaagtcaccactctaccttagatagactctatacatgggagaagaaactgtacaaggaagtaaaggctggtgagcggttaagaatcgagtacgagaagaggttgacacatttgaggaaccaagatgtcaaaggcgaagaaccttcctctgttgataagacttgtgcagcattaagaagcttgcatactcggctgaaggtgtcaatacagacagttcagtcaatatcaacgaggattgaaattctaagggatgaggagctgcatcatcagcttatggagctgattcaagggctatcacggatgtggcgggccatggctgaacgccacaaagcccagaagcgcaccatcgaggacgccaagcttctcttcctccagcaccacccctcggccgccaccgccatctcccttggcccgctagaggctgcaggtcccccaccggctgccttggaattggagtccgagatccaggcgtggcgaggagcgctggaggcctggctgttcgcgcagcgcgcctacgcgcgcgcgctggccgcgtgggcgcgacggtgcctcggcatcagcaccgcggcgcggccaagtagccacgcgctgccgccggcgttcctggcgtgcatggagtgggggcgcgcggtcgacgcggccactgaggcgcgggtgatggacggtctggacttcttcgtcgccggcgtcgggtcggtgtgctcgggcgcggctgccgggatggagggcatggctgggcgcgtgctgtgtgctggcatggcagcggtcaccggcgccttggcggagttcgcggcggcgtctggcgacagctatgacgccgctgtcgcagctgtcgtcgccgcggcgcgtgcgccggagcgcgggaaagaggacggcgtgggacaagtgccggaacgctaggaaagtgctgcggcggttgctttgttggttgaccggcccccgtgacgtagagtggctctgctcaccttgtgatgacgatgggtagggtaggagatggaattaagcatgcagctacgtatgtagtcttgtgattgataagaatgctattacaaggctatctaattttgctagcgactgcttattatagtgtggtggtcctagaccgacaaatctaagcaatagcaacaattggttgtttgtgatacaagcacaagcgaatgggatggagtttgtttatgagagcaagaaccgctacgcgcggctacggggaaactatccgatacgaggaagacgaaggcttaccggtggcttcaaatgcggcttttcccctcgagccgttct

SEQ ID NO: 38531 - DNA, 286 bp, Zea Mays
tctaacccagggaccactacagaggtgttgggatccttgtgttcctgctgaggttaactctcctcagcccctgggtttgtcttgttccagaaccctgcatgccatcccctgggtggtgaccaccggcagcagtttgtccacctcgccgtgaccaggtaacttcaagggtttcctcaggcgagttgtgcatatattgtgttctgtataagataaagaaactcatatgatggtaaaccattttccttaagtaggtttggtttgggggtgtatggaaagtagagtgaaa

SEQ ID NO: 38532 - DNA, 2228 bp, Zea Mays
atagctggtaagcgtagtggaggaagagagggaagaaaacgaagcgaagccaaagcaaggtctgagccgccggagagggaggtggccgggtgggaaacctctctcgcgcgtcaggcgtcacgtgagaactcccgatccaccgggacgacggattcccgccgctcccccgcgcgcggcttcttccggtgcggtcggcggccgacggcggaagctactggcccaagcaaagtgagtgaattgcgagtccaggcggcgatggcggggcgctgcgattgacgtgcgacgactatgggcatccaagggaacaaggcggcgacgcacgagcacgacttcctctcgttgtacgccgccgccgccgcggccgccgccgccaaggacgctcctctcctgctccacgactccaagacgccgcctccttctcaaggtaattttctcttgaagacgcacgacttcctgcagccgttcgatcagaagccaggagcgccgccggagccgtcgccgctgcccgctccagccgcggagatcaggcaccggcagcaggtggcggtcgccaagcagcgcgcgctgccccttcccctgcccggcggcgtcggcaccttcagcatcagccccgcgcccgtgtcggtcgcgctgccgtcggccgtcgtcaagtcggagccgccgccgttcgtgctctggggccaacctgcagcgacgctgcagccgggcgcgcgagggcaccagcagcagtgggcgctccccttcgccggctccttgcaggtcagtccgccgccgcagcaggcgcaaccggataggaagggccgcggcggaggcggggtcatggattcaggctccagatccagcggcggagccgggttcgacgacgaagacggcctcaccacgcgccgcgaggtctcctcctcgctccaagatttggcagtaagggtggattggaagggtgggagctgcagcgatggcggtacaaatcaggggccaaacacaccacggtcaaaacactcggccacagagcagcgcagacgcagcaagatcaatgataggtttcagatacttagggagctgttgccacacaatgatcaaaagagagacaaagcaacatttctcttggaggttattgaatatatacgttttttgcaagagaaagcgcaaaaatacgaggcaacattcccagaatggaaccaagaaaatccaacgatgcttccgtggtcaaatatgtattttcgatcattctggaaaaatgcacagagtaaaggccaaatcccaggagattccccgcctgacccttcacatttcgtgagaaatggatcctcccctggatctaatttcactgggaaactcgatgataatcacacatctgcagctgcatcaggggcactggaccaggcagaaactaatcacgtggctagcggctgctacagatcatcagaaactccggcgaatattacaagtccgtcccctgtggatgactctgcagtgaaaagtgaaatgcttaacagccaggagttggcaatagatgaaggaatgatcagtgtgtccagtacctattcccaagagttacttatctcgttgtctcacgcccttcagagctcaggtgtggatctgtcccaaaccagcatctctgtgcagatcaacctgggaaagcgtgctggcaagagatctgcatctgctggtggtgtatcctccaactccaaggaaccaccagccgatccagcatctagtaacgaactaggcggccatcacgtgacaacgttgggagctagcgctgacggtctcctcccccacgcgacgaaacggcataaacgggacaacagctgatgatgggcctctctcactccgcctcgttcccagacgacagacggattgatcattcttttttttttctcccagcccgacgggaggctctctcttggattggttgcacatcgcgtgctcggtgatgggctgagaccccggctgtattctttttgatttgatcgctcccgccgccatcccctgtctagcccattgtttttacgtagaggaacgaaccgtggagcttcccattgcggattgtgaagccgctcttcttgtacacaggcttccattcatctgagaagcttcttcccctccttgaacaggtctctccgcgttttagacctgtatactagcaacctgtaagatatgattatgatgtccagcagctctcccaggcacggcaccggccagtcaagttgttccgttatttctatgta

SEQ ID NO: 38533 - DNA, 574 bp, Zea Mays
atgtacttctccccctcactgctcgctctctcctttgcacccctagctactactgggctcctcctccgacttgctcttcgcaagcagacggggaaacaagaatcatcccttccgtatatactactactactactactcaatactcatgcatgcgcactgcctcccggtgcggcgtatgaaccagacatgaacagggagcacagcagcagcagcagctccaagctcatcaacgagaagctcgaggaacaccggatctccaccgcgaagcactgcccccactgcggcgagaaaatcgacagcaaaccagattgggtggggctgccggcaggcgtcaagttcgatccaactgatcaggagctgatcgagcacctcgaggcgaaagtgaaggacgaaggctcgagatctcaccctctcatcgacgagttcatacccacaatagatggggaggacggcatatgctacacccaccccgagaaacttccagacatattcctggctttccgagctttgctttccatggagtgatatattgtatgttgggattgcttcgccatgaattatgtgccgtggtttg

SEQ ID NO: 38534 - DNA, 4501 bp, Zea Mays
ctgcatcgcggaaaaaatctttttctcgcctctcctcgctcctcgccatttctctctcttcccctccgcttcgcccaccgcccgctccgaaatctgcgcgccgacgccgccggctgcccgtggagagcctcgaattagagcgcgttccgtcgagaggttttcaagcaactatgtttgagtttggttgatatgatactcattcacgttggggatgcagaccccccctctgtgggggttgattgaagaagttaactgtacacttaggagaacttgtgtcctactgaaagtttcttggtttcgaggtgctcttattggttattggatcgctgtgtgtaatttgtttctttccctttgagagcctttctagtttcttgggcaggctcttgagctaccaagcatgtcagattcaaatgtgaagtggattgatgggctccagttcacatcattgtactggcctccacccctcgatgcggagcagaagcaggcacaaattttggcatatgtcgagtactttggccagtttacagctgacaccgatcaattccctgaagacatagctcagctcattcaaagttcctatccatcaaaagaaaatcgcttggtagatgaagtattggcaacttttgttcttcatcatccggagcatggtcatgcagttgcacatccaattctttcacgcatcatagatgggacgctgtgctatgatagacatggtcccccattcagttccttcatctctttattcagccataattctgagcaagagtactcagagcagtgggccttggcctgtggagaaattcttagggtcttaactcactacaataggccaatattcaaagttgagcgccaacatactgaagctgaatgtagcagcacatctgatcaggcaacatctagtgattccacagataagagatctaataattctccaggaaatgaatctgactggaagccattgaggccactaaccccgtggatcactgacatattgctagccgcacctttgggcattcgaagtgactattttcgatggtgtggcggtgtaatgggaaaatatgctgctggtggagagttgaagcctccaactactgccgaggatctgggaagcacccacagcttatgccttccacccccagatgggctgttgccaatggagctggagttatattaagtgtctgtgatgaggaggtagctcgttatgagacagcaaatttaacagcagcagctgttcctgcgcttctgctacctccaccaacaacacccttggacgagcatttggtggctggcctgccccctcttgaaccatatgctcggttgttccatagatactatgcaattgctacaccaagtgctacacagaggttgctttttggtcttctggaagcaccaccatcatgggctccagatgcacttgatgcagcagtacaactagttgagctacttagagcagccgaagattatgcttctggcatgcggcttccaaaaaattggatgcatctgcatttcttgcgtgcgattggaactgcaatgtcaatgagagctggcattgctgctgatacagctgctgctttgcttttccgaatactttcccaaccaacgctgctttttccaccactgagacatgccgaaggagttgaagtacatcatgaaccactaggtggctatgtatcatcatataagaagcagttggaagttcctgcatctgaggccactatcgatgccactgcacaaggcattgcttctttgttgtgtgctcatggccctgatgttgagtggagaatatgtaccatctgggaagctgcctatggtttgctaccgctaagttcatcagcagttgatttgcctgaaattgttgtagctgccccgcttcagccacctacactgtcatggagcctgtacttaccattattaaaagtatttgagtatctacctcgtggcagtccatctgaagcatgccttatgaggatatttgtggcaacggttgaagctatacttaggagaacttttccttctgaaacatcagagcaatccagaaagccaagaagtcaatctaagaaccttgctgttgctgaacttcacacaatgatacattcactctttgttgaatcctgtgcctcaatggaccttgcctcccggttgctatttgtggtgttaactgtttgtgtcagtcatcaagctttgccagggggtagcaaaagaccaactggtagtgataaccattcccacgaggaagccactgagcattcaagattaacaaatggaagaagcagatgtaagaagagacaaggccctgttgctacgtttgattcatatgttctagctgcagtttgtgccttatcttgtgagctccagctgttccctttcattactaagaatggatcacattcaaatttaaaggattccatgaagattatcatatctggaaaaaacaatgggatgaataatgagctacacaacagcatcagctcagcaattcttcatactcgcagaattcttggcatcttggaagccgttttctccctgaagccatcatcagttggtacctcatggagctatagctcaaatgaaatagttgcagcagctatggttgctgctcatgtttctgagttatttcgtcggtccaggccatgccttaatgcactctctgcactaatgagatgcaagtgggatgctgagatttcgaccagggcatcatctctctaccatttgattgacttgcatggtaaaacagtttcctccattgtgaacaaagctgagcctcttgaagctcacctgacccttacaccagtaaagagggataatcaacatcaccgtgaggaaagcaataccagctcattggatagtgtcaagttggaaaacaagaatggttcaacatcacacaagaaaaacggtttctcaagaccactcttgaaatgtgcagaagaggtcctactgaatggcgatgttgcaagtacatctgggaaatccattgcaagcttacaggtggaagcatctgatttggcaaacttccttaccatggatcggaatgggggttaccgagatgtctgcagaaagtacatcagctcaccaaggatggaggaaggttgttgatgcactttgtgatgtcgtttcagcctcaccaaccaaggcatcagctgctatcgttctccaggtcaagatattgctatattgcacgtttggtcaaaactaaatttggtttaaagtttgttcgatttatttcaaaacaaattcaattttctttttctgattaatctatttcaaaacgaacattctctgtttttttttggtttctgacatctatttcaaaacacattttaactacaatgcctaggtggaatatggacctgtttcctagtcatatttcttgacgcttattttttttttcgcaggccgagaaggacttgcagccttggattgctagagatgacgaacaaggtcagaagatgtggagagtcaaccagcgtatagtgaagcttatagctgagcttatgaggaaccatgacagccctgaagcgttggtgatactcgctagtgcctccgaccttctacttcgtgctaccgatggaatgctcgtcgatggtgaagcttgtactttgccacagcttgagcttctggaagtgaccgctcgggctgtccatcttatcatcgaatggggagattcaggtttatcagttgcagatggtctttcaaatctgctgaagtgccgtctatcaaccaccatccgctgcctttctcacccaagtgcacacgtgcgcgcactcagcatgtctgtcctccgcgacatcctgagcaacggatccgtgaaccccaacaagacaatccaaggggaacagcagcggaacggcatccagagcccgtcctaccggtgcctggccgcaggcatcatcaactggcaagcggacgtcgagaggtgcatagagtgggaagcccacagccgccgcgccactgggctgacgctcgccttcctcagtgccgcagcgaaggagctcggctgccctctcccgtcatgacaaggccattcctggatctgacatcggcttccaattgacggtcagtgctggcacagctgctgcagggtccgcgagtaggacggctctaatctctccatcacgtgttattatctggtgtttccataatgcgatttgatttcaatttggcgttagatgttgtacacgtgtatttaactgcttgagttgtacgtaatttgtatacttgtaactttgtttaataatatggctattactcaagaagcggaacatatcttatcctttttatatgctgctgctagatccgttcaacgtgagtgccatgcaaatgtccacgaaatgtttagtatttgttagggggaaaaggtctcggtggaaggtaaaataatttctaactgttattcaggataaatgatttaacgtggtttgaattattacaaccttcgtcccttaaccttcatcagactattttgtcagatggcatcgctttgtctaatcagcggagaaccaag

SEQ ID NO: 38535 - DNA, 230 bp, Zea Mays
aaataggagtcaaggagaggctttagcaaaaatcaacttatacttttgcagaagtagcttactaaagtgagtccttactttcaatcttttaacgccatattaagtattaatagactctatttgcatctagtctaatttcacatctcatcaagacaacatcatttttatccatagtgttcacgtcctgactttaggttgtagaaacgtgaccaagtcttcataaccgcgaa

SEQ ID NO: 38536 - DNA, 3338 bp, Zea Mays
ctgaccgcggactgcgctcttgcgccttaacggcggagatactcgacaaggggaagaaggtgaaggatggaggagggggagacggggaaaccgatctcaacgaggctcttacctcgcaggtgcgtcgccttgccatggaggtccggcaacttggtaattcacgttcaataactgttctcaatggaggttctgcacaatcaggagtatcaggcctgatagtacctgcagcaactgtaggagcactgggttacggttatatgtggtggaaggggatctcgttctcagatctaatgtatgtcaccaagcgcaacatggcaaatgctgtttcaagcatgactaaacatttggagcaagtgcaaagttctcttgctgtaagtacttattctttcctaatttatcacaggaactacaccttcaactgcataatgtgtctactatgacttctaggtagtgtttggttgggagacatggtaggatgggacggtcttgtctcattttttagagacgggacgatcctgtctgtttggttgggagagagcaagatgaccccgttttttgttttgtttgaggacataaaaatggaatcagctaaatgacatatgggctccacatgctagtctcttattttccctccttcctctgctttctttcctatgcatgcatctacgagaagcaccactatcccacactgagctcacggtcgagggtcgacattcaaaacagggtgtggagctgtcccattcagcggcaaagctagggcagagctcgcccacacgctgacggagctagcccatgctctggcagagctggaccacgtggctttggcgccaccgtcggagcttggccatgcttggacctcacccctcctcttcctctcctgcatgcaccttatcttccccgcgagcgagctcgttccacctcggacgaccttgtctaagaattttctgagggcggggtgaacccgcatctggaaagaatattccctagtggatcatctgttgggtcctgacaggcggacccagacgctcagtgacatgtgtggagaacaatgcacaacaaaatgttaggtagggagttgtagcgtctatgtgtgtcctgtctgctacaggacgggggtatttatagggcaacctgggggtaggtggtccaaagtacattcgtacccccggttaccaactacattcctagaatatttcgtgcaacgggataattacaacactgcgacaccttttggacacatgcacacacaatcctaccctctagttacactgacaaatgggccctctgggagccccacagtgggccggtgacccggatgggtcttcttccctagagccttcgttgtctcatagccttcgcgtcttggtacccctcgctctaggggggcatagcttttgcagagggccccttggagattcgtgtctggcgaagtccttgacctcaatgtttggcccgagcctaggctctcgcctgggcaccagtcttcgccacggtcggtattagttgcttgaccgaaggctccatcgaagttgcgcctgacgaaggctctgattgtccctgtccctgcgctcaagtatggttagtcaagacgaggggcaaacttgcgcggtgctgattgaggtctggttcgacctctgccccaacatcattccatctcattgtctctgaaccaaatactgtgcgaaggtgggatatcccacttgggttggtctcgtcctcagaaccaaacactaacctagtttgacattctctaaaacgatacttctcaaggtttaaaagtgatagcgtggaatattgtgtgttgtattgtactgagtagcatgattacaatatatatacctctaccagattgtgctccacctgatttatagaaacaatgatcagggagatctcacactaaataggaaacaaccatataggaaagaatcacccattagcgcctaatcaggggcaatcagccaacgcctgatagggaagggtatcacctaattaggggcaatcaatcaacacctaatagggaaggaaacctcctaaacatggaaggaaataagctgtctaacccccccggcagtcgaaacgtcgatggcgcaaacgttaagacaggagcggaactcggagaagacaagtgggcagccccttggtgaagatattcgcacactgagacgtcgttgggacatgaagaacacgaacatcaccaatggcagcgcactcgcggacgaagtggagatcaatctcgatatgcttcgtgcgctgattgacacaatagactaaggagctcttggtcaagtagacaacactgtcattgtcagaataaactaaggagctcttggtcaagggactgtgaagctcctatagtaactgacgcagccaggaagcttcagcgacaccgttagcaaccaccctgtatttagcctctgcactggagctagacatcgtaggctgctgcttggaggaccaggagacgaggttatctccaaggaaaacagcgtaccctgaagtagacctgcgagtattcgggcatccggctcaatcagcatctgtgtagacgagtagagcagaggtcatggatgggcgaaggaggagaccatgactaagtgtcccacgaaggtagcgcaggatatgcttgactgccgagaggtgaatatcccgaggatcatgcatatgaagacacacttgctgaacaacataggagatgtcaggctgggtgaaagtcaagtattgcagagcaccaaccaggctgtgatactgagtggggtcgctgatagtggtaccggtcatggcagagaccttagcatgagtgtcgacaatactgcacggcttgcaatcggacataccagcacgctcaagaatatcgtgagcatactgctgctgtgaaacgaagaggccctctgaatgttgctgaagagccacacctaagaaatgatggaggataccaagatccttcatggagaatgccttttgaagagcacctaatcagggagatctcacactaaataggaaacaaccatataggaaagaattacccattagcacctaatcaggggcaatcaaccaacgcctgatagggaagggtatcacctaattaggggcaatcagtcaacacctaatagggaaggaaacctcctaaacatggatggaaataggttgtctaacaaaaaggcgtcgcctaggcgttcagatgccaaaatattatggacgtcggcgtggccttgacccagaagcttagggcgtccgccttggcgcactaggcgtcgccttcctggcggatgccttatgccctaaaaatctgggcgcggggtggctcctctttggcgtgtattgcctttgatgtgcggaag

SEQ ID NO: 38537 - DNA, 2991 bp, Zea Mays
tttctttgtctcctagccagtgctcactcccaggacgtcatcttctccatgcttcttctcaccgtacgcaggttctagatagtctgagctccccacaccatcccctctatcgatgagcaagccaagcttgctggtgcagccgagtagctcgctctctccccctcaagctcatatctcacgcgcgcccctgctccctgatttttcttgctcgtctccatggccatcgcaccccctggtggttgagctcgccaagctccctctcccgtggtgccctggcctcgctggatccgtcgtctccctcatcgtcttcttccccgccggcaggctatgcgaacgtcaccacgcatctctggtgctcgcgcccagcccggtttccagcgctctccctgccgcagctctcgcccgtcgtcctgcctgctgagctcgccccagcctcctgctccctccagccctaccatggcgctcgcccctcgctgcttttccctctcgctggacgcacaaccttggccctcatttcgccgttcgtcgagcccatctccgcccctctctgctcgtcgtcactgcagcgtgctcgcatttgtcgttgaaccccgttatccctgctcgactcccaagcaggctccctgatccgcgcccaactcgttgtgtcgttatgagctttttggtgagctaccattgtacccaaatcacggtcatctcagcctcgttgatgtcgtcctttttaagcgggaccgtgttgatgctgcttgcatggcacgttgtcggccagggtcaccaccacgactctgcatcactgtgctcggtcgcacctcctcagtcgtcttgcgtgcacttatctccaaacagaaccgcgcggccgactgttgaccctgccatttcctcgcagcgctcggacatcgacatcgttacccgacaacatgtttgcctgtcaccacattatcttctgcatcacggctctgttggactccgtgtgctcatcgacaccaagttgtcgatctccgccaggtcatgcccctcctcttcagcatcgtcgtcactttttttctgttatgtcacaagcgttcgtggattggtaagctgatttatgatttttttgctagttaatttgattggtggattgattagaattacggccaatgattatcctgtttgtatcgtaggcgcgctgtggttatattatgtttgattaaatatcttcgtgtgtgtagtgatgtagttactttcgcgattagaaaataaacatgatcaggtgggtgttcgaaatatatattgtaaccgacaccattttagtatgcgattaacgagaaaggctagatggtgtaggtagtgaagactcatgcaccgtccgcttagtgttcggtaaaactcccaaaccatgattcatcgtcgatttgcgattatcaaatcattttggtcatggtgagcggatgggttattcgtgataattagatcattgaataaattaatgggttagtgcgatgatccttttatttagtatatgtgcgcctggtaataatggttagatctgttgtcgggtcggtgtgctgttgtggggtgaaatgaggttacacttactagatcaaacgattaaatatcatatttaactcatatgctatacaagttaaaccgataaaatggcttagaaagctagttatagagtttttattcatattcggatgtttagatgtccaaggtcaatgagataagttttaataaccaattaatgcattctctagctgaggaagatatagtgcatgtgcgtatttaaattcttcgtgacgtttgaacaagatccgaccaagctggacaagtgtgatagtatacttaattttatgtctacagctagtgtgttactcataagtgttgtagagtgtgtgaattggatccaattatattagaataacatgggtgttgtgcttagtgttgtttcaacagctagtgtttgtttatgagtgttgtaatacattgctgcatagtgtttagctttctaccgtaagaggctatctagtcttgatattcctccttatgctcctacatatgcattgcacatttcaactaggtacgttagatgatctcgtgatgcggaatacgacccaagtcgaccccaagatggtgtaacgggcaggttactccatgaggtgatgctggtggatccacctgaagacggataggctgaacaagtgcctattttccatccccttggcggaactgctgctgctgctgaggttgattgttccttgtagcgggagcagggaaatggatgggtgcttgatgctgctgcgatggcctgatggcccatcttcctgcctgctgctggaattccctgctctgattgtgggagacaatccgaaacctctggggtggagcttaagttgttgacattggtgccttcctcttcttttctgcccggttgttgaaggcctggacatactgcaacacagtgcaagttccctgagtcaatgccaagaactcattgagcttgcgatcttgaatccttgctggaatatggtgtcctctaaaagcagtcttgaactcctcccatgtcaccacatggtcagcggttaacatggcacggaaatggtcccaccatgtcctaacaggtccacgaagctgctgtgcagcaaagtgggtctttgcgtcgtcaaggcaatctcctgtgaggagtggaaactttgactccataacccatagccacacatctgcgtccagaaggtcctctgccttggtgaacaagggtggttgcgtgctcaagaactcctggtacgttgccgaggccggaggacgttgttgctggtctccaccatactgttgagggtggggttggcgctgcaccagctgtcgtagaatctcattctgctgagccatgagctcctgcatcgtggaagctggaggaggtggtgggggaatctgctcgttctacccacgacgctgcctagctgccatctgaaaacagaattttttgctattgttaccttgatccatgattccgag

SEQ ID NO: 38538 - DNA, 1430 bp, Zea Mays
tgtttttcaggtcatagttttgtgctgctgatgatggtgttaagtgtcggtgggctcgaccttcttataagtctaagtatgaacatttagaagccgaagaccatggcggcataggtacacagtgccaacgttgcctccgtcgatgcggcgcagcagcctagtgtcacgcggtctcaacggcgccgcggccggcgccgacgccacgtggatggtcacccacgccatcgacgaggtcagagcagcagtagccgccatgggtagcgcgcagatgtggagcagtcgaatgagaaagacgggctggagcaccacagcaggttggtgttgctgctggccagcagccgctcctctccccaccggcgccgagaggggacctgtgacccaaggatctgtttttcggggggatatggtgttcgcggtcgtcaaggatctcaggctcaaccactccaaggacccatcggccatgtggttacgcaatccaaaggcctccctcaccgatttcatctagggtccagttcttgaaagggtgggaatgtgtccaagaagacaaaggcatcgacccgccaattcttcgctacaaattcaaacagcactagggtgagatcagtgggcttgagagtagcatcatccttcaaacaagatcaatattttgccacaactcataatgagatcgagatttcattgtacatgcatccacaaggcatctttttatattttttaacatgagtgtactgatgcaatgtcgttctgttttgtcattttatttttgttatatcttggagatgtcgagcttgatcaatattttgccattgaatttatgagtggcctatatgttcactgtttgcccatttcttcagttaagctgaatgcaaaccatcgagatggtccaggtcgaggacctccatggcacctacgttggtgtgggttatgccacctcatcgtgactgtcatcgattgggcctccgagtccaggagaatacctacgatgaagaaagagacatgctgcacatgcacgagggtacttgcagatagatgtcggctctatggacgaacactcgaccaagtcagttgaggagtatgagggcctagccatgcgcgacgtgatgactactggtccgacgatgtgcagcaagttgtgagttaaagatgaactcacctgccctggagagcaacattcataggagtgaggcaaaatggctggtaccaccacaacatggacccattcctgaagatgtccaaggaggtggtagtcgacaccataatgtcttgcgcgtcattgtgtcaccaacaggcaacacgctgcgctggtaccgacgggtgttgtgtttcttaggcatctgcttctgtgctttgagctgtgctatagagtggttgtgccaactactgattttaaaagaaaaaggtgagctgagaaccattgttgaaaacaaata

SEQ ID NO: 38539 - DNA, 5217 bp, Zea Mays
gctgaacaacggagagaaaaagtgaggcggaagacgagggacatacttcaagcgcccgcggcccgcagcctgctcgcccaggtcttcgccggcgacgagcacccaccaggtccgctcagtccatctctccagaaatccccagatgttccacagcaagtcgctccctaggcccaaggacacatcggtggtggtggtcgtccttgagacgacagaagtgtacattgtgatcagcttgtcgacgaggagagacacccaggtcgtatacgtcgatccgaccaccggcgccctgcgctacctggggaagcatggggaggacgtctttgattcggaggcggcggcgctgaaccacatcaccaacggatcaagggttctatccaagagcactacatatgccaaggcagtgctgggatacgcggtgttaggaagccatgctctgctcttggtcgcgacacagttgagcgcgtcggtccccaatctgccgggaggcgggtgcatatacacattggcagagagccagtggataaagatccagctgcagaatcctcagccccaggggactggagaacagaagaacatacgtgagctggccaatctagacattgatggcaagttcttcttttgcgagacaagggatgttaccaggcccttcccgagtcctattacactacgggaaccagatgaggaatttgtttggaacgagtggctgtcaaagccctttaaggacattggtttgccaggacactgtgtcattcttctgcaggggttcgctgagtgccggaactttggaggtgctgggcagcaaggtgggttagtcgcccttattgcacgccgaagtcggttgcatcctggaactcgctatttggcccgtggactgaacgcatgttcaggcacaggcaatgaggtagagtgcgagcaactcgtttgggttccacggaagggcggacagcgcatcccttttagctcgtatatctggcgccgtggaactattccaatatggtggggcgcagaaataaaaaacgcggtgtcagtggaggctgaaatttacgttgccaacgatccttacaacggaagcttacagtactaccaacggttgggtaaaagatatgggaataaatcatctgaagcgaacgtgtccaggcaaaaaagttctggaagggttcccattatttgtgttaacttgctaagatacggcgaaggaaaaacagagtcagttcttgttgatcatttcaaagaatctatacggtacatgaactctactggaaagctgggaagcacgtggattcagttaataaattatgactggcatgccactgtgaagttaaaagggcagcagcagacagttgagggcctatggaggcatcttaaaccacctacaatggtcattggcttcagtgaagggaattactatgatgcaagacagcagcttaatgaatgtaaaggatcagttatctgcaatgacgatgtaaatggtgggttttgcatggaatctattcaaaatggggtgatacgattcaactgtgcagactctcttgatcgaaccaatgctgctagttactttggtgcacttcaagtttttgttgaacagtgtagtcgattgagcatctcgcttgacatagatgcaatgtttgggttgtcaagtagatattctgaatatgatggtagaaacactcgttctttgccccctggatgggaggagcgctttgactctgtaacagggaaatcattttatattgatcataatacacgtactaccacatgggaacatccatgccaggaggctccacagaagccctggaagagatttgatatgacatttgatcagttcaaaggctcaacaatgcttgctccagtgaaccagcttgctgaactttttcttttggcaggcgatatccatgctacgttgtacactggctcaaaagctatgcacagtgatattctgaacatattcaaggaggaaacaggaaagtttagtaaattctcagctgttgagaatgtgaaaattacggtgctaagaaggtaccaaaattttatgaatgatagttcccgtcaaaagcagttagagatgtttcttggtttgaggctatataggcatctcccgtccatccctatgttccctctcaaagtgctatcaaggccatctggatgcatgttaaaaccagttcctagtatcatcccaatggctgatggtggttccagtcttctgagcttcaaaaggaaggatcttatttgggtgtgtcagcaaggtgcagactatgttgaactttttatataccttggggaaccttgtcacgtttgtcaactgcttcttactgtctcccacggtgctgaagattcttcatatccagcaaccgtagatgttagagttggctcaagcatcgactccctcaaactcgtggttgagggtgcttgcattccacaatgctctaatgggacaaatttactgattccagtcactgggagaactgatccagaggacttggctgttacagggaaaagtgcgaggcccaatgttcaagagagctcctatcttcctttgttatatgactttgaagagctagaaggagaattaaactttttgaatcgggttgttgcattatcttttcatccatctgctgtatcaagaacacccattactcttggcgagattgaagtacttggagtttcccttccatgggcagacatgttaaccaatagtgaacgtgctcctgaatttatggagtttatcaataaaaaatcatcaagtgctcactgtaatctaggttccaagtcttttggaaattcttccatgcctgggaatgattctcatggtattgatgagtcttatactaaaagttcatcattagttcaaccgtgtggttcggaaaatttgttggattttctcacaggtgattttgacatgtcggagtcccatataactcaaaatacttttggtgctggagaacaaacaaacttcttagatgatggatttgatgttaatcctttcgcccctgcattggaagtgcctgttcctgttgctaaagtaaacaaggaggttgaagaatgtggcagcacccagctttatattaaattttttgaatccctttctggctataataagggaaagggtcttgactttgagcaaacgatgaagcttgaaataaaacgtctccgtcttggtctttcagccgctgaaagggaccaggcgttgttatcaattggtgtaattcctgccacattagatccaaaccgtttaattgattattcttacctattgaagttatccagcttagctgataatctagcactgctgggccatacagtccttgaggatcgcgctaatgcttcaatagggcttgaaaagggcagtgaacatgctatagacttttggaacatcagtgaaaatgatgaattctgctatggtggggcatgtgaagtccgtgctctgtcttcattacaagctttagcatctagagaaaatcaatcggtattcatggaatgtttccagtgtgaaaagacagtttgcaaagcttgctgtgctgggaaaggggccttccttttgcttaacacctacagggagttgaagatatatggtgggagtcaaagtggtggctactcagcactcacagatagttttgtgtgcaaatcgtgctgcagtgaaattatcaaacgtgcattgtatgtggattatgtccgggttcttcatagtttgcgcagaaaagatcgttcagagaaagcagcactgagtgctgtgaatcaggtctgccaactggagtacaagaaagcatctgatttatctcaaagtattcaatttggtcagagacaattgaagcagatccttgatggtgaagaatcccttgcagaatttccatatgcaaactttttacaaatggttgaaactgccaatgactctgaaccactgctttcattactggcgccttttggtactggagagtatacgtcttactggaaagctccacaaggtatcacttcagtggaattctcaattgttcttggtggtttatcagatattgcaggagtttccataattgtcagttcttgcggttactcagcatctgactgcccaattgtagagatatgggcgagtaataaaatacaccgagaagatcgtacatttataggaaagtgggatgtacaggatataatatcttcatctccacagcttcgtggacctgaaaaatctagtagattgagtgaagaaccaagacacattaaatttcacttcccaaatcctatccgttgtcgtataatttcaataaaaatgacactttcccatagaggttctcattcaaccaagtttagtgaggagtttgatcttctatcattgaatgatagctcatcttatgaatcgaagccaaccaatttacataattcatttatccatgcaaaaagaattgtagtttttggcagtttgttgagaaaggagatggagcctgacacatcaggggggataatgagaatgaaaagttatttagacagatcaccggccttggggagatttaggatcccagttgaagctgagaggctgagagataatgatcttgttcttgagcaatatctcttagctaattcacctggaatagctggattccggcttgattctttcagtgttataagacctcgtgtgacccattcaccttcttcatcagagttggacatgagggagttttcattgacacgaatggaagatagatttataaacccagcaattctgtatatacaggtcacagttgttaaggagtccggcaagttggttgtagaggaataccgtttaccagaagtaaaagcaaacacgccactatattttgatttcccagatctacaacaggatgcgcgctgtgttatctttagattgcttggtgacgtcactgcctttgtcgacgacatttctgagcttgagaacttaaacttgcggaatcttcctttggcgtcgggactgtctttgtcaaataagatcaagttgtactactatgctgatacatatgagatgggaaagatcggcagtctctcagctgtataatttatgtggatggatccttaacatactggagtcaaccacatagccaggccgttatggttttggccctgaccctggcctaatattcctatttggagctagaattacatattgactcaacaataaaacttttattttaacaagctcagactatgaaatggtatgtctgggttgttgtgtgctaaagcgtacttctgtttagt

SEQ ID NO: 38540 - DNA, 8598 bp, Zea Mays
agcactcggggtaagcttgctgttggagaaggtgataaagttgctataaaggatgtgggacaaatcattggacagcctactgcagcacctattacagcagacaaaaccaatatgaagcccctttccaggaatattgtccgctttgaaattgtccatttagtttacaatccattggtggaccattaccttgctgttgctggatatgaggattgccaagtgttaacattaaatagtcgtggtgaagtaactgatcgccttgccatagaacttgctctgcaaggaccatatattcgtcgtttggaatgggttcagggttctcaggtacaactcatggtagtaacaaacctgtttgtgaagatatatgatctctcacaggataatattagccccatgcattattttaccgtagctgatgatgtgatagttgatgcaaccctcgtcccctcctcaatggggaaattggtgctacttgttctttctgaaagcggtgttttatataggctgaatgttacattggagggtgatattggtgccaagatattgactgaaacagtcttggtcgaagatgtcatatccatgcatagagggttatcattgtacttctcatcaacctacaggcttctttttgtatctcaccaagatggtacaaccttcatgggacgtttgaatgctgattcttcatcaataacggaattgtcatatataaatgaggatcatgatggtaaatctaagccagctggactctactgttggagagagctagtagctggcagtggtatccttacttgcctatcgaaatctaaatcaaatgctcctcttgtggcgttgttgagtcctcatcaattggttgcacaaaacatgaggcacaatactggtgcaaattcctcagtggttggtgttgctgcctataagcctttatccaaagataaaacacattgtcttcttttgtatgatgatggaagccttcatatttactctcatacacctagtggaggtgacggttcgatgaaccttacagcagagcaaacaaagaagctgggcagcagcatactcagcagtagagcttacactggcacaaaaccagaatttccacttgatttctttgagaagacaacttgccttacatgcgatgttaagttcaatagtgaaacaacaaagagtggcgattctgaaagcattaagcaaagattgacatcagatgatgggtatttagagagtttgacacctgctggcttcaaggtggctatttcaaatcctaaccctgatatagtcatggttggttgccggattcacgttggcaacacatctgctagcaatattccttctgagatcacaatttttcatagagtcattaagcttgatgaaggcatgagatcatggtatgatattccatttactactgctgaatcacttttggcagatgaagagttcacaattactgttggcccaacattcgatggttcatctatacctaggatagattgtattgaaatttatggccgagccaaagatgaatttggatggaaggaaaaaatggatgcagcgcttgatatggaagcattgggtggtaatgctactggtggtagatctggaaagagactccaaatcgtgaaggctgctcctatccaggagcaagttctggcagatgcccttaggattctctcacgaatatacctgctatgccaaccaagttgctttactgacatggttgatggaggcatggaacttgataatatgaaatgccgagctttactggaaaccatttttcaaagtgacagggaacctctgctacattccgccgcatgtcgtgtccttcaggctgtgttcccaaagaaggacatgtaccatcatgttaaggacaccatgcgtctccttggggtaataaaatcactcccagcaataacttcaagaattggagttggaggtgccgcatcgagttgggtgataaaagaatttattgcccagatccatacagtttcaaaagttgcattgcacaggaaatcaaacctagcctcttttcttgaaagtcacggtacagaactagtcgatggtcttatgcaggtattctggtgtatattagatttagacaggccggacacacagacaataaatagtcttgttgtgccttgtgtggaatttatttatagctatgctgaatgcctggctttgcattccaatgaaaaaactagtgtgtcagtgggacctgcagttgctctgctgaaggagctgctctttgcaccatatgaagcagtacagacatctagcagtttggctatctcatcccgatttcttcaagtccctttccccaagcagacaatgatagctaatgatgatgctcctgaaaaccaagctaaagcaagtgcttctgctatgaattcaaccagtgcaaactctcaggttatgattgaagaagatcctgtcacatcatcagtgcaatattgttgtgatggctgttccaccgttcctatacttcggcaaaggtggcactgtagcatatgtccagattttgacctatgtgaaacttgctatgagatacttgatgcagatcgtttaccagcaccccattctaaagatcatccaatgtcagcaatacctattgaagttgatacatttggaggtgaaggcagtgaaatccatttctctgtcgatgagctaacagattcaggtgttcttcatgctgataggagtgttcagacctccccatcatcaattcatatatttgatgcaagtgagtctgcagacttacctgagactattacagaccaggcaactgtttcgatttctgcatcaaaacgtgccattaactccctggtacttaaccacctaattgaagagcttagaggctggatggggaccactgctggtactcgagccatacctttaatgcagttattctacaggctttcttctgctgttggtggtcctttcatggatagttcaaagccagaaaattttgatttggagaagtttgtgaagtggctaatggatgaagtcaacataaataaacagttccctgccaaaacacgatgcacatttggtgaagtattgatccttgttttcatgttcttcacacttatgttccgcaactggcatcaacctgggagtgataattctcattcaaagtcaagtgggagctctgatttgacagataaaggtcctgctcaggttctgggatcaacaacaataactcttccgtcatctagtgctgacctggataaaaatgagtttgcttcccagttagtccgtgcctgttctgccctcaggcagcagaaatttttgaattatcttatggatattctgcagcaacttgttcatattttcaagtcatcatccataaatggagaagctggttcttctggttcaggctgtggatccctattgacaataagaagagagctgccagctggaaatttctctccctttttttcagattcatatgctaaatctcatccaactgatctgttcatggactactacaaattattgttggagaatactttccggcttgtatatagtatggttagaccagaaaaggagaagtctgctgagaaggatagatgctacaaggttcccaacactaaggatctaaagttggatggatatcaagatgtgctttgcagctatattagcaatcctcatactgcatttgtccggagatatgcaaggaggctcttccttcatttatgtggcagcaagactcactattacagtgtgagggattcgtggcaatgttcccatgaagttaagaaacttaataagatcataaacaagtctgggggtttcagaaatcctgtgccttacgagagaagtgtcaagctcataaaatgtttatctactctttgtgatgtggctacggcaagaccaaaaaattggcaaaagttctgtttgaagcacatggatcttcttccatttctcatggacaatgtttatcatttcagtgaagagtgtgttattcagactctcaagcttctaaatctggctttctattcaggaaaagatgctaatcataatgcacaaaaagcagagactactgatctaggaggttctacgaggactagctcacagtctccagatatgaaaaagaaccggaaggctgatgatggttctgaaggttcctcagaaaagtcgtgcatggacatggaacaggttgtagagatgttcagtgataaggaaggtgacatgttgaaaaactttatcaacatattcttactagaatggaactcagcaggtgtccgtcatgaggctaaatgtgttctatttggagtgtggtaccatgcaaaaaaccgacttagggagacaatgctatcgattctgctacagaaggtaatacatcttcctttatatggacaaaacattgttgagtacactgacctcatcacctgtttacttgggaaagtgaacgacttcagtgcaaagcagaatcactctgaacttgtgaataaatgtttgacatctgaggtcataagctgcatctttgacacactccattctcagaatgagctattggcaaatcatccaaattcacgtatatacaacacattgagttgcttagtggagtttgatggctattacttagagagtgagccttgtgttacctgcagctgccctgatgttccgtattcaaggacgaagcttgaaaccctcaagtctgagacaaaatttactgacaacagaattataataaaatgcactggaagctttactatacagtcagttacaatgaacgtttatgatgctcgtaagtctaaatcggtcaaagtacttaacctgtattacaacaacaggcctgtgactgacttatcagaattgaagaataattggactctttggaagcgtgctaagagctgccatcttacatttaatcagacagaattgaaggttgaatttcccattccgattacagcatgcaatttcatgattgaacttgattcattttatgagaatcttcaagcttcttcccttgagtcactgcaatgcccacggtgtagcaggtctgtcactgataaacatggcatatgtagtaattgccatgaaaatgcatatcagtgccggcagtgtagaaatattaactatgaaaatcttgactcttttctctgcaatgagtgtggatacagcaaatatggtcgttttgaattccacttcatggcaaaacctagtttttcatttgacaacatggaaaatgatgatgacatgagaaaaggattggcagcaatagagtcagagtcagaaaatgctcataggcggtaccagcaactgatgggatttaaaaagcctctcatcaaacttgtgtcaagcataggtgaacaggaggtagactcgcagcagaaggatgctgtccagcagatgatggtgtccttgcctgggcccacatgcaaggtaaatcgcaagattgcacttcttggtgttctatatggtgaaaaatgcaaagccgcttttgattctgtgagcaaaagtgttcagacattgcaagggctccgccgtgttttaatgacatatctacaccaaaaaagttctagtgacaccaatgcattaccagcattttcaataccaaggtctccaaatagttgttatgggtgtagcaccacgtttgttacacaatgcttagagttattacaagtgctttcaaaacatgaaaactgcaggaagcagcttataagtgctggagttttgtcagagttatttgaaaacaacattcatcagggccctaggacagcacgcactcttgctagggctgtgctatcttcgttttctgaaagtgatgaagatgcagttcatgaattgaacaacttgattcagaagaaagtgatgtattgccttgagcaccatcgttccatggacattgcacaatcaacacgagaagacttactgctgctatcagagacttgtgctcttgtggatgagttttgggaggcacgattacgtgtcacctttcaactgttgttctcttctattaaggttggagcaaaacatcctgcaatttcggaacatattattcttccttgtttgaggataatttctcaggcttgcacgcctccaaaatctgattgtggggacaaagagtcaggtttgggagtatctagcttgacgttgcactctaagaatgatgatacaactggtaacacagcatctaataaccccaatactaagattcagtcagatatatctggaaaaatttatgatggaagtcgaagagaccaggatattccacttttgagctattctgaatgggagggcggtgcgtcatatttagatttcgtccggaggcagtacaaagtatcccaggcagtgaaaggatctgctcagaagacacgccatgattcatataagtctgactatctggttctcaaatatggactcagatggaagcgtcgtgcatgtttgaagtcaagtaagagtgacttctcaaaatttgccttgggctactgggtatcagacttgatcttgagttcgtgttcccagtcaataagatctgagatttgcactctcataagcttgctatgcccatctaactctcctagacaatttcagttattgaacttgctcatgtcactacttcctcgaacactctcagctggtgaaagtgcagcagagtactttgagttactagggacaatgattgattcagagtcttctcgtctattcctaactgttcgtggttgtttgacaacattatgttctttgataacaaaagaagtgtccaatgttgaatcacaggagagaagcctaagcattgatatctcacagggattcattctccataagcttgttgagctcctgaacaagtttcttgaagttcccaatatcagagcaaggtttatgagtgataggttactatctgaggtgttggaagcttttttggtgatccgtgggcttgtcgtgcaaaagacaaagttaattaatgactgcaatcatcttttgaaagaccttcttgatagcttgcttcttgagagtactgaaaacaaacgtcaatttattcgtgcttgcatctctggattgcagaggcatgtgaaggaaaaaaagagacggacgtctttgtttattttggagcaactctgcaatctgatttgcccagtgaaaccagagcctgtttatcttttgatactgaacaaggcacatactcaagaagagttcatcaggggttctatgacaaagaacccatactccagtgtggatgttggccctctaatgcgggatgtgaaaaataaaatatgtaaccagcttgatttaattggacttttggaggatgattatggtatggaattattagttggtggtagtataatctcacttgatctgagcatttcccaagtctatgagcaagtatggaggaagcaccatggtcaaactcaacattgtttgtccaatgtcagcgcaataactggtgcttcatctatcagagattgcccaccaatgacagtgacctacagactgcagatggtgaagctactgagcctatgattaaagagctggaagaggaaagggaggaatcacaagatcctgaaatcgagtttgctatagcaggtgctgttagggaatgtggaggccttgagattattttgagcatgattcagagcctgcatgatgatgagttcaggtctaatcaagaagagttgacttctgttcttaaccttctaaaatattgttgcaaaatccgtgaaaataggtgtgcactgttatgtctgggtgctttgggtttgcttcttgagacagctagacgcgcattttctgcggacgcaatggaacctgctgaaggtattctactaattgtagaaagtcttactatggaagctaatgagagtgacataagcattgcccaaagtgtttttacaactagtactgaagcgattggcgctggtgaggaggccaggaaaattgttctcatgtttttggagagaatatgtcatccttcaggtgccaaaaaatcaaacaagcaacaaaggaatgaggagatggtggcaaggatcctgccgtacttgacctatggggaaccaacagctatggaagctcttattcaacattttgagccctaccttagggactggtctgaatttgatcaattgcagaagcaacatgaagataatccaaaagatgataatataagccaaaagctgtcaacacagcgatctgctatcgacaactttgttcgtgtatcagagtcactcaagactagttcatgtggtgagaggctaaaggatattattctggagaagggcatcacaaaagctgctgttgagcatgtaaaggaaagctttgcttctgctggacagactggcttcagaacaagtgaagaatggacaacaggcttaaaactgccatctattccacccattctgtcaatgttgaaggggctggctaagggccatctgcctacacagaaatgcattgatgaagaaggcatattaccactgctccatgctctggaaggggtgcctggtgaaaatgaaattggtgcaagagcagaaaatcttttggatacactagccaataatgaaaataatggtgatggcttccttggagagaagattcaagagctgcggcacgctacaagggatgagatgcgtcgccgtgctctttgagaaagagtgatgctacttcagg

SEQ ID NO: 38541 - DNA, 1133 bp, Zea Mays
ccaatgggcaatgctccccgaagccgaagcggaacgaaacggtccacacgctggctagcccccgtcccgactccgaaatccgaatccatggccgtcctccgcgcgtcgccgccgccctttctcccccatccgctctcgcgcccctctcagtgcaagcggcgccccacctgccgcgtggtcgcagccacagccagacccagtcctgctccttccaggcccaggagcggcggcgtccatggaggccgccccaagagggggcttcttgcggcaaggagaaggccggcggaggggcgggtgccctgcttgcgggccacggaggcgggggtcggtgcggcaggcgtcgcgaaggaggaagacgagtacctggcgcgggaggccgggtggggcgtgcggcggatggcacgggttggggaggagatgcggcgggtggcgcaggtccaggccgaggccttccacgtccccgtcgcgctcttcaacgacttcttcttcgacttcttcaaaatacgcttgtttggtggctgaagaagctgaggcagccgaccagccgtcaaaggcaccatatgagaagatcgtcggggttgtggattgcacggtgcaggacgaagacggcatcctaaagcaccttcgaggcgcggatgaatacctctacgtgtcaggaattgcagtcttgccaccattcaggaggaggaaggtagggaccgcactgctgaaggcctgcgaggcactggggctccaatggaggcacgtgttcatggttctgagggcgtacgaggatgacgacggcgctcgaggcctctactccaaggcagggtacagggtcgtgtcaagggatccagactgggtctcctgggtggggaggaggaggcgagttgtcatggtaaaggagctgccggttcacgatgatcaatgacgccggcacggttttgttgaatatgtgtgtgtgtgtcaccagctaatttgtactgtttcttgtccatattcgcggcatcatgcatgtctttttggacaatagaggagagacagttgcctatcttcccaccaaacacaaaatgaaaattgagaagttacagttgacaagttccgtttcagagtctgccaccggcaagtgtacagtatcagctgtattttgcgac

SEQ ID NO: 38542 - DNA, 1448 bp, Zea Mays
ccagctgcaactctcggactgcagcattccatttccaggaaggccacggcggcgagaactcactcgggcgctgccggcgatgtacggcacttccgaccccacagctgcggagcgcacggctttccggcgtgcggagaaacagtacaagctttacaagacactcaacgtcaagggcaggtccaggtccaggtccaggtcaggatgcaggccgtctagcggagagggaggtggcgctgatctgtcagccgtagttgacttccatgctctgcttgccgccgacggggagcttcctgacgggattggtcggcgtgagtgccccggattcgaccgccccgtgttctgcttcttggaccggccagggttctatttcattcctggtgctttatcaactgaggaacaatgctgttggatcagggaaagcttgaaaacatttccacagccacctaataggactaatttgactgcaatatatggttcaatttcggacttactcatcgctgccgaaaatcaacagatattggttgaagcagaaaatcctgatatccaagaaagaaataaacagaataattgtggagggaaaacagaatccaaatacttcaaatttgtggactcagagagccagaaaggggaagagcataggtcaaacgcagcaactacccttgtgaggaagctccggtggagcacccttggtctgcaatttgattggtcaaaggtgacatgcttggtggccatgttgatgacatggaagcagattggacaaaacctattgtaagcataagtttgggctgcaaatgcatctttcttttgggaggaaagactcgagatgaagttccaacagcaatgttcctgcgcagcggtgatatagttttgatggctggggaagcacgagaacgcttccatggtgtaccgcggattttcacagagagtgaccagcaagaaatccctgcactgatttcacaactatctagtggagatgacgtctttatcttggagtatatcaagaattctaggataaatatcaacatcagacaggtctactgaagatcagattggttgcagacttacacatgaaagtttggtgggaaatgctgctttcttgctgcagtcaggtccattatcgtagtatagctcgattaggggcatctggaatagcaactgaggacctgaagggttggaaggtgctacaatagtagtgaaactaaccatatgtgtaacttccattggatgagggtttttttttcaaaaaaaaattttgataacctggcaatgatctcaaaacttatgcaggattgctgatctcgggattagccatccctagctgatttcatgttgttatcttttctgacgtgaatatgctcctcaattttgctgctactgtaaagatatttgtagacctgtttgaacttattgcttgatgatctcattttgaggagtcttaggctttccaa

SEQ ID NO: 38543 - DNA, 1722 bp, Zea Mays
ctcccagccatctccacttcttctccccacgccatcctccttcctgctcctcacgcacaccagtggagggcctcccatggcgtctcctcccctttcctcaagtcagccaccctagcttccactcctctcgccaccagccattttccagcagcctctcttctcccacacggcagcagcttctccctcacgccaacagcagggagcaggagcttttcctcccatggccggcctcccttctccccctcggctccttcctccaggccgagctcctatgtcaggaacggctgatccacttgaccgctgctccatttttccctcgcctctgctctctcggctgctgtcagccatggcgtgacgcctctgctccttctctcttccccacaaaacaaccagcgcgcaggagcttctccttcatggacgctgaccaggctggtccctcgcccccttctctccccttgtccgcgaccttctctgcccgcgcgcaaagccgctgaccggagcgcggcatggcagcgccgccctttcgtggatgaagctagtgcccctttcagcttctccactgcagcaggccgggcatccccatgcctgcgccttccctctcttgccgtgccttccccatggtcaggatcagcggcagaagtcgtgtgctacctgttagatgatatgggcagcaaccacgcttcgcagctccttgcaacagcaatcaatccctgccgcatgccacctgctcgatatattacgcagccacatcgtcgttgccctttctcgcagcacgccgttgttggttctaggtgctgctacctacatccctcgcactcaccttgctcgacaaaaatgcctccccgttcgttgacctcgggtggctgcacacttgttgtcgctgccccttgtccgtcaacgcgcagcccctctgtttccccattggcgcagcagccccgacgtctccgcgctctgtcggctcgctgttttgtgaagccagtggacagcacgccgtcgacgctcgctgggtgtttgctgtttttgcgcagccccatccgcgacgtcgtcgaaacccctagtggtcgacgccgcgcttcgcgccttgctcgttcgatgaaataccgagccatgtggacagcccatgcgtctagtcacgacccgttcaggaccgagagatgacgatcgagacagtgatgtggtgccacccacaagatgcagtcggtggacgacccaagaaaggatggacataaccagtggatgctcgccaagcgagtacctcccccagcaaacactatctaagtgttaaattaaaggcaagccccggttttatgcataaccgttatatatgctattttactgcacttaatgtttgtagtcttgtaccgtgcacttaagtgtaggagttgaatgaaaccgtagttgcatgaactcaggattccctttgagatggatactagtatgctaggtggagtagctgctttgctaattagggatctcggtagaagtcgagtgatttttctagcactcgcgcgaggtcaggaattggttgtatccactttgataacagaatggtgatggtctgtggacacgggtccatggggacgcgtggtctacgagatgaaattggaataaggattaacgtgcggatacctgtgtcaagcgtttgaacgtactaaacacataccgagaaatatggtaaatcggtaagcctagtacctgagtgaacctgcccgcagattgccc

SEQ ID NO: 38544 - DNA, 2028 bp, Zea Mays
cgctctaccgtgtataccagtctagctacgtactgccagtgccagcagtctgtgccgtgccagctagctagtcgatgacgaatatggcaggaaggtaacagctagaggccgccaaaagatatcatgctgttggggaaacgccaacgatctcttgttgcccttctcgccaccacgtcggtcgtcgttgcttgcaccacaccaccagagcgacggccggggttcaccgtcgcgagctcttttggaaacgagggggcggcgctgctggtttcgtctaatccaccattccaccatgcgtgagtagctagtgctggctcatgtggcgtgcgtgaacaacgtttatccgctgatagatctatcgtcgctactcgatcgctagtgctcacctcccccggcccatgccatgcatgcagttcttccttcccttcccggccggccgcaagcagggacttgatctcaagagacgcgcgcgtgtataaaatggccggccggcgcttgctggcctagatcctcacccatctatcgagctaggactgctagatcctcacctgcccgactctcgctcgtcggttcgatctttcccataggaacgcacggtgctagtttcgagtgtagcgcggcaatatggaggcaaagagcgcggccgcggaggtgctcaggaagaccgacgctggcggagacaatgagaggtataggcatggggagctggggcgcgaggctgtggaggaggaggaggtgaaaccgcgaagggtggcggatgcgccgctgccggcggagaggaagaggaagcgcgcggcggacccggaggacgacggcagcgtgagcgacagcggcagcggcagcgaagggcctccgcagcagcagcagcaggtgaagccgtgtctttccccggtgccgcctctccaacggctcctgagtgcgtgccgcgccctgctcactggctcctcctccccgccgacgccttccgctgtcgccttgatccgtggcattatggtgttctcatcagacaagattgggccagacgacgtcgggctcagggacgagatccgcttcttcaacaagatgaacgccgctggtcttcaaaaccctcctatcgtcacatgcaaacctatttacgagggcgccaactttacgatcgcggtgttcttcttgccactgggagcggtcatgcctctccacgaccacccgggcatgacggtcttcacgaaggtgctcatcgggtcagcgcgcctggaggcctacgactgggtccgtccccgtgtcttggccggctgctgctcgggctcccgtcgccggacgctcgcgaagaaggtgcgggacgaccacggcgtcaccgcagcggcgtccgcctgggtgctgttccccaacagcggcgggaacatgcaccgcttcgcggccgcggaggacgcccactgcgcgttcctcgacgtcctcacgccgccctacgcgcccacggaccgaaggcgctgcaccttttaccaggacctcccctacgaacaccatcgtcctcgtccctgtacctgtaggtcgacagccacaggcggtgccatctgtgacgacgacgtgcttgttgcggaggagcagacgtgtcggctggcatggttggaggaggtcccgcagcctaggaacctgagggttgtctgcttgccgttccgaggcccaacgatcttctagcctcatcaacagcccatccggcaggcagaccctgcttactatctctagctatgagggaggcatagttgatcaaaaaaaaatattgtctttttccttttggagaataggatcccgtgctgataaatgatgatgtttacagtatgtagtgttaagctactctactgcgtcactgagacaaaacgtattcagctcttcacaggtggacgacaaagccactggcttctgtacttctgtttctgcgatgaaccagatcaccgccatagtcaatataataggctctaagtctgcattctcccctttcacatatctgcagccatagtcaattttccctgagttgtacacctgactattctcttg

SEQ ID NO: 38545 - DNA, 278 bp, Zea Mays
cgagagtcctgagctactcatgacagtgagcttggctagtatacaagttttacactctgtagaggttataccctgtacccacaagtcgtgtatcccatgtcgttagggtttgcaaggcccttagacactaccaaggtgaatggctagggatccacaacgaggcctttacaaagttccactagcttccgaaaacctccatcgcagaaaatcaacgcgagaacctccttgcatgcaactcccctactgctcttgcctctttcgggtaaggtagtcttcca

SEQ ID NO: 38546 - DNA, 1223 bp, Zea Mays
atgacattgatggtaggcctgggcccaccactgctggcggtttcgaatccagtgagcggctttacttttccgttgcgtgtatcctctcggctctcgcctcgccgagtcgccgtcgagtccgccattccattcaccccggttcccctcccgtgcaaccgcgagcagaagccaccatttcaaaacgaggacgagcccgctgctggtgctgtcccttcccgcgcgccgccggcgcctggccacctgctccgcgtcggatctagagcgagcgagcgtcacccgcggctctcgtcgccgtcagcgtcacccacccgtcgtcttcttgcctccgaagtcaaatcttccaccccatatcaccacagagaattccaacccatccacttccgcggcctgctgccgtccgctttatttaaaccgtccgccacggcgaccccgacgactccccccgcggcctctcccgccagctccccctcacccccgaccatccacgcctccaagcgccgccgccgcgagaccgaagccacggggaacacgccgctgaggggtggcaggggccccgcccctcgccgccgctcgtcgactccgcctcctctttctctgccggcggcggagtttgacccgctcgacccggacgctgacccgccccccaagctgctcacggccgacgaggtgaggctctgcaagcaggcgctgaaggcgctcgacaagaaggtcgggaagcccgccacgcttaccaaggagtttcgtagcctcccggatataagaacagagcttcagtcagtgcaaaaatttagtgttgctcggaaacaagaaaataggggaagaaaccgctatactgatgtgttgccatttgatcaaagcagggtacagttagagtcttcaacaggcaatgattacatcaatgccagccatatagagattgctggcagaaatctaacgaagttcatttctactcaaggaccacttgccaatacaattgaggatttttggcagatggtatatgagaaccactgtcctgtgattgttatgctcaccaaatttgatggtcttaagtgtgatgagtatctaccattgagcaagggacaggctgtttttggaaaatttaccattaagatcacaaagttcaggaaagatggtcagttattgttgcgtggtgtggagattcgacaggatgaggtgaatatatataagtcagatgaagtgcgatctcttctccacattgagga

SEQ ID NO: 38547 - DNA, 1313 bp, Zea Mays
atatctctcgctcgccctttccccttcgatgcaactggtgtggcggcggcggctgcgggcggcgtgatacggcaccccctcctcccgcccccttatgcaagcgggcaatcagaactccgatcacccgcacgccggcacgccagtgtcgtcttcgcaaccatgaactccatcgagcctttcaaccggctggtgaggctggcggcccgcgccttctacgacgacgtctccatgaagggcgacaaccagcccaagacttcccgcggggacaaccgcggcatggccgtcgtcgtcctggacgcgctcaccagtcagcaaaaaacgcaaaagcacataatgctgcagctgctaatgatggtcaaccaattgctaaggagggagaagagaaagtaaagctgcacacacattcatactgttgcttggattatgctcagatctgtgatgttgtaaggtaccggattcaccgcatgaagaaaaaattgaaggatgaattggacagcagaaatacaattcaacactatatatgtcctagctgcaataaaagatactcagccttcgatgcactacaactggtaagctacacggatgagtacttccattgtgaaacttgcaatggtgaactggttgcagagagtgacaagcttgcttctgaggaaatgggagatggcgatgacaatgttagaaagcgcaggcgtgagaaattaaaggacatgcagcaaagaatagaaattatacatagtctgtttgcccagagtcaagaaaaaaattgactgataccagtacaagtctttggtgagaatttgagaatattagtcgctttggtaaaaaaagattatttggaaaaaatgaatcgtgtttatgcaacattttggaggtgattgcatgtataccaatatatcaacaactgtctcaggatcttgttcttggttgttaagaatatgactgagagtttgggagtctacaaacatgggaaagagcaaatattggtgcttttgcaattggtgaccctgctgcagctgattcttctaggaattcacaagggcagtatggtacaccaatgccatacattggagagacaaaggttgaagttgatctgttgagtgatggtgtgaaagaaggtgctgaatcaggtaaaactgattctgaactgaaagttttacctccatggatgatcaaggatggcatgaatcttactaaggaacaaagaggagagataattgcgccacaaaaacttgagaaatctgatgccggagatgacaagaagcatgacttgaaagatgatgattgttttcgctcagctcaggaatgaacacata

SEQ ID NO: 38548 - DNA, 287 bp, Zea Mays
ctcagatctagtctgattgagccacttaactaggatcaaataccacatagtcactcgaaggtgagtcacagaagaaatacaataaaacaggaaaacctcaaatataagtactggagttattacataaatcggagtttttcaagtagctgatataagttcacaaaataaaatggagcggattatcgatatcgtcgatagcgagaaattgggcaaggcctagcccactactcctcttgctcctctcctgccagaacaacatcccactcgaccgtccaacccggtggcag

SEQ ID NO: 38549 - DNA, 1723 bp, Zea Mays
tacccccttccctttctctatatacaaactaaagaggcaccgtctcccacaacatctctctttctcttcctccttccccaagtcggcgcggtagcttcccgtgtaccgtacacagcaggatcctccgccttccttgtgttccgcgcttccacaacagtttaccgcaaggaaggaaccatggacatgaactccaacgccaacaacagcactgccgcagcagcatcggctcccatcaacaaccagcaggctgtggtgtcatccccaaccagaaaggagcaagccaggaaccccaagaaggcgcgggcggcgccgcagcaggcgggcggcagcggggagcctaggccgcggcctccgccggacgcggcgcacagctgcccgcgctgctcctccaccaacacaaagttctgctactacaacaactacaacctgacgcagccgcgctacttctgcaagacgtgccgccgctactggacacacggcggcaccctccgcaacgtccccgtcggcggcggctgccgcaggaacaagcgcgcctccagctcctcgtccccgtttccgggcccctccagcaccgccgccaccagcgccgcgatggagaagaccgtcagcacgcggctgatgctgatggcgaccagcaccatggcgatgccctccccgacggcaggcctgtttgttcccgatgacatgtccccggcattcacgccgacgacgggcggtagcggcttcgacgacctcgccggcatggacgagcagcaccagcagggcttcctgcccttctcgccgctgtccctgtccgaccaggcgccggagctggctcctggaggagggggtgacacgacgccgtctttcctggacatgctgacaggagggtatctcgatggcggcggctacggcggcatgagcggtggcagcgatgcgatggacatgccgttctcgctgcctgagatggggcccccgacaactgatccaatgccgtttcagctccagtggacgtcatcagagcttgacaactacatcaacgacgacggtggttatgcagcaggaccagccgccggagtgcagcagcagcagcagcagcagcagcagcagattaatggtggtgatcaccagaagcaggacgagaacaaagaggcggggaacggcaaaggcaacgacgacggcggcggcgggtcgtcgtcggtgtacagcttctggatgaacaccagcggcagcgacggggcagaggggtagtgcgccactgccagtgccagccacaggaggaggcgaaagtgctgctgcaaactccctcgcatcatctggtcggtgcaagtgcagcagacatccttcgtcgacgcaatcaaatcatcaaaaggtggcaacagggagtgaaagggggaagaagttcaccatccagcgtagaggatagggtgcatgttcatgtttgatttatctgcattgtggtcggtcgtggttgcaagtcatcttgcaccaccctttgttttggttcagtttgcatgcgttcgttcgtcagagttttacttgcagcagtctttggatcgccggcagagattagttaggtatctatgctttgttttcgtcagttcgttctggataatgtcttaataattcctcagtttatttctttgttaactagtcgtcgtctaaaccttttcgtgtgtagtatttagtttggacgcgtcgttcaagcgggctgtgttagcctgcgttatatctgcttgatgac

SEQ ID NO: 38550 - DNA, 1004 bp, Zea Mays
aactgccccgctccgatcctgtcgacggcggcggccacctgttcgaaccgcgcgctcctgctgccgtcgcccctcgctgcggcggcgaccttggcatcggccgcggggcgcggcggcggcgggtacacgtccggagcgccgacgacgccgaggtggaagcgaaacagaccccacgctgccgcggcgggctgcgcggacccggtgctgcggcgcgggcgcgccgagcgcagccgcgacgacgggctcggatgcgcgtagaacaggctgctcgacagcgagcgccgcggcggaggcgccccggcgccgtggtcggaggaggcgctcttggacgactggctccggctcacgcacccgctgctgctgctgctcgagctcgagctcgcgctgcggctgccggaccgtgacaccaggcccacggtggaggccactgactccgacctcggtagcgtggcgacgttggcatcgtcggcggccgcaaccgaggaggcgcggagcgggaggagcttgccctagcagaagacctcgtcggccgcgcacatgtccgtccccgcgctctctccggctggtacgatgtcgccggacgacaggatgcagaactcgaagtcgtcggccgagtccgaggcgcgacactctcagatcccgtgctcatcaccatcctgcccctcgctcgccgcccccacctcaccaagagccttagccgtccctagagaagacacggaggtgcagtgccagtgctttcctcaagtgcacctcggattttcggtaccggccagattgggacgaattcaacattcatcggctccaccaaaacactgccactatgatgtgtatgcttgcgtcaggacaggagacccaaaagtacttcacagatgaatgtgacattttccacaagaacgagatacgaaatggccaaggactgctgacgatgatgacgacatggccaccatcgctgccctcagattcggaggcatcgtactgcaacggatgcttcctcgaactcttca

SEQ ID NO: 38551 - DNA, 627 bp, Zea Mays
accaattccccaatttttttgtttccattccacaaaaccacaaccgcgcggttttctccctcccccgactcccgcggcgcaagcgcagcccacccaagcgccatggcccccgccgcccccgacgccgacgcctatgatatcccgtgggtggagaagtaccgcccctcccgcgtcgctgacgtcgtcggaaactccgatgccgtcgcccgcctggaggggcctccggggaccgggaagacgacgagcatcctggcgctggcgcatgagctcctcgggcccagctatcgtgatgccgtgctggagctcaatgcctcagatgacaggggtttggatgttgtgcggaacaagatcaagatgtttgcacagaagaaggtcaccctacagccagggcggcacaaaatcgtgatcttggatgaggctgacagcatgacatcaggagcacagcaagctctgcgaagaacaatggagatctattcaaacaccactagatttgcacttgcatgcaacacatcatcaaagataattgaacccattcaaagccgatgtgctatcgtcaggttctcaaggctctctgatcaggagatcctcggtcgcctcatgattgttgtggcagctgagaagtgttaa

SEQ ID NO: 38552 - DNA, 4422 bp, Zea Mays
cgatcccggttgggaatggcctaaacgaacgaacaaggccactcggccccatccggcatccccgacccccgagcgtcttctttcgtctgctcgctctgcgctcgcatctaccatggagactagggtctagggtttagtgcgccgctgcctacatcgccgccatcctcaacttcctacgggatcctgacgaggcgccgtatcatcctcaacgccgcgaacctccgctcccacgttatcctcacgcccaccagtagctctcggcctctacctcgttaaggcttgatatttgactgggacactgggcaaattttaacaagtttcagcaatggggtttgataatgaatgcatcttgagtattcaatcccttcctggtgaatatttctgccctgtttgccggacacttgtatatccgaatgaggccctacaaactcaatgcacacatctctactgcaaatcctgcttggcatatgtagtggcaaccacacaagcttgtccttatgatggataccttgtaacagaagctgattccaagcctcttgtggaatcaaataaaacccttgctgagactattggcaaagtcgcggtctattgcctgtataataagagtggatgccaatggcatggagagctatctgcctgtgtcacacatggtactgcttgtgcatatgggaactctcctgttgtttgcaatcgttgtgggacacaaattgtgcatcgtcaagtgcaagaacatgctcaagtctgccatggcttacaatctcaaacacaacaagctgatggtagtcaggtgcagctggcaacggcaacaactcagccagtcatccaagattcatcacttgcctcagctggatctgctgcagctgcagctacaaccctaacaaagccatcttcaactacagccacagctgtaacagattctgcagcagcaacaggaggggcagctggtgcaaccacagcagctgtgccttcttcagcttcatctatttctgcttcccaaactccaacagctgagcagtggtaccagcagcagcagcagctccaatactcgcaatactaccagcagcagcaccctggatccaacccttacatgcagcaacatcaacaatatgaccaataccagcaggcatatcagcaatacatgcaacctccaatgcaagtaccatcccaaaatgtggtgcaaggatctgcacaacctgcttcttatgttcagcctcaagttcagtcctcccaggtgatgatgcaagcccaaagtcagccccaggtccatccattgacgagtcagccacagcttcaacagcatccagttcaaccccgaccccaaagtcaccctcatatttcccatgttcaagcaccttcaggtcagtcgcagcttcatcaaccaattcagtcagcccaagttccacaggtccaaccaagtcaagttcctctccaaccatctggtctccaagtacaatctgcagcacatccatctgctcctactcaagttggtaatcagcaatttgcgactcaagcaatggcgtatcaggtccagccacatgtacaagctcaacctccgcagcagcaacatattgttgcacatcaacaacatccacatatgcaagctttacccctacagcaaaatattcaacctaagatgcagctaaactctcaagttcagctacagcctccacatgtccagcagcaagcttacccacaatctcaggtctatcctcaacagacacatcatatgcactcccagaatactacatatgcacagcagcaaacccaaggtgctttgatgcaacctgtacatgtgtcccaccaacaaacacatgtttctcatcatcctgcaccgatgcgtcctccatcgtcaggccatcagccagctttgcagcatcctcaggcccagggaattcaacatacatcacaacatgaaaaacatattgggtttcatgctcagtggccaacaatgtattccaacattccttcccaagcaccaccacagggattgtctgtgcactcatctgtttcctcacaatcagttcaatcataccagcaaggaatgtcttcatcacaacagatgcattcccaacctggtcagccatatacacaacagcatgttactggcaatactggacaacatgttcaaacttctgctggcagacctatggcccatcttgcaccaacacagcaatttcagcagcaacatccagcaatgcttagaactgagtcacctgctgctgggcactctattgggcagggtcctttagatcttgaaaaacatacttcaaaatcagggaagttggataatgcaactattgctgctgtcggtgaaaataaaaatagtggtcctgagtcagttgtcatgagacctacaaagtcacaattgggtgatgaaaacatgaacagcgaacacaatggttttgttggtgttagaaaagatgcagtgcaaactggcattgtatcacacaatttagatggttcaattaggagggatgggaatactgaccaggcaggcaattcacatggcccacttgtgcagggaggcaaagatcacaaggcttcagatgcatctactgatcatgagaaaggacgactgtttcaacaggcatcactgcaaaatgcaggggcaccgggctcttatgtgcccccaggtgtggtaccacatccatctggaccagataaaatgcttcctcagcatatgacgaatcatggtcatatgcatggtttctctgaaaatatccgtcctccgctgcaacaaccatatggtgtgtttcattctggaacgataacaaggccatttggagagaaccagattcagatgccaatgccacagcctgggggtatcagacctggtgatggtatgattcgtccttgtttggttggcccattacctggacatcatggtgcagtgttgccttcttttgatcttgaacgtttgggtcagccacgtcctcttggaatgttgaacagcaatgactttggtggtgaggggttcaacgcttcagggggtgcagcgtatcctgaaagacatgataataccgaagacagtcggaaacattttccagcaccagcccctctagatgatcagggcttgcgaagggaccctagacattttgagagagctttaggtagacctgatggtttccttgattcagtacctggaaggcctccatttgcaaaccacagaagtgcaggtttgcatgaggattttccaagaaagcaaaatgcaactgccagtcaccctgacttcctgtcacatggagcagaatttgatcatcacagggctattggaatgcctaatttcagaaatccaggcccatttgctcaagggacaagtggcggtcctggtggccctcctaaacaccagcttggctctggtgacatgcatccaggtgaccctcatcttgtcgctgaatatgctcagcatggatttcctaaaactgcagcacactttggtttgggtggattcttgagaaacgggaattctggttggtgccgaatatgcatgtttaactgtgggagtgcagagaatctggatttgcatgtacaaacaagggaacatcagcaatgtgcaatggacattgtcctgaaaatgaagcaagatgttgcaaaaaggcaaaaactgaattatggagggcccaagtcattcaacaacaaaaaggtttctgggaagggccattttcgtgggaacaggcgctagtgttaactgattaaaattgatgtggttttgaaggttgctactggtgcttatggatgtgtcaatggcaatcgagaattgagatcttttcagacattctgttcatgcggttcagcgtatttgaagggaaacttgtaatggtcccaaacttttgttccatgttgatctgcagagttcacatggctatgtttacttcacgtatttttgccgaagttgttctgggattgcttaacatgctaatatccttcttctaaactgcaaagtgtaggataatttccagcagagggctcctgtcatacttgcatgtttccctaacgatgataaaccaatcaaaagtaaaaaggagaggcgcgtgaagcctaacctacgaaggctacgagtatgaagtcgattatccaatgaagcctcacttacgaaagctatgggtgcaaagttacacatcctgtgaagccttgacgagaagaagaattgctccaagcccttaagaagtcaaagaaccttcactaggtgcatgtatgtgctcgtgaaggccagtcgatcatgaggacccgttaataccatggaatttggatgaaccattgtattttaagccaaaaggtgtttggtagcctttaaaaactctgtatataatactgtggtattatcgatactatggttattttggggtatagaaaactttggtccagaccaaagtttctttgctgtgcgcaatatctgttgagtatgcaagccatggaactggt

SEQ ID NO: 38553 - DNA, 3221 bp, Zea Mays
ggatttgggagaggaatggtgggagatagcgccgtaccccgtggtcagccgccagtgtttcgcactttgctattcagcttcgttcttcaccggttcaccctagccgccaccccaacccccagcgacagggaccttcgccgccaggccgcccccaatccctagcgactgcgagcaccgtcgccaggcgccgtgcagcgagcgtcgccgcctggcgaagtcgcgcgactcgtgccctgcagcgagcgccgctgtcccgcacccaccgtcgaacggctgccgatgcccaacgccctgcagcgagttgcgccgtcgtccgcttcctctcgctggtaacctcgtgtttcgatttggacagattgctcgtgacttggtgttgcgccgccgaccgagcctccttcccctaagtccctaaccgtaagtcctaaatcttggtgagttctgttcatgtgcatttgagcttacgcatctatgatacgcgccttagggattgtgatctgtgattaggggttgtgaaattgagatgccattttagggattgtggaagtgtgaactgtgccttactgaaatcgagatgccatttgagcaagttttcaactattttgttggattggcgaggttatgagacctttccagatactttatatccgaattgttggaaaattatattatgctggtgtattaccgaattgtgtattgtttttaccctatagcgtattgaattttttttattaggcctaccctagtccaccacctgccgcagctctcgcctccgtcaagatccgaacccctcgcacgcggcacgaccaaatcctagacacctgatcccaatgcgcagggccctcggcagagagacgttactgcgccggcaccgtggatcggcactgctgtggctagctgtaacggcactggtcacaggcaccatctgcctctggtcgtccttctccgttggcctcctcagcacctacagggtccaggatgttgttgcaaatgagttgtggagaaccgtagattcaaatggttggagagcatcttctgcaccacgcatctgttggcctcccccaccagctgaatctgagagcaatgggtacttgcgtgtctggtgcaacggcggcttgacccaacaacgcagtgcaattacttctgccttgattttgtagatatgtaatgctgttgtcgtagcacgaatcatgaatgctacactagtgctgccagagttagacacaaattcattttggcacgatgagagtggttttgtagatatatatgatgttccccacttcatcaacacattgaaatatgatgttcgaattgtcatgagcattccaaaaatcactgcacaaggaaagaccaagaagctcaaagcatataagattttacctcctagagatgcacccgttacttggtacagaacaactgctttggagagactaaggaagtatggtgcaatatatttaactccattttcacaccgtttggcagaaaaaattgatgatccagagttccagagattgagatgcagggtgaattatcacgcactacgatttaagccaagtatcatgaaaacaagtagtgatatagcgaataagctccattcagaaggccatttcatgtcaattcatcttcggtttgagctggatgtgcttgcatatgctgggtgcttcgacatattcacacctgaagaacaggaaatcctgttgaggcatcggaacaaatattttccattgctgttgaggtattggggcaaatattttccaggaaacacacctgactacagggaaagaaggctcattggaaagtgccctttaactccagaagaggtaggtcttattctacgtgctacgggatttgataactcaacatggatttaccttgctcctggcaagctctttggtgggaaacacttcatgaagccattcaaggctatgtttccacgtcttaaaaaccatagtatgatcagaagtggaaagctggaagaaaatatccgagggctagcagggtcagcagttgattacatggtctgtctcctgtcggacatttttatatatgatggtccgagcaacttcgcagacaatctcatgggtcatcgtctatactatggtttccgaaccacgatcacaccaaacaagaaggcccttgctcggatattcatggacagggaggaagggcacacatctgcatttgaggagagggtcaggcaggtcatgctcacccattttggcgccccccacaagcgcatccatccagagtctttctacacaaacccatggccagagtgcttctgccagacgaaagctaggaatcatgctgaccggtgcccacacaacagtgtaaatgatgtccttgaaagttggttccataataaagaagatgtagaagtggaagctactaatcaaactgactccaccagctaaaccgagagttggctggtggaactgagttatcaaaggtttattgattgagaacagattgtttgtcacagacctgcgaatgacatcattggaggaaggattgatggctccagatctctgtaggcgattatgttcgactcaagatttagttgttgagattcttagtctgggagggtcagaaccagattttggataggtttacattgtcatgtagagttctgtggaagaaaaatcatacgaacgtcatgaactatgtggctactacaattggagatctttaccccatatgctatagctgagtgtttggtggcttcagttctgttggagttatttgctgttcctcactatacatatctggttgaattcatgcgttcctggtcctggaactggaacttccccagttttgatttttgcaattcaccgtaatgctaaaaagtcgactatctccaggctccctatcccactccctatttcaaagttctctctgcaacaatacatctatagtgcaaaacagtgttatacacgcctgcatgcacgacgttgctggagttggcctaattccgggttgctggagttggcctaattccgggctccttcgaggtccatggcagcatgtaactgtattgatttgttctccttgtttgtagcctcacacttggttgaatatttcgaaaaatctagaattccaatattttttcttatttttattttgtttttttagtttctttagaaagagataacagtcctttgtacttgtatatatgtacacaacacatattaatgcaaaccatgtattgtgtcagtcgtttgaac

SEQ ID NO: 38554 - DNA, 1036 bp, Zea Mays
cgaaaccacagccacacaggcagccggtgctgggcctcggcactcggcagccatggttcgccttgcgaagttctatctcgtctgctacaactccctccaatcgctcggatggtacggtagccaccagcaaccatagaccaccggccggcggaccgttgcttccactactaatgcttcttttttttatctcctgaattcaggtttcctacagacatgtgcgatccttgaaacggtccacgctgccatcggattggtgccgaccgcgccacttcttgctttcttgcaatggggagggaggatccacttcatcctggctgttgtccggcaaattcccgaggttcagagcagtccatctgtgttcataacatttatagcttggagcatatctgaggtcatccgttactctcactatgctctgactaccttaaaagtttgtccagcatggctgacttatctcaggtacactgcttttatcccgctgtatccaatcggggttggcccaggagaaatgtggacaatgtaccaagccctcccgtttgtgaagaagagggacctttactcaggtttcttcgagaagttctccatgagctaccgttcctttctagtgggtgtgctggtgctctacccgttcctgtggctgaagctgtaccagcacgtgttcaagcagcgcaagtccaagctggggaaggggagcaggaagaaacgggcctgagaaaatctggctctgctcagctcagctgccacttgttgctgtcatgtgaaacgctaacgggtcattgtggatttttgttttggaagaaaatctttgtgagttgttgtctgatgcgacgggggcagttattggattacgctttgggttctctgtttgtttcaattgctctgcgttttatgtctgtattaacatacatcaagcatatataatagtcatgttgctgctgcgagtctaatcaatcttgcgatcctggttttctcgctcaattgcctacactgaatgaggctgatcacgctgctctgtgcctacagcaggcgattgtca

SEQ ID NO: 38555 - DNA, 259 bp, Zea Mays
caccccttttccctttttccctctcttggccgccacccccctttttctcccttggcttggacacccctccctttcccccttggctggacgcccctctcctcccattgcagtcgccctccattgcttcctcctctctagatcttcccctacgcagcaaggatcgagaagaggaggagcacgttgaattgaagaggaagagaggatcaaggagatgttctaccccagctcttcttgcatattttcttggggaaaccctagg

SEQ ID NO: 38556 - DNA, 925 bp, Zea Mays
ctcgccactgccgtttgatccctcccgctcccccgctccgccatgcgtcccgccgtcctcgctgccctccttctagtggcagcggccgcctccacggccgccgcactctactcatccggctcccccgtcctccagctcaactccaacaacttcaaatcgaaggtgctgaactcgaaccgcgtggtgctggttgagttcttcgcgccgtggtgcgggcactgcaagcagttggcccccacctgggagaaggctgccggtgtgctcaagggcgtcgccacggtcgcagcgctcgatgctgatgcgcagcaggcgctcgcgcaggaatacggaatcaagggatttcccactattaaggtgttttcccctggtaaatctccagtcgattatcaaggagcaagagatgtaaagccaatcgtagagtttgctctgtcacaggtcaaggcccttcttagagataggttgagtggtaaggcatcagcagggtcaaatggcaagacatctggaggttcaagtgagaaaaatgaaccaagtgcatcagtagaattaaattcgcgtaacttcgatgaactcgttgtcaaaagcaaggacatttggattgtggaattctttgcgccatggtgtgggcactgcaagaaattggcacctgaatggaaaaaggctgcgaagaacttgaagggccaagtgaagctaggccatgttgattgtgatgctgaaaagtccttgatgagcaagtacaaggtggaaggttttccaactattttggtatttggtgctgataaggagagcccgttcccctaccagggggctagagttgcatctgccattgaatcctttgcattggagcagttggaagccaactctggcccagttgaagtttctgagttgactggcccggtaaggctaaaccttcatggatgtcatggaa

SEQ ID NO: 38557 - DNA, 279 bp, Zea Mays
cccgtattcctcttctttcgaagtaacccgagagcctggcatgacccaaggaaaaacacggtgaggaagagggaaggccaggagcgccgtcgtagccactgcgtgtgattgtcgccgttcgaccattgggggtatgcagggatcgcctgtgcatgcagattcgggataggaacctgccgtgatgaatcgtgggcgggccgccgtcaaattcctcaccgaagctcagaacaggggcgacatacccccttctcgtgggcggagctcggtgcaccatcaacg

SEQ ID NO: 38558 - DNA, 1140 bp, Zea Mays
atgcctagcattgcaagcaaccaagcaggggagggtgtgtttggttcactgccccagatgccacagcctaaggttaggcatgccccatttttgtcggtaagtgtttggttcatgcctaatattaggcagccacgaaaagtgtggcgtgttacacaacccttgccgtatttttttacgccgcacctggggcgctcgttttggccgccgcacgccgcacgccccactcctcctctcacctcacttgctcgtcgccgcacctggatctggctctcgtctcctccaagcacggattaggagtgcacctattttgattctgcgaactgagtaactgattctaaaggatagggcaagaaggctcctttctaagcctatcaagtttttcaatgaaatgcaagagttgtttattaacagcagtgctgatggctctctagccatggaagctacaacttgtatgaatgaaactcatcctggagatgacagtgacttcaatgatgatgtgtgcagtgacttctccaactatcctcagcctgtgcatgatctaggtgatgattctgacactttacaatctcccaatcatcatccatctcaaagtgttgatcatagctcgtcaagttctggactgaagcgcccacaaggagagggagtaccagcgaagaggaacgtggaaccaaagagtcgcacaacaaagcacacaaagatcaaaagggtatgcgtggtttcttatctgctgcatcagacataacatttgagtcatgggtactaaagcatctgagtgatttggacctatgaatcgactagcaggatgatccatgtaggagatgaatggtgtgatagttggggtttttgcatttcttctaggttgatggatgtcaattgatggagatatttggtggttgtgactagtgttacattgctctttttgttgatttttaactttgagggtaccaatgagcatagtgcatagcaccagtaccttttacaattatggaatctctgcaaagcaaggaaggcattggactgtaataaattttgctccaatttcgcattgcaaatgttctagtagtgtcagatttttctctaatgcttctagtgaaaaatgagaccttttggagacagtttctaaattttgtgtgctgctag

SEQ ID NO: 38559 - DNA, 3996 bp, Zea Mays
cgtccgcgtgcgtgccggcgggcggcggcctagccctaaataagaggcaagaagcattgaggcattcttcaccgattcaaaatcagtcgaccgatccccatttcccctcctcatctgcgtttcatttcattcatcatcatcatccatggaggcttccacccccaccgctcgccgaggtggagcccccgccgactacgccgccatgtccctttctccctccccctccttctcccacacgccgaggagcggcgcctcgtcctccgcccacaagccccccaccacaagcaggcaccgggatcgggggcccctcctcttcaacggcaacagtaacagtaacagcagcatcgctgcccagcaggccgcacagctgcagcaaacctccaccaccacctcctccaaggggtcctccggatccggaggcgttaacatccaggtcctcctccgatgcaggccattgagcgatgaggaacgccgcgtcggcactcccgtggtggtcacttgcaatgaccagagacgcgaggtctccgttgcccagaacatcgctaacaagcaaattgatcgcacctttgcattcgacaaggtgctaggaccaaagtctcaacagcaggacgtcttcaaccatgctgttgtgccacttgtcagcgaggttttggacggttataattgcacaatatttgcatatggccaaactggaactggcaaaacatacacaatggaaggaggagggggcaaagcactgaatgctgacctcccgactgatgccggtgtcattccaagggctgttaagtgcatatttgacatcctcgaggcacagagtgcagagtacagcatgaaggtttcttttcttgagctgtacaatgaggagctcacagatcttctagccgcagaggaatcgaaattctccgatgacaagtccaagaagcctttggcactcatggaggatggcaagggtggagtctttgttagagggctcgaggaagagctagtttcttcagctgccgagatctacaggatactggagagaggctctgcaaagagaaaaactgctgaaactcttctcaacaagcaaagcagtcgctcacactctattttctctatcaccatccatattaaggaatgcacacctgagggtgaggaaatgatcaagtgcggaaagcttaatctcgttgaccttgctggctctgaaaacatatctcggtccggtgctagagacgggcgagctcgcgaagcaggagaaattaacaagagtctgcttacacttgggcgtgtcattaatactcttgtcgagcactctggacacataccatacagggatagcaagttaacaagattgttaagagattctttgggagggaagacaaagacttgcattatagcgaccatttcaccttcagtacactgccttgaggagacgctaagcaccctggattatgcgcatcgtgcaaagcacatcaagaataagccagaggtcaatcagaagatgatgaaatctgcgctcatcaaagatttgtattttcaaatggaccgtctcaagcaagcatgatggaggaattcttcaggctatgtcagagaaactggatcgtttggagcttgttttggaatcaaaagataagcaattggaagagcttcatggactctatgaatctcagaaagtactgagtgcagatctaagtgatcaacttcagacattacagaaaagaatgaaggaaacagagtgcaccctagcggatcttgaaacgagatacatgaaggcaaatgatactattaaggagaagcaatatttgatagaaaatcttcttaaatcagaaaaagttcttgttggtgaagcacaaacactccgatcagagctggagaatacagcaggggatctacatgggctattttcaaaattagaaaggaaggaaaagatcgaagacaaaaatggaagtataattcaatatttccattcccagctgatccaggaaatgaatgtattgcatagaacagtctcaacctcggtctctcaacaggagagacaactaaaagcacttgaagaagagatgcagtcttttgtcacctcaaagggcaaggttgccggaggacttcaagagcatgtaagaaagctcaaagagagctttaattctaggatagcagaattgcatggttttgcaaatgaactcaagcataaatctatgttgagctttgaaaaccttaattcgcaagttaccacacacacatctagccttgaggattgcatgaaggacctattggttgatgccgatgaactactcattgcactacaaaatgggctttctcagcatgaagtgaactttgctacgtttattgagcaacagcatgaggggctctctagaaatttagagggaacaaagtttgtttcggcaactacaatgaacttcttcagaactatagattcacatgcattgggactcctaaagattttggaagaatcaaagatggaacatcaaaagcaactcttccagcttcagaagaagtttgaggccgttgttgctgacgaagagaagtacttgatggagaaggttgcagggttgtttgcagaatcaaacgctcgaaagaaaaatatggttcaagatgacatatgcagcctcaataggactgtttctgagagttcgaacaatttacaaaccgaaactaccaagctgcatgattttacatcttctatgaaagagcaatgggaaggctacatgaagaaaactgaagaggcattccagcaaaatgtatcatctattgaacagaaaagaggcttcttggcagggaattttcagcagtgcaaggaaaaggtagaatcatgctcagaacaatggattactgcacaaaatttggtgttggcacttggaagaaggaatgcagaagccatcggtttggttataagtgatgggaatgaggtgagcaaccaactgggtgcaagaatttcatctgctgttgctgctggatttgaagataatgacatttcaagcaaatcccttctaagttgtattgacgattcattgaagttggaccatggtattcgcgagaatgtgaaatccatcgtcatgacatccagagcacaacttcatgacttggaacatggtcactatgagatgacaaaagcaataacagggaatgccgataggtctctgggagaagattataaggtggatgaagcaacttgttcaacaccgagaaggcgtgagataaacattccggacagccaatcgatcattgagttggtaacccccctagaagatatcgtgaagtcattttgggacagcagaacaccgacgaagcctgctctaaatgcaaaagggaagcagcagttggtagggtcgacgacccctgaaacacaaagagcccctctttccgcaataaattaggagtttcattactgtatatactacaaacattcttgtgtggtcaagtaatgttgatcaagaatgttgagagaagttactggtaaaggagagctgtgtattctccagattcatccaatgtatgaacggaatcatacatccaatgtattttggagtggagtgcaactccaaaatacagagcaaatcgagcatgaccatttgtcaagttccgtgaaatggactcatttatttgtatctatgctgttgtgcacttgtttttaataccttcgtccttaaaccttcgtccgtgaaatggactcatttattcgcgagaatgtgaaatccatcgtcatgacatccagagcacaacttcatgacttggaacatggtcactatgagatgacaaaagcaataacagggaatgccgataggtctctgggagaagattataaggttagcgatacttatcgtctaaaagaagaaggctaagtaggaaaaagtatgatggaatgacgaagggaatgtaaaaaaggacattgagcaggacatttcaagtacatatacaaagacatgctatatacaattttacgttcaagtacatatacaaagacacgctatgtatttccttgatttttcatctattgtcaat

SEQ ID NO: 38560 - DNA, 1539 bp, Zea Mays
agttcagtgatggtgattgggaaacattattaaagagtattagggatgcgtcatacacaactcagcctcttgaactgctcaattcattaggattccataaatcaaacaaccagcagttactttcaagagaagaaagcaatgcacatggcaatagttaccatggcagccggggggaaccctccatcgttaataatggtgagcatagtcatgcagaggcaggtccacaaactagcctggagaattcggaaggtttaccgtcaccatcagggagaacacaacctgctgtttccccacgtggccaaagctttggacaaagaattatgggcaatatgatggataatcttttggttagaagtcttacatccaaatcaaaaggtcgagtcgatgatattgctccaccctcacctgtgaaggcccctgatgatgatgagacagacaaggctgaaggggaagagagccctatgatggaaactgtccggagcaaatgtatcacacagttgctgctgctcggggcaattgacagcatacagaagaggtattggagcaggttaaaagctacacaacagatagcaataatggatatcttgctctcactgctagaatttgcttcttcgtataactcaccttcaaattttcggacgagaatgcaccatatacctctagaaaggaaaagatcaagtacctagcagaagggaagctggtttctttttgtgggcagattttgaaagaggcgtctgttctccagcctagcactggggaggctgccagtgcagacatacatcgtgtattagacttacgggcacctgttattgtaaaggttttgaaaggaatgtgcatcatggatgctcagatcttcagaaggcacctgaaagagttctatccattaattaccaaacttatctgttgtgatcagatggatgttcgtggagcccttggtgatctctttagcaaacagcttactccactcatgccctgaagtctggcagtatttcctcccttgcatagatcttgttggaacatattcttcgtcagcatttttgtgcaaacatggagcaccggttgggtgcttgacatccttaacgcgctttctggtgcaacagctactccctaggaacttaagagcttgatcagcgggaacggcaggtccctaggccacatcttttttttttggatgacgcaagggaagtagcttgactgatgcgcacaccgtgtttttcctagcaggcttgtactttggagctatttatctgtgcccggacagggatgatgcttccattatacagtagagtagtgttggtaatatgtacacattgttgagaacgttgtacttgaggcctgttgttattatacggcaatagtagattgtttgcggcaagcctcgttttttgtgcgtctaattctctgacttgcagaattgcggtggcaaatacccattgccctccaagttgtgcgttagcgtatttatccgtagttgacagcaatgaacatattactactgctttctgtattttctattaacgcatgcacatagtttattgg

SEQ ID NO: 38561 - DNA, 1370 bp, Zea Mays
tctccctcccctcgcccgtacccacacttgattaacgtgtcagctcgctaccggaggccctcgccaactcgactcgtactcccgttcccggcggcgatccggccggcaccggaaccctagggttccaacgaagcagcgttatttctgggttccattataggaaattaggaatgatgagtcatcaacagcaaattgcccctcctagtaggggttctgtgaatggattcccccatctaaagctggatagggtgggtagtggaaggcatgaaagtaaaatcgtgaggtcatcatctggcggttttaccaattcaggaaatgacatcaaactagggcatggaagccattcgagggaccgactaatctatgttctaacacaacttattgggcatcatgtcaacgtgcatgtgaaaaatggctctataatatctggaattttccatgcaacaaactctgacaaagacttcggagtagtcttaaaaatggctcaggtcataaaggatggttctgccagaggacaaagatttgcttctgatgttgtaaagaaacctgagactatgataataccagcaagggagcttgtacaagtttttgccaaggatgtagcacttggcggtgatgagctgccaaaaggtcctggtcatgacaaaaggaaggacttgctgattgattctgccatttcccgctctcattaccttgaagagagggaacttgagcgctgggcaccagatgaaggagattcagagtgtatcgaactggagaagtatgacagaaagggaaataggagctgggatcagttcgaaaccaatgcagccttgtttggggtaaagagtacattcaatgaagaaatttataccacaaagcttgagagaggtcctcatatgagagagcttgaaaagcatgcttcgagaatagctagagaaatagaaggagaagataccaaagatattcatcttgcagaggagagaggcttattcctgggtgatgacttggaccatgatgaagagataaaatattcagcagtgcgtagagacaccgataacagcaagtacaagccaccatttactaatgtcccaagcagtacataccaagttgatttgtttaacaggacagtcaatattgttcccaaggatttgctgggatgttcatcaacaatggatgaagaatcatcatcccacatatttgatgatattgatgcatctgccactattcaaaccaatagcgttagacagccaacatctgattaccttccagatagactctcgtccaatgatgaaaacaggtactatctcccatgatgaagtttctatttattgttgaccagtagctaaactcaatctagccagctgcatatcgatttagctttagttagg

SEQ ID NO: 38562 - DNA, 1808 bp, Zea Mays
cgccttgcagcagcgaccagtggtcggagacggccacacccgccaccaatcctcctgctgcaatacgtgccatttctttcttcgcttgtctcccgcgaaaaaatatctacagcggctggacctacatgtcacagactctaatgcagtgcgggaggctacatataattagctgatgcagaaaataagaggagattgttcatcgagctgtcttgtccccctcttggcctcttctttccggcgatgggcgccggcgtcctcctcggcgacgccgccggcctgggggcccacctcgccgtacgccgccggaggacgcgcctctaccttcgcaactgggcctccaagcccctgcgcccctcggtctggctcggcgtggccgcctgtgtttcacagaatcgcgaccgccgtggccacgtgaccaggttctccgcctccgcctcgagcggcagtgacgagcccggggagctgtccgaggatgaggcgcagagggagtgggaagcggagctgaatcgccgactgaaggaggccgaggagatggaggagttggagcgcaccgccgagcagctgcaaagccaggccgccgccgaggcccccgaggagtcggaggaggagaagcgcgagcgtgtccgccgcgagctccagaaggtcctactcctacccttaacctttagtaaccagagctcgccttccttcacacactcactagtcattcacttcacacgccaattcttcctcaccaaacacaaataccactactacacactcctcctccttcaagttccacatgttctctaccatttgtgacgcacatgcacctggttctagttttagcgctgtttgcaggagggtgagggtagagtgagacaaaatcattttgttgcgcgagctttgcaggtagcgaaggagcaagcggagaggagggagacggcgaagcaaatgtttgagttgggtcaaaaggcgtacgggaaaggaatgtatggacgatcaattgaattcttggaggctgcgctcactatcatacgtccctcctctctactcggtggcgaggtatctttgtgatgtagtctatggctaaaatcctgtagacatctttgtgatatatagcgtgtatcttcttctagatccaaatttggcttgcaatggcatatgaagccaataggaggcacaaggattgcattgcattgtacaaagagttggagagtagccaccccatgatcaacatcaggcgccaggcagctgagcttagatacattttagaggcacccaagttgaagatatcaaatgacgaggtggtcacaataccacaaattgggagcagctgggattggtatgctggaacatggagtgacaaaatcaaggaacaagaggacaagaaaaggaagatgagtgctgctagcaaccaagttcaaccttctccaaacatctttggagacctctctttcttgcgaccgccaaatgaatggaagaagagtgcatgggtggttgttaccttgtggatccttttgataggaacagcaatctatctgcaatcatgaatggctcctgcagctctgaaacaagccattcacatctctgcgaggcactggtccatggttcaacagaacccagagatgtcgctaatatggccgtgtctcagactgttgcatttgttgtttttttttgctgcagtgtaaatactaactactgtaactagcaatacaagcagatgccatctagttcaattgattagaaatcaatctgtctgctcatatacacttgatgatattgcatctggagttgatttgatattaccgtggtaggagtttattcta

SEQ ID NO: 38563 - DNA, 183 bp, Zea Mays
agggatggggtagaacatctccttgatcctctcttcctcttcaattcaacgtgctcctcctcttctcgatccttgttgcgtggggagggggggagatctagggaggaggaagcaatggagggcggctgaaatgggaggagagggggcggccagccaagggaaaagaggggggtggcggccaag

SEQ ID NO: 38564 - DNA, 1722 bp, Zea Mays
ctttttcttagaggagccctagagctgaaacctgcagaggaagccccgttaatctattctccttgcatccacaccgacgggcaattggtgcgccgtcttctccgtccgcggcggccatcttggtagcggcccgcatcccctcggccctccaaatcaacgaaccagcgcgtccccgctcctccccacgccacgggaaacttccagcaaaaggtcgcgccatcgataaggggagaaaaggagaagtgtcgccgtccccgtcagcgacggcgctggtaccgacggtccccgcgtcgtgtgccttcctcctccgcgagttcgacgacccgctgtgcgtctgctctcttccgcgcgcccaatcctcgtcgagtcgtcgtgccgctgattgacacagcctagatgtgacagatctactttgttccttgctactttttggcatggtcactccctatttgccatcatcgcacaaccatcgccgaaggctgccaattctattgaaaataggatttttgttaatgatgggagaaaataaattgatgggcaaaagatgggaggacatggacactgatgtccttgtgaagatattcaaggaactaaatttggttgagttgtcaccggtctgacaggagacttgcaagaatactacgggtggctatggcaattagctgtgggaacgtcaactgcatgatatttcattacaatttgttcatgaaagatgagcaccttcatttcatctcagaaagatctcctcatttaaaacggttggttatgccagcatggaaccgcatcaccaaagtgggaatatgtaatgctatccaaaggtggcaggcgctggagtccttgacaatgcctaccatcggacatcctccatatattatggaagagatagcaaggagctgcaagaatttcacagaacttaagatcatgggctcatttgatcaacaatttgcctcggcgattttgcagttccttccaaagctgaaagtgctgagccttcgttgctcgaaggtgtccatggatgcactgcaatgtttgctgaactcgatggagtatcttgaggttctgaatatttcacactgcctgctgttggttgtggcggcaaatgggcggaagcaagtggttcatgaactggacagccaaattctcgagagagcttcacggctgcgtgaattccactactgccaaagtaggttgtgcgtcgcgtgccagcggatggtggtggatgaaggcatcatgcgctggtacaggtacgaggattggttttggcgtcgggatgaggtgaggtcccttgatctgcaagattatgggaagctgtttgatgttggttgcgagaggttgacgtctgtggattagatgctaataataggggagcaaaacctgccctcctcagtctagaaacttgtttattggcattcataaaacatagcaagtgacgaggggtaacagtagattaataatatcgataacaatgtgcgtgaatggtgtgcgcgtgtttagctactgtaaatccatgaatagttcgtgttgtttggagaagtttgttatagccagtatggtgtcaagagtatctctacaatttgtttttaagtgatgtggcattggacatgaatagtatttggctttatacgctagagcgtaaaaggctagacctgatactgctagttaggctgtggccagtgcacacgcaaaacactgttttatattggagattgtactgtttatagg

SEQ ID NO: 38565 - DNA, 159 bp, Zea Mays
tttgctaccgtgtatttgtatatcttgtgctattttcattatattcatacatatgcatcttgcatctcatttaggaccgagagatgatgatcgtgcaagtgatgtggtgccaaccacaagatgccgttggtggacgacctgaagaatgatggatctaac

SEQ ID NO: 38566 - DNA, 1636 bp, Zea Mays
ttttaggtagtgaacagaataagtcagcagatggtggaggaacttgtagttgatgatacacctgaaacttcaagaggaataattggcctctgtagtgatccatctacaggacttttctatgcatatgatgaaagttctatattccaggtttccacttcagacgagggttgtgacatgtggcaagtttacttggatatgaatcattatgctgctgctttatcccattgccgtaatcctttccagcgtgatcaagtctacctagttcaggctgatgctgcatttgctgcaaaagagtattacatagcagcatccttctatgcaaagataaattacatcctgtcgtttgaggagatcagcctgaaatttatatcaataggtgagcaggatgctctcagaactttcttattgagaaggctcgataacctcaccaaagaggacaagatgcagattacgatgatctcaacttgggctactgagctgtacttagacaagattaatcgcctcctattggaggataccactgtcaccattataaattcagtagcagagcctaatagctctgaatatcgttcgatagtaaatgaattccgtgcttttcttagtgacagcaaagatgtattagatgaagcaacaacaatgaaactactggaaagttacggaagagtggatgagcttgtgtactttgccggtttgaaggagcagtatgaaattgtagttcatcattacattcagcaaggagaagcaagaaaagcattggaagtgcttccaacggcgcaatgttcctgtagaccttgtgtataaatttgctccagatttgatcatgttagatgcttatgagactgttgaatcatggatgatggcgagaaacaggttgaatccagggaaactcataccagcaatgatgcgttatgtgagcgaaccacatgcaaagaatgaaacacatgaagttatcaaatacttggaattttgtgtgaaagatttgaacaatgtggaccctggagtgcataatctgttgctatctctatatgccaagaaggaggatgaatcccagcttttgcaatttctcgacacaaaatttggtaaaggacaaacaaatggccctgacttcttttacgatccaaagtatgctctccgcctatgtcttcaagagaagagaatgcgtgcttgtgttcgtatttatagcatgatgtccatgcatgcggaagctgtggcacttgctttgaaggtattatgcctctgttggaaactgcgccggagagacaaccctgcaggttgccggcgagttcctacctcccagactttcataaggaaacaaactagctattacaaggtaataatccggactgctatcagtcctgatcttgctgattggatccgtccatataagactgatccactaccatactagctatttcctaaaacagaataaagtaaactagcaccaatcaaggattactttcctaacaatctcctcctaagccttgtggtgcaatttgtctacatccaccagtccgacccttagagcgcaactcttgaaatttggtcttcccaagcggtttcgtcaggaagtccccaagctgatcttcgctcctgatgaagcccactttgatctgcccattctcagcacactcccgaa

SEQ ID NO: 38567 - DNA, 2585 bp, Zea Mays
aaatgatcgaaatcaattgcacacggcgccacaacgcaaaactttaatccgatcacaaaccaatctcgaactagactagaacgtgaaaccctaaaactaatgggtttactgctaattagggtgttatcatgtcgacgaacaatatcagacgtacacgtacacgtgtggtgcagagcgccgggcgcgtatggttcatgacgccgccgccgtgtccatcatggccttgaactcgtcgaagcagaccaccccgtcgccgtctatgtccaccaccgcgatcatctctgcgcaccgctcggccgtcatctcctccccgacgatccccagcctccacagagcgcggcgcagctcctccgcggtgatcacgccgtcgccgttctcgtcgtactcggcgaacgcagcgcgcaacgtgtctgaccggtcgccgtcctcaaacagcgcctcgagctcctcgaggctgatgaacccatctccatcgcggtccgcgacagctaccatctcgtctgcctccacggctgtgcacccgcacaactcgcgcatctcgtccgccgagatgcggccgtcgccgtccgcgtcgaagtggcggaacacgcggacgagggccggctccggtattgtgtacgtgggcgggggagtgctagccgcggctgggggaggcggacttgaggagcggcgtcggctgaagaagatatcgctgcaggacgcggtggcggagacgacgagacccattgccggccgggtgcgacagctttgaatttgattgacggccttgacagggttttgaccctgtttttatataggagtaggacccgccagatagatgaaactcctacgcggttagtttcggtcccatctggtcttatcgtatactggtgcggacctagttgccctctccgcatccaaccagctagcgcgtccgtccccatggcggccgccgccgcggggtttacgccggcgactgcaaggaaggccctcttcactactacagtcactctcctctcatcgtcactctcacgtagggccagcagcatccgcagccgcaacctctcctgctctgccgcgttcaccgccgccacgcgcctcgcgccgcagccgccggacctggtccggtgggtgcagcgcgagggcggattcgtccaccgtgccctccgcgtagcgaatcatccggaacacgggctcgggatctcagcctcttccgccgcggcctacggcgacatcccaattggggacgtcctcatcgcgctcccgagccagcttccattacgactacgccggcccaccagtgccgcggacgacgtgcttgtgcagctcgcccaacaagtcccggatgaactatgggctatgaagctgggcttgaggttgcttcaagaaagggccaaatctgattcattttggtggccatatattgccaatttgccagagacatttactgttccaatcttctttcctggggaagacataaaaaatttgcagtcaataaaagatgtcgttttctcctcgagtttgagaaagaggtacagcagaagcttcatactgtgcccttggtagatcatcctttttatggacaagatgtaaattcatcttcccttggatgggctatgtcagctgcctcttctcgtgcattccgtttgcatggtgaagtcccaatgttgttgcctcttattgatatgtgcaatcatagtttcaacccaaatgctaggattgtccaggaaagaagtgtaaacagcttagacatgtcagtaaaggttcttgctgagaagaagattaagcaaaatgaagcaataacactgaactatggctgctacccaaatgatttctttcttcttgattatggatttgtgataacacagaatccttacgatcaagtggaactaagttacgatggagcccttcttgatgctgcaagcatggcagctggagtctcttctcccaatttttcagcgccagccaagtggcaacaagatatattgtcacagctaaacctacatggagagggtgccgttttaaaggtgagcttaggaggccctgacgttgttgatggacgcctgttagctgctctaagggtgcttcttgccgatgatccagaggctgtgcacaagcatgacctgaatacattgatgtctcttgacgtgcaagttcctttaggtcccactgttgaagcatcagcactccggacagttcttgcgctttgcgcgattgctctccaacactttcacacaaaaataatggacgaccaggccattctaggcggtgggccgcctcttatcacgcaactggccgtccagtttagattgcagaagaagttcacgatcgttgacgtgatgcagaatatcagcaggagaatcaagatgttatcgccgcagaaatccactgggtagttctttaatctgtcgtcagacagtcagttaccattctgtactggctactgcagatagcacaaatcccagttgtgattctgtaccatgttcttgttatgatacttccagtgcctgtcattgaaaagttacatctgcgtcgaacagttaattacttccctgtactgattattgcgtataataataagtcccgattttgagtcttgtaccatt

SEQ ID NO: 38568 - DNA, 5044 bp, Zea Mays
aagctcgtcgcatacgtagacaattgttgaatgagcgaaggttaacatcctcagaatgaagcacacctaggttagcaaaggcatgccagattctacatgttccaagaatgacaacatttagtccatcctgaaatacatcaagatccatgcccttcgcggtgcgcctccgatggccagccgtcgtcaccgcgctctaactctccggtgcgcggtaatggcctccctagcaatcaccacatcaggtggtctcccttcctcagtcgcccatcccaccttctaggctgctaggtcaggtcaccatcgaagccagtaacatttatgtttctacatttcttttgacccgatatgctgcgtctgcattgttgtttgcactggatatagttattcatcagccccaaaccaattgcagtttaactttggtcatgtcatgtctaatttccctgcaatttctgcactccatttcatatatatgtatcaaatatgaacccctgaaactgaagcaggtgttcattttcatatatatgctatttttgttgttccttttaatgatgtgctatgattttgtaaaatagaaagtaagctataccttgatttttattagccatatatagctaatcatgggtgttgctatgtaactttgcaaaatagcaaggctgttgtggacctcttcctcttcgagggattttctattttacaaaatgacaaaatactaggatttagctattaattttagccaatctgttggagtttctttcacttcctttatcagtaagggcccgtttagatccgttaacactaaaaattagcaactaaaattaaaactagttgatacaaacagacctgctaataatctgataattgttaacggaagggctgctaactattactagttccattagcaggatatggagctgctaaagattcatatgcacctttgaaagggaaataggcttacaccttttcctaattgattttggtggttgaattgcccaacacaaacaattggactaactagtttgctctagattataagttttacaggtgccaaaggttcacaacaaaccaataaaaggaccaagaaagggttcaaataaaaggagcaatagacaaccgaagtgtgccctggtctggcgcaccggacagtgtccggtgcaccaggaaactcaactccgaactactcaccttcgggaattctgggagtcgctctgctataattcaccggactgtctggtgtagcaccagactgtccggtgcgccagcagagcaacgactatttcgtgccaacggtcgcctgcagaagacattaaatgcgctacagtgcacgcagaagtcagagcacgcgcagaaggcgcaccggacagtctacaggacctgtccggtgcaccaccggactgttcgttgccccagatgtcagaagctccaacggttagaatacaacggacgggtgacgtggctggcgcaccggactgtccggtgcgccaggcgacagaagccctcaccaacagttcttttggtggttggggctataaatacccccaaccaccacacttcaatgcatccaagttttcagccttcaaacaccttacaagagctatagcattcaatacaagacacaatcaaagagatcaaatcctctcccaagtccaaagatcattgcaatcaaatagtgactagtgagagagagacttgtgttcatttgagctcttgcgcttggattgattttcttcttcattctttcttgtgttcatctcaattgtaaccaagacaagagacaccaattgtgtggtggaccttgtgggaacttagtgtcccgtttgattgagaagagaagctcactcggtctaagtgaccgtttgagagagggaaagggttgaaagagacccggtctatgtgaccacctcaatggggagtaggtttgcaagaaccgaaccttggtaaaacaaatcactgtgtcatccgccttatttgcttgtgatttgttttcgccctctcttccggactcgaattttattctaacactaaccccggcttgtagttgtgcttaaagtttgtaaatttcagattcgccctattcacccccctctaggcgactttcaattggtatcagagcccggtacttcattagagcctaaccgctcgaagtgatgtcgggagatcacgccaagaaggagatgatgaccggcgagaagcccgccacaagccataggaaggctccatccggggagtctggcaacaaggtgaagggatccccttcacatgacaagtcgcgtcggagcggtgacaagaagaagaagatgaagaaggtggtctactacgagaccgactcctcatcgccatccacctccggctccgacacgccgtccgtcacttctaagcaccatgagcgcaagaagtttagtaagatccccttacgttatcctcgcatttccaaatgcacccctttactttccgtcccactaggcaaaccaccggtttttgacggtgaagattattgtatgttgagtgataaaatgaggcaccatctaacctcactccacgctagcatttggaactttgttgagtttggtgcacaggaaccatccgtgggggatgaaggctatgactcggatgaagtagcccaaatccggcacttcaactcccaagccaccactatactcctcgcctctctaagtcgagaggagtataacaaggtgcaagggttgaagagtgccaaagaaatttgggatgtactcaagaccgcacacgaaggagatgaggtgaccaagatcaccaagagggaaacgatcgagggggagctcggtcgtttcatgcttcaccaaggggaggatccacaagccatgtacaactggctcaagaccttggtgaaccaagtgcgcaacctcggaagcaccaagtgggatgaccatgagatggtcaaggttattctaagatcacttgtatttcttaatcccactcaagttcaattaattcgtggtgatcctagatacaagataatgtctcccgaggaagtaataggaaaatttgtgagctttgaattaatgatcaaaggctccaagaaaatcatcgagcaaggcgtctcctccacacccgatgtgcaacccgtggcattcaaggcaacggaggagaagaaagaagactctacaccgagtagagtccccatcgatgcctccaagctcgacaacgaggagatggcactcatcatcaagagctttcgccaaatcctcaagcaaaggagggggaaagactacaagccccgctccaagaaagtttgctacaagtgtggtaagcccagtcattttattgcaaaatgtccattatcaagtgatagtgacaggggcgacgacaagaagggaaagagaagagaaaagaagacgtactacaagaagaagggcggtgatgcccatgtttgccgggagtgggactccgacgagagctccaccgactcctcctccgatgaggacgccgcaaacatcgccgtcaccaaagggcttctcttccccaacgtcggtcacaagtgcctcattgcaaaggacggaaagaagaagaaggtaaaatctagatcctccactaagtatgcaacatctagtgatgaggctaattctactgatgatgaggatgatttattaacactttttgccaacttaaacatgcaacaaaaggaaaaattaaatgagttaattagtgctattcatgagaaggatgaactcttggacacccaagagtacttcctaattaaagaaaataaaaagcatgttaaggtgaaaaatgcttatgctctagagatagaaaaatgtgaaaaattaactagcgagctaagcacttgccatgatattatttccaaccttagaaatgaaaatgccaaattaattgctaaggttgagaagtcaaatatttgtgatgattcaattgacaatcttagaaatgataatgctagttcaattgctaagattgaaaaattgaatgcctctcttgctagccttagaaatgagaatgaaaaattaattgttaaggctaaggaattagatgtttgcaatgtttccatttccaatcttagagatgagaatgacattttacatgctaagattgttgaactaaattcttgcaaaccctctacatctaccgttgagcatgttacaatttgcactagatgtagagatgttaacattgatgctattcatgatcacatggatatgattaaacaacaaaatgatcatatagcaaaattagatgctaaaattgccgagcatgagttagaaaatgaaaaatttaaatttgctcgtagtatgctctatagtgggagacgccctggcattaatgatggcattggcttccaacagggaggcaatgtcaaacttaatgcccctcctaaaagattgtcaaactttgttaagggcaaggctcccatgcctcgggataacgagggttacattttataccctgccggttatcccgtgcacaaaattaggagaaatcattctaggaagtctcactctggctctaatcatgcttttatgtataagagtgaggcatctagttctaggcaatcaacccgtgctaaattgtctaagaagaaaactcctattgcatcaaatgaacctaatatttcatttaagacttttgatgcatcttatgtgctaactaacaaatcaggcaaagtagttgccaaatatgttgggggcaaacacaaaggatcaaagacttgtgttttggtacccaaggtgcttgtttctaatgtgaaaggacccaagaccgtttgggtacctaagaacaaggcctaaacttattttgtaggtttatgcatctggggctcaagttggatcatcgatagcgggtgcacaaaccacatgacaggggagaagaagatgttctcctcctatgagaaaaaccatgatccccaaagagctatcacattcggggatggaaatcaaggtttggtcaaaggattaggtaaaattgctatatcacctgaccattctatttccaatgtttttcttgtagattctttagattacaatttgctttctgtttctcaattatgcaaaat

SEQ ID NO: 38569 - DNA, 2307 bp, Zea Mays
cagagacgaagacgccggcggccgcacctccctcctcgccgccgccccggcggcttctagcttctgctgccgatgccgatggcgctattgtctcgcggattgatgggtgccacgcgcacttcaacgcgccgtgctcacacggcgctggcgcccgggccccacagcaccgctttataagtaaccagcacgcgctgccccctcccctcctcccccggtctcactcacactccttcatcgggctcggcccgcgcggtcgtgagttcgtgactgcggaggaagtagcgcaggcgaaaaggctgcagcagtggacggcggcgaaccctagcctagctccgcgagtgcgttggcggtttgattcgatggccgtggcgtcgcggctcgcggtcacgcgtgtgtcgccggcggacggcgcgcgccccgcggcggcggcggggaggaggagtgggctcgcggtggttcggctcccgccgaccgacagcagggggagaaggaggaggcgcggcggggccgtcgcggccagccccccgacggaggaggtcgtgcagatgacggagccgctcaccaaggaggacctcgtcgcctacctcgtctccgggtgcaagcccaaggagaactggagaattggcacggagcatgaaaagtttggttttgaagtcgacacattacgccctataaaatatgatcagattcgtgacatactgaacgggctcgctgagagatttgattgggagaagataatggaaggaaacattgttatcggcctcaagcagggaaagcaaagcatctcactagaacctggaggccaatttgaacttagtggcgctcctctcgaaacgttacatcaaacttgtgctgaggtcaactcacatctatatcaggtcaaagcagttggagaagaaatgggaataggatttcttgggcttggctttcagccaaaatgggcactgagtgatataccaataatgccaaagggaagatacaaaataatgaggaattacatgcctaaagttggtacccttggccttgatatgatgttccggacatgtactgtgcaggttaatcttgacttcagttcagaacaggatatgataaggaaatttcgtgctggcctcgcattgcagcctattgcaactgcaatatttgccaattctccctttaaagaaggaaaaccaaatggatttctcagcctaaggagccatatctggacagataccgataacaaccgtgcagggatgctcccttttgtctttgacaactcatttgggtttgagcaatatgtggattatgcattagatgtccccatgtattttgtgtaccgaaataataagtatattgactgcaccggaatgtcatttcgggattttatgcaaggaaagctccgacaagctcctggggagttgcctactcttaatgattgggagaaccatctaacaacaatttttcctgaggttaggttaaagagataccttgagatgagaggtgctgatggtggcccatggaggagattgtgtgcgctgcctgcattttgggttgggctgctgtacgatgaggaatcattacaaagcattttagacatgacttttgactggacacaggaggaaagagagatgctaagacataaggtaccgttgactggtctgaagacaccatttcgcgatggatatgttagagatttagccgaggaagttctaaaactggccaagaatggattggaaagaagaggatacaaggaggtcggtttccttagagaggttgacgaagtggagtgacacctgccgagagacttctgcatctgtacgagacgaagtggcaacgcaacgtagaccatgttttcgagcacttgctatactgatgttgtagatgtaccctagtacaaaaatctcatctttgattcattcaacgccttgagtgggagggcacaggaacacagcttttggttaagttgctgaccgggggaacagctacccggtgctgcgtgcggtgcctacaaataacttcgctcgggacggatcactactctctagggagatggaacaaatcactgtttgtaccggccctttttgtttctgttttccttcagagatggagatgccgtattgaaaataagtccatcttctgtacgatgggaactgtctgttttccccccttctttcctttcagcattgttgggatgtttgtcccgtgttaacatgcaaaatcaattacgtgtacgataaataagctgatggtttgatccggaatctgcaattgcgcgtgccttttcccaccttgtttttagccaaaaatcactatggatgagactacagt

SEQ ID NO: 38570 - DNA, 1585 bp, Zea Mays
cagcaaaggacccttttcttgttttggcagtaatcgaccttattcgggtacttcttcatctggcgaagctcggctggatcgaggtgcacatttctctagctggagaaaagcacatgagaataacatgggttaccaatgataactctgtcccatctgtggtggactatggaactaaagaaagtacatacacaatgaaatctcaaggagaaagcacatcctacagctacttattgtatagttcaggaaaaattcatcatgttgtcatcggacctcttgaagataacactatttattactaccgatgtggagggcagggtccagaattccaatttaagaccccgccctcccaatttcctttgtcattggctgttgttggtgatcttggtcagactagttggacaacatcaaccctgaatcacattaagcagtgtgagcatgatatgcttttactccctggtgatctatcttatgctgattatatgcaacacttgtgggattccttcggcacattggtggagccacttgctagcaaccggccttggatggtgacagaaggcaaccatgagaaggagcacattccattttttgagtcaggatttcaatcttataatgcacgatggaaaatgccttatgaagagagcggatctagatcaaatttgtactactcttttgaagttgctggtgcacacatcataatgctaggttcatacacagattatgatgatagctcagatcagtatgcttggctaaaggctgatcttgccaaggttgatagaaagaggacaccctggctcattgtgttgttgcacgtaccatggtacaatagcaattgggctcatcagggtgaaggcgacagtatgatggcttcaatggagcctttgctgtacgctgctcatgtggatatggtaatagcaggtcatgtccatgcttatgaacgtgcggagcgagtctacaattccagacctgatccttgtggcgctgtccacataactatcggcgacggtgggaaccgtgaaggcttggcccgcaggtaccgtaacccgaagccagcgtggtcggtcttcagggaagcgagctttgggcacggcgagctaaagatcgtgaactccacccatgcccactggacctggcacagaaacgacgacgaagagccggtgagaaccgatgacgtgtggataaactctcttgctggttcagggtgcatccaggagggcagccgtgaccgtgagtcgaggaagatcctgatgtctccttgatgcttagcagtatagcttgggcctgcgatgtactgtgtatataatgcgtgctacttgataatctaacacctagtaaaagttaatgcgtcgtgctgcttgcctgcgtgtatactggagactggtttgatctggcgcgtttgctgctcttgttgtgttgtaccactatggatgtttgtagcaaagtgacatacgacggtgttgtaatggactgaagatgaatagatgatgttccagtaaggagtgttttgccgtgtctaggaagatacatcaaaatataaatcactccctccttatcaaaatacagttttttcttgctttcttttttttct

SEQ ID NO: 38571 - DNA, 5016 bp, Zea Mays
attcaacaccggggaattagagaggtggtttccgcgggggagctgctttgcggggaagtgggaccatggcctcgagcctggttaccacggacaggagatggggtgctactcctgcaaggaaatctagtatgactgttctgggaaaagtcccaaaaccgattaatttaccaagtcagaggttggaaaacaatggtcttgatcccaatctggaactggttccaaagggcacccacacctggggcagcaaagcaccatctacaacaccaaacgcatggagttcctcatcaattctgtcttccaagaacgatggaagttccacttcatctagtcacttcaatgtccggcccacctctggcggaggctcaaggccatcaacagctggaagtgaatcacttggttcacccaatgcttggggtgcaaattctcgcccatcttcagcatcaggcacatttccatcatctcatctaccaatggccacaaatcgtccccaaagtgcggaaacaagacctggaagttcacaaatttctcgatttgcggataatgcttcagataatgtgaaagcatcgataaggactattgatagatcggaatcttcatcacgtgggcctgggttcacattaagtactggtgatttcccaacgcttggctctgaagcaaacagtcaacgagggcatagttcgaaagggcgcccaacttctagtttgggtaaagaggtgtcgcaaggtgaacaagtgaagagcctagcaactggaactggtgaagtaatttcaccatccaataatcaccctgttgatatcatgaagacagagcatcatgcacacactggaggtgctcctgtcccagccacaagtgtgccaaatgaaggcttgcaacaacagccatatccaccaaattttcctatgcctcctctgcagtttgattcatggcgtgcacctcctggtcacccccctgagggaatgtggcatagaggaccagtgccaggtgggccatacagacctgttggcccccctggtagtttccctgtcgaaccctttggttattatggccagttcccacccaactccgaagctgcaggaaggcagggctcagggcatggtggatatcacactaaaaatgatgtgtatcatcctatgcctcataattcctatattatgaatcagcctgttattccagtcagaccagtttatcagggtccagtgctgtatgatgggtattatggccctcaagcaaatttcaataacaccaatgttagagatcctcattttgttggaggtcctggaatactaaatcaattcccaaatcagaatgacaggtttcaccctggacatcctcaaaacagaccaggcaaacatgaaacggtcccaagggagcagctggaatctgataagctacatgtctttcaccaagaacaccctgggagtttgcatgataatccagatcgtctaggaggttcccgtgaatttgaaaggaatgtgcagccagcaccgccacttcttccacatcctgatggaaaacagactgatatgaacatgagggcagatacaagggacacctttagtgagactgaaagaaccgtggtacttacaaaatcggtgcctaaccagagaggttcggttggtatagaccatttgtctgtttatgaaaacacacgatcccatcacagagaaacttgtgatggcactctgcgcaagaagttcaaggaggatagctcagttgtacttgaccagcatcctgtcattaagaagaatgcagctttaatagagaaaattgagagtttgaacaacaaagccagaaatgtctatgcacagaatctcccagaaccagcttcatccaaggaattcaagaagcataaaaaaactactgatgtttcatctaatgatgtcatcagtacgacatgcacatctgatcaggcagtttctgtttcacatatttctgctgtggtgcagagacgaccaaatgtgaccattgagggtacaattcttggaccggcacattcacatttaactgaatttagcaaagctgagaagcttggtgattcaattaacaatcatttacataggagagttgattcttcgagaaacagttaccatggtccttgtaaagataggccagctaataaattcggaagttgtggacgtggagaaagttacataactaattcattaccagtagctgatttggggaatgatatccatcatggccaacaacctcagattgcctcacagctgcaacctgtgattgtacctgatgatatgccagcttcactcgattatgagtctcagaacaaaaagcaggatgcagcatcaaatgctcaaaacaatcagcgggcaaaaatgaaggagttggctgcagaacgtgcaaaaaggatgaaagctgaggaagaggaacggataaagaaccaaaaagcaaaagcactcgcaaagttggaagaattgaacaggcgatcatcagtacttcagaagaaatcaaatgatacaaaagtagaaactgatgatgcacatgataagcaacagattggacttgatgtgaatgctaaacttgacacttcaactgaacaacatgatgttgttacgcctgataggcttactgctcttctgcctcctaatgatcccaatcatactatggttcagatacaggcccagtctactgcacaatcaaatgctttagatggtggcaaagcgcatgatgctcataccacctcatctttggtcaagaacacacacagcaacatggagcatgttgtgcagaagagtatctcacagtcgcataatatcagtatggtaaagactaagcaaggctacaggaaaagacaggttgtttcagaggagaaaatttctggcgagaaggcaagtgcttcagtaaccactgattccagtgtgcagaaaaatgttgatgttcccgtcgacacagtaacggctgttgttgcaccacatgatgatcccccaactcagaacaagaagggaacccggcatttgaggagtaagaaaaagctatgaatcaggagcatgttaattcagcagatggaacaaatagtactgaaagtggcctatcaagacctcagcaagcaagaaaatctggaaagcatcagcatgttcttcggcctgttgagaagccacatgggaatgatggtgtcttgtgggcaccagatatgctaccattgcataatgagcagtctgatggagccatgccgactgcagcagtagctgacgtcactcagccagctgggaaagccatcaatgatggagagaatgtgacaagaacaaagagggctgaaatggaaagatatgttcccaagcctatgtccaaagagctgcaacaacataatccaagccatgataaggaagcaattgataagcccggtgctgctaaatcacatcctgcagccgaacccaagaaaactagcaaaggacatgggggcaaatctaatccttcttggcgcaagcgggatccagatcaacctgctatggtggcaccaaattctgttgaccaagcagacaactcttatgaatcaaaggaggttcagaactgcaccgatatgaatcagcctgttgaacttggcaaggaagatacacagttaaaatccaatgtagatgctgctgctgagaatagctcagctccagctcaaactgttccactatctgccggtggtgcaaaagaacatagtgcggctaacaggcaaaggcgacagcattttaaggctcaaagaaatgaagcaagtagctactcaaatgagagcaaagttagagagggcaagaacgactctgtctatcaatcagcatcaccggtgattgattcgaactcatccaatcacaagaatgtgccaagatcagatgtgaaaaacagcggcatagtttcacattctagagcctggaagccgaaaaccaattcccatcctcagaacagctcagacggcaagattgctgttgaagggaaagtggattcccatggtggtaggcttgagctgaacatgcccaaaggatctgatacaattacccatcaagacaccagcagtaaaccgatgaaaaggagtgatggcaccgatgaggcctcacacagcaaacaggagaacctgacacaggaagatggtaaccagaagatcgagactggacaggagcaggctaatcctgcaccgcgtcgccaaggccagcccaatgcaaggtatcacaggggaggtggggcacacaggggaaggggcggttatgacactgggaggccaaaccatggcacaaacgcggagaggtggaagggtggcagccatcttgaataccagccggtcggatcccaaaacaaagctggaggcgacttccagctgagtcagggcatggaagatcgaaccgaggggcctcctgcatctggacaagcgttcggggagcgtggccacagcagggggctacgcccagcaggccgctttgtccggcgaaacactgcctctacgtctaccactaattctcaccaacatgaataatcttccgcggctgccacatccgctgagctgcaggaaaaaactcgccttcgtggtggcgtttcacaacatatttggatgcacttgggtgggcggttggtgtccgtcgtcaacgacgagtctacggtggtgagcattaggatcatgtaacggtattagtctttgccccaaagggcacaccctggcccctcacgtgtcacgtgtgactagattttttccagaggaacatccacccttgtttgggatgcaacgttggaacgtgtgctaacagagttgtgtttgagaactgggtttaaatgttgttagcctgtgttgctgatgggaactgagagtgttggtttttgcccaactttcatggcatgtctttgtttgattgttggctctgttgttcatggcaatcgctttggatcctcgcgaccaaagaaaaaagtagtagctagacatgtagctgacaatttgcgtaagccatgtcagtgctaccatttcatcttctaacgtagcagtggtctacaacatgtaagtgatgggtctttgggtgtcgtggtctccgaaag

SEQ ID NO: 38572 - DNA, 2394 bp, Zea Mays
cgaacgcgtccttaaccgaaatggcggaatcggcctcgcagagggatagccggaggcccagaagcgtccggaaagacagcgcacgaagcaatctttccctttccccaagatgggattcggcttcgttcgtctcgccgcccgcgccgcggtttctcgccggggcatgacgccagcaacctccgcccgccgcgcgctcgccccacccgccgtgccggcggagccccgctgcgggccccactggctcgtggccgcccgcggccacgtgggccactcgcaccaccgcggcggggaggacgagggcgagacatccgagaggatctttcgtctgggactcgccgctgacgtcgtactcaccgcggggaaggccgtcacaggctatctctccggcagcaccgccatcgccgccgatgccgcccactccctctcggacatagtgcttagcggggtggctctgctgtcttacagggcggccaaggctcccagagacaaggaacatccctatgggcatggaaagtttgaaagtttaggagctcttggaatttcaagtatgctgttggttacttcaggtgggattgcatggcatgcttttgaagttcttcagggagttatgtcttctgctcctgatataattggcaatacattgcatgcacaccatgaccatggtagcagtgggcatcatcatggaatagatttggaacatccagttcttgcattgagcatgacaactttagcaatatctatcaaagaagggctatactggataacaaaaagagctggggaaaaggaaggcagtggtctgatgaaagctaatgcatggcaccatcgtgcagatgctatttcatctgtcgttgccctagtaggggtaggtggttccattcttgggttgcctcttcttgatccactagctggacttgttgtctctggcatgattctgaaagctggtattaagactggatatgagagtgttctggaattagttgatgctgctgtggatccttcacttttagaaccaatcaaggaaactattttgagggttcacggtgtgaagggatgtcatcgattgaggggaagaaaagctgggacatcattatatcttgatgtgcatatagaggtatatccttttctgagtgttagtgcagcacatgatatcggtgaaactgttcgtcatcaaattcaaaaggagcacaatcaagttgctgaagttttcatacacataggtagcctgctctaagttgctctcaacactgtgcctaccatatgtacatagttgttaaagcgtccttgaagcgtcgcttaggcgacgcctaagtgctaaggcgcgctgtaccagcaaggcgtccggctcgccttagaaccgagcctaaggtgtccgttttggctattgaggcgtcactctggcgccttgaagccttctaaggcgacgtcatgaggacaccttgaggtgctgtagggtgagcatgcacgcaactgcgatttgaatccttcccttgagttcgccatctgtagcggcggcggcggccccccacctccgcaaggtctctaggctgcggcggtgagttctcctgggccctggccccctcacctccgcggcggctcctcccctcggcgagctttccaggctgcaccaacgagcccctcccttccgcggcgaccccctctggccctcccctacctgatccctcgtacttagtaggcccgaccatggacctaaaaaggatcctgaaggactctgatggaacaaattcagaagctatcccacggcaacaaagtgcagaagccatcgtgtctaatattatttcatctcatttttcggagaaaatggcgctcgaacatctaatgctgcattacgtgcaaggaagagtgttgctccaggtccaagtttcaatgtctccagaaattttgattcgggatgcaatggaagtcgcgaagcaagccgaagaggagatactcagggctgatgccagcataagccaaatcagcttgcagctaagattgggccaacaaatcaagcaacttcagctagcatcgcaagaacgtcgctgatctacatgcaggagatcactgatccatttgctggctgcttcatgagtctactcgggagtatttccttttgctaatttttctgacatacatgagcttggtctgctgatgaggcagtaggctataggattctaggaaccgactgtgtacattgtaatcagagtgttcggagacgtgaagctgagtttgtaataatacacaagcagccttgctcagaaatgtactgggcaacaaattgtctgccacatactgtcaatgtaaaatgtatgaacaagttcctcactggccccgctataataacaacgaaccatggctactgatgcaaaataaaatgaatattgttttttttctgtg

SEQ ID NO: 38573 - DNA, 1340 bp, Zea Mays
tgaccaaacgagaaggcagaaaagaggccccaacagccgcgctcctattcagaaatctatctgaacagcttgctgagattgtcaatcatggaaaactggtgtctgatgagatcatcataaatctgctgtcaagacgtctggaagagggagaggaaaagggtgaattggggttcatccttgatggctttcctcgaaccataggacaagcggtgagctaattatttgacctgaccgtaagtatgcagcaaaaacacatacttgcctcttatcaggaagcatttttcacttgcatcttcttttgagttcttatgaaaatcttagatttcaccaagcacaagttggttagagttgaatagatttcatccgctctagccctcagagatgagcagtagatcggtatccctggatttctatctcaacgttataacttgtgtcaaaccttagacactggggtagactgcttggtcctaatactggttttatcatgtgccctgtcaggagatacttgaaggagtcacagacattgatttggtgatcaatctcaaactccgagaagaagctctgcttgcgaaatgccttggcaggaggatgtgcagccagtgtggagggaacttcaatgtggcctccattgatattgagggtgaagatggtgggcctcgaatgtacatgcccccactgttgcctcctccacagtgtgaatcgaagctgattgctagagcagacgatactgaagaagtggtaaaagagcggctgcgtgtgtaccatgatttgactgaaccagtggaggagttctacagagcacgtgggaaactgctggagttcaatctgcctggtgggatacccgaatcatggccgaagttactgcaggccctgaacatagaagaccccgacaataagcgatctgcagcagcatgattcttgttttgttataggaatgcacattctaaattgaacatctgtagactatgtcaaagctagtcaaattggtgggcattccttacatctttgggaagcctactccattctggatccagattattgtggcatggcactcaactgtacagtagattgatcatcgattggcaaggtcgatcgatggatgtgctgactgtgatcctcgaacgtaaggtgtgtaaaaaggcaagaaaataattgttgggcgtcgagacattcacttgtaggtcgtaccatgcatatgcttgttgaaagaggggagcatgccagaaacgtctgatttttatttttatttttttatttgggagggctggctggctggagcttttcgtgtatgtgacgagctacctatgtacgcaatacactaatactacactgcatgcgag

SEQ ID NO: 38574 - DNA, 2270 bp, Zea Mays
aagttattctcaaatgctaacatgtcttgcaaaaaaatggatggaacctccaaacattattttgatactccctccatcgtagtatataagacataaccactttttattgtagtcccacaatataagacacacactctctaaacatacgtacattgatgcagtatactagtgttgatagagagaactaaatatatttgttggtttttgaatcagaggtgttacaccttatatactaggatggagggagtatccaccaatcctggtggtttcgttaagatttcattttttatatttgttagtggtgttgattcacaattaaaacaatgttttctccttttcttcagattggggttctcaaagatgcaacagtggcgaagttaccgaattctgaagtacgattgttcttggaggttcatttcagacaggagaaccaaccaattgctccttggaataccaaagaagatatattacttttcttcaagctctatgatcctgaaaaagaagacctaagatatgtcggcaatttttttgtgaaagcatcaggcaaaccatctgatatagtagaaaggctgaatcagattgctggatttctgtctgatgaagatattgagctctatgaggaaataaagtttgaaccagttgtgatgtgcgtacccattgagagtaatgcttcgttccgttcaagccagattgacaatggtgatataatatgctaccaaaagcactgtttgccagattcaatggatcgatatcgatatcctaccgtcccttctttctttgaatatattcataatagacagattgtccatttcagattgcttgagaaaccaaaagaagaaggcttctctcttgagctttcaaaatgctccacatatgatgatgttgttgagaaggttgctaagcaactacgtatggatgacccttctaaaatccggcttactcaacacaatccatcgtctcagcaacccaaacctcacttcatcaaatacaggagtcttaattatctttcggacatgctacataatcacaatcagatgtgtgacatattatattatgacatcctggatattcctttgcctgaactagaatctatgagatctctgaaggtcgctttccaaaatgccgcaaaccatgagatgtcgtttcacattatgcggttaccaaaaagtaactctctccttgatttgattgaagacttaaagtcaaaggttgaaatttcttgtaatgatgctgaatttcggttttttggagtctaccttcacaagatatgcaaggtgtatcaacctggagataagatagattcagttaatgaccatggacccttgtatattgaagaggttcccgaggatgaaaaaaatgccgggcctcatgaccgtttggttcatgtctatcattttgaatataatcatcatattcagtattttggtgaacctttcttcttcctaattcgtgatggtgaagctttgtcggatatgaaagtacggattcagaagagacttcaagttcctgatgagcagtttctaaagtggaaatttgctcatgttacattcagtaagccagaatacctccaagattcagatattgtaatgaacagattccataaacagagacctgtttatggaggttgggaacaacaccttggattggagcatacagccaccaccccaaaaaggtcctacttaggcaacaaccagaaccgccattcttttgagaagcctgtgaggatttacaactaaagctaggaatactttttacatgcgatgaatgatgaacaggatatgaagcagtcttgttccaaaagcagtcttttggtgatgtacatggagcttttgcatagagtagtttatgtggcaattatctcaagaattttcatctggtggatgtacagggtccgtatagcaacatttccttgtagaaagttgaagctgtatatcgagggtggatttacatgtgttaatcttttcgaccccaagcctctgggaggctgtgaaccatagcctcatgaaatatgcctgttgttcattcagtgtttgtgtttttctcgtttgtcattattgtgcactcgcttttaatatgctcggtctattggaccgagcaggaaaatgatgttttaccttatagtggtctaactggttcattaggcgcgcaagtgcacagttgaattactcctttggaagcttgaaacgagaaacataggaaatgtctatgacggtggacatgccaagaccccaagtcctcggtttcaaggcctcccaccgctggctttctag

SEQ ID NO: 38575 - DNA, 2060 bp, Zea Mays
ttctccctcaccgacaggttgaagcgcacatcgttccaatcgtcgccgccggctacctcctccagccgccgcgcctccctcctccacccgctgccgcctccctccaaaacttgtcgtcgtatccctccaacacccgcatctggcgcagacgaccatacacccgctctgatgctttaaatcaatgtgtatggggttccaagcgtctgacctgacaaagaccgccccaagcaacgatgattcttgaagcgattgcagagataaaattgaaagggctgatttccttgatgtgcgcttcaacgagttggagaggatacttcgccaaccgaacaagcctaagtgggggtgatgatgagccaccggaggcgttctcgcgctgccggctcgccgcctggcgacgccagtacgggtatggtcatctcacgtgggagtggaagcggggcctgcgcagttatctccacccattgctctttgctgctttgtacaagaccctggcgctactccatatggacactccgtgggttatggtgatggctccacgtctcgtgcaatctttgtttgcagcttttggagatctatacctatataaactttccaaacttattttcaatggtcaagttgctaagtggacgttattttctcagttggttaactggttcatgtttttctgtatcacacggactctatcaaacagcttggagactgttttgaccgtggctggactctattattggtttgctgcaatagagtcttccaaggcaacctcaatcgtttcaaagcagcacgcggcctgtgaacaaagtatcccatcaagaaaagtggctcttctgatagcagccttgtcatgtgccattcggccaacaagtgctgtaacatggctatatgttggccttttggattttattcagatgaaatcaaaatgtcgctttatccttcttgatgtcattccagtgggggccattgtccttgcagtaacaacactccttgattggtggatgtatggttcctgggtcatagtgccgcttaattttttgaaattcaacttattgtcttccggaggagactactatggaacacatgtcttccattggtactttacacagggttttccatccatgatttggacattcttaccatttgcattgtgcggtattgtaaagtctcaggaatggaggctttcaggtctaattgcttgggtgttaggggtttacagcattcttggacataaagaattcaggtttgttcttccagtgctacctttagcattgatgttctcaggttactgcttagcttccatgtcacagtccaagggcaaaaatcagcataggaaaggaagtctttcaaggctgcagctttctgttattcttctcgtcataaccaatgttcccatggctttatatatgtccttattccatcaaaggggaacagaagacgttatgtattatttgtcaaaagaagcctatgatggaagagtgaggagtgttctctttctcatgccttgtcattcaacaccttactactcaaccttacattacaatctacctatgcgttttttggactgcactcctagtgatagcaaagggaccttggatgagtcagatcgtttccttacaagtccatctgagtttgtcggcgatgtttttggaaatttatctgcattcagtcacattgtattattcgagtcagaagaaagacatgttctccagttgcttctgcacaattcctttcttgagatgaggaggtttttccactcacatttcaagattgacagagaccttcagtcggctgttgtggtttattcatggagggatgtgctatgatttagtactgatgtggcagaaaatgcctgttagctcgtgtaacaatccccacatgtttaatgttgtttcagcttttcatttgagaaatgagttgtggcattgctggatacttctgatatcttaatcctcttggaatgagatgttatgttacttttacccaagtgctttacgacggcataacaattcacagttcgctttcttgcatcgagtctctatgtccatgatatctgcttctaagataaa

SEQ ID NO: 38576 - DNA, 5185 bp, Zea Mays
caaaaagtcgtcaagcacgcacaaagccacaaagcctggagtagagtactacagagagccaagacttatgatgaagagcacttgggtggaacgaactacattcgccaagataacaggagcctgtccgagaactggagcggcatcggtttggaccatgatcatgatggcctagaagacgaggtggcgttctcggatttcgacaaccgcaacaccttctcttcgtcgaacagcgagctccgtttctcttcgtcaaatgagcacctgcggaacagaaaggcgtgcagaaaccacccgtcgctccttccgcccgccctctctgccgacagtttgcttaggtcagtcagcaggatgacggactcgactgaatttaaggccgttacgacgtgcaatacctgcaagcccgcaacgatcagtagggacgacaccgaagctgctgatgccaggtccttgaagaacctcaacagcaccgcgccgctgtcaaactcccggacaaggcgcaatgggccacacattctctcctggctcttaccgaagtcaaagaggaagccaaaaccagatgtgtccccaaacaccgtcgaatgcgagaacatgtcgcagcttctgaaggactggggtgtgttctcactggattccctgaggaaagaggtcgttgaggccaatgagcacagggacgccgcgctccaagaggtatcagagatgaaactatcactaggagagctgactgccaagctagtgagcctggaagcatactgttcggaattgaagaaggctctaaagcaagcgacgagcgcgaagaacatgcagtctcactcaaagagatcggctaggccagttagcgggagcagagacagcttcttgcccgtcagtcacgaagttatggtggaagggttcttgcagatagtatcggaggctcgtctctccataaaacagttctgcaagatcacgctgagtgacaagcacccgaagctagtgctgtaccacctcgaagctctgatgaaccaagcgatgtaccaggacttcgagaactgcacgttccagaagaacgggtcgcccaggtgcctggacccgaagcaggagcagcaggagagcttcgcctcgttcgtcgcgctgcgcaacctgagctggaacgaggtcctgaagaagggcaccaagcaccactgcgaggacctgggccgcttctgcgaccagaagatgagctgcgtcgtgtccatcctgaactggtcgtggccgtgggccgagcagctgctgcagtgcttcttcgtggcgtccaagtgtgtctggctgctccacctactggccttctccttcgtcccgccgctgaccatcctacgggtcgaggaggaccgggcgttcgaccagacgtacatggaggacgtgctgctggacaagcagcggtcacggaatggtccgccgccgtcgtcgtcgcaggtgaaactcatggtgacgcctgggttctatgtccaggacaggctgctcaaatgcagggtgctctgcaggtacagcggctagatctctatcgctgattggattggaggtgcttcgagtgttcttctttgactgattgttagttattagtgtgatgcagtagtatctgttctgctaggttgcaaagtgctatactgggacgccagaatatcattattttgacccttggcatgcccgtcagcatctctgtaacataagagagtcatgttgtgtaagaaagatgtgtgcaagattttagctcaacaggtttcctcttaacttttcgaagggaagaaaggggacctttttttatgaacagatgcatcagccattgttcttgtttgagatgacgaggaggaacgagccctgtggacagcgagtgaactgagatggacaccaatgcacctggtatttccttattattaaagcggaacataaacgctgcctaagaagctatccacgtctgccgaattattaacgcacgtatgatcattcatggacgtcttacattgctcttaaagcggaacagaaacgctgcctaagaagctatccacgtctgccgaattattaacgcacgtatgatcattcatggacgtcttacattgctccacggccatctatttctggattgttctaggtgacgtttgcttcgtgtggacgactctcgttctcttcgtctctacgggtttgcagctgacgctctccatcctcgttcttctcgctccgttcctctttccctcctcccctccgtcttggttcttcacacctggttcttctgtctcccgttgtctctatcgtctgctccggtgaacccgcatcgttcctattccttgtgctgcttccgtcgtcggctccagtaaatcactttgttcgccagctcgagatcgtggacggcttgctaaaatcaggtttgttttcattgggtttccatttctggaagtgattaaggcgaagtaaatcttctttcctcgaaacgtatacactttggtgcatctgtggaaatctgatttgttgggtttctgatctatttggctctttgcattttttaaatcccctcctacaaatcctgctacctccccgtctttttttgtttgtttggaaaatttgtttcgtatcttccctcctcgtttttttgcttcagttcgaaatcgatttggtgggtttctgatggcaaccctcgccaccgcctcatgggtacgtgccgagccgccttatctgttcgctcaccactttacattggttcttgcgcctgcgatttcggtgtcgtaggatcatgcttgtgcggatgtgatggtcgctgtggcttcgcgtcggtgggcggtgggatttgggctgggattctcgcgccttgtctctagggtttgggtttggtgcttcctcagtgcggaattggggattataattcctttaggtttgattttatctcgggtaactgcgggataatagcctagtagggaaatcgtggggattcttaaggattattaagtttctgatttatctctgccttatttagctcgtctgttgtggtggcttttccttcttgctgatgctgattatgcttccggttatgagccacaaaacaatattgatcggcaacctgtagttttgcctcagttcatcgcttgctgtctctgttaaatgaccaagaataaagtttagtacttcacacattaggcatccagtaaaacggtatcataattccaaagtgaacagcgagacatatttctcattcttagggaagaactacaaatgagttgagatatagaagctttagctcaggattcaagcagtaatgtaggaagcttactctaacatattcaagatcttctcgcaattttgacagattattgttgacaccatcaccatttgaacgttgttgcttctcgagtcgccttatcatcctctcaatcttccgtctctctttgtattttgaataccaacatcaagaagatggtaagtacattccatacatgcatagaaaagaaacttaaaatgaaaaggaaagtataacagaccaaagaactttatctttctatctctaaattgtaatgtccgctggacaacaagttgattctgaagctcttgttgcctcttcagttcttccagtttcttctcttgagcaaccctaatctcatccggaaggtcctgaaaattaaacatggagcagtaactaaacaacatggctagatgaaaagggggctatactccattgatgtaatcagaaaataaaatggaagcatatgtgctattcttttatacatgtaggttgctcacataaagtggccttgattttaaataacacaaccatggtaagcttatacccccctcccgctgtagaattgaattacacaaccagttgccacttatgcataggggtggtaatgggctctagattttacattataaaatttaaggatcgaatcgcgttaggaccatgctctattcctttttttaactaaaatttattaagggccctaactgaaaaataaaattttggatcgtggtccattaccacccttatgcctacttgactctttccaatataagatgaagattctgtcggaaagcaattatatttagttgatgcatagaaagagacatgaacatatccattctacactgttctaaaacaaggtcaattaggcttcctcacttcccctctgacaagaacaaattccctttcaccatttttcgaccaatcagtttgagcagcatagttaaaatttcagtatgttagtatttcaatcaatacttgatacttaatgcagtgcagtaatccagctacaccatgaactttatcccactacatgatgaaatttatctttgcagttaccataaacatgagagcattctcagtgacaaatagagcattttctattctctctatattaacaaaccatggaagacaatcctcagtaccatcttccctacttacctaccccgaacaacatcttatcacaagatgacgtacttggccttacaaccacgcaccagcgacatcattttccaaattatccacttctagcagccaaacaaacatggcccgacgattgctagcatatcccggtgtgccacagaatacagaggcggatgaacactacacagatcaacttaacaagaaggagctatcctcaccatcgaaaatgatgaagcacacccaagttgacaaagtcctagattctataattccagaaaaatgaagcttgttacatcctcatgacatgcatgaaggaatttgcttttgcgtatctgtggagggcttcgtcacttttgaatgaaaaaacatctatgtacatataaatcacttggtgaagcctttctcaggcatgtgtgttgatgcaacctctgggaaacaaatgctatcagctgctgacatatgctacttcaatactgcttgatatgtattgcactctcagttccgtctactgttggtccaaactgcatctgtgtatatacagacgagttgtattaaactttctaaatctgtgtatactaatgcaacctcttgaaaacagttgttagcccttgacacgtatgctattttaatgctacttaatatgtattgcaatttggttttcctgtacagaactgctacaattcacgttccaatattaatcggaagctactgcagcctagcaaaatttccttaagtctgctttgtgtccatgtatttatgtgcttcataacgaatatccttcatataacatttccacgctacaat

SEQ ID NO: 38577 - DNA, 3443 bp, Zea Mays
tcccccgttcgtatctctctctcccttcacctaaagcgaggcgccgtcggcttctgctccttacctcgcgccttcctcgcgcggcgcgcctcgccctcgccctctccctctccctctctcctcccccacccttcctctccctccatctctccgcggcagttcgagcttggcgggggaaccgtacccggcaagcgcgcggacgcccccccgggtgggggcgacagccagcggcgcgatgcccgcgtggtggccccgcagcaagctgaggtctaggtcgaaggccaagccgggcgcagggtccgtctccgcagcttcgtccccgcgcaagtccgcggacctcgagtcgccctccccgtccccgtcgccgacgccgacgccgcgggacaggaaggcgcacagcctcgacttccccggcgcggccgccgcgcgcggccggccagccggcgccgcgccggggcatgggtcggtagggtacaagctcccgacgccggtggaggcggtggagcctgtcgggactctgtacgaggtggtgctggcggcggcggcggccgccgctgccggtgacggctgctcgtccgcggaggagtctagcgtgtgctcggccgcgtcgttggacgagccgcactaccaacatgggtttaggcccatggatccggctgcttttgcgagggaaagaaatatgccttctgattcagataggatcttaaatgaagacaagtgtttcatgtcttgtagtatgccacgggagcatcagaagttctttgatgttcctgcggctagtgttagagaacttcatttgcaaagtgatgcaccttcaacgagtgaagccaattgttcacgtggaagaatgatatctggagatctttttgctccaagaacaaggagtctctctcctatcccaaaaggccatgcattcgctgtgagcaatggaaattctagagaatttggtttcagcccgaggtcaccagtaagaaagatggatggtttgaggagcccaccacatcccttgcctcttcctccagcttctggtgcatgctcgcctcttcatccagcttctggtgcatgctcgcctcttcatccagcttctggtgcttgctcacctcttcttccaacccacagtttttgctcgcctcttccttcgtctcccagttcctgcccacctcttcctgcatctcccactaactgctcacagtcccagtcacaatggaagaaagggaaattgctagggagtggtacatttggtcaggtttaccttggatttaacagtgaaaatgggcagttttgtgcgattaaggaggttcaagttattatggatgatccacattcgaaggaacgactcaaacaattaaaccaggaaatagatatgcttagacaactctcccacccaaacatagtgcagtaccatggaagtgagctgagtgatgaatcactttccatttgtcttgagtatgtttcggggggttcaatccacaaattattaagagaatatggctcttttaaggaacctgtgattcgtaattacactgggcaaattcttgctggccttgcctacttacatgggcggaacactgtccacagagatatcaaaggagcaaacatactcgtgggtcctaatggtgaagtcaagctggctgactttggcatggctaagcatgtatgcagtgtttactttctgaccctctctgtctatctgcctgtgtttaacgctttcagttatcataatatttaatatttgttggacttttaaagtcaactactgtgtttttgtctgagtgctctccactttgtatgacacacggcagtcatttttgcttgtagaccctggaaattcgctgaggaatacttatatgtatctgagtactatacagtttcaaatctcagttgaagtagttcgaaaaattgcagttgaaataaatacttctcaattgtattagtatccatggttctaatagaaaaggaattaaagtaggtgcaaactctgatttcttatgaacccaagtatgaagtatccagttatctgctagtgcctactaacataataaatgtggaaaagttttggaagggtgctcttctgtgtttgcccagctaaaagactcttgacgatggacaagtttttagctcttggatggtcagcaaaacaaggatacacactgattgtgcttgcttttgtttttttctctgtaaacccattcattttttgaaatttgttgagcagatatcatcttttgctgaaatacgttctttcaaaggaagtccttactggatggctcctgaggttataatgaactgtaaaggctacagtttatcagtggacatatggagtctgggctgtaccattattgaaatggcgacggcaagacctccttggcaccaatacgagggggtagcagcaatatttaagatcgcaaacagtaaagatatacctgaaatcccagacagtttctcagaggaagggaaaagtttcttgcagctttgcttgaaacgtaaccctgcatctcgtgcttctgcagtccagctgatggatcatccttttgttcaggatcaccctgcagtgagagctgcaaaatccagtgtattgagaaacacaccatcttctccagcagatggcagacacacaatgtccaacagggagttgccatctcggaaaattataactcctctgaaggatattggactgggcatgagagattttactggattttccactactgttccttcaccacacagcagtcctattcctggaagagcaaacatgtctacgccagtttcaccatgctcaagcccgctgcggcagtttaagcaatccaatgtgaggggcatgcgttctccacctcatccaatgctctcccctggtcttggcaacacagtaagttacacccaaaatcagacaagacgcaatccagctcctgccatttcagatccttggatggatgttggccagatgaaactccaaagccccaatatttcccccagaaggttctgagaacgatttaaatataaaaaaagagaatcatgggcgcaatatatccatgacaagttagttattaagagatgttcagtaaggaacttgtttgtgtagttactacaatacgacactcaccagagattcagtacagcgaaatggggctcttgagaatttgtaacaggaagttctgtatatccttaggttttaaggtttgttgtcgcccttgctatatgtagttatacgtgtacacgtcctgatgtaaaggttcacaaaaaatcttacagatgaccacgggatgtaaattcgaaagtttgtgcaaactggtatttctgtgtagtagttaggacttccatggcagaagtaactatgcacttccgattgaatcgagtacaatgtccagtttcatttccatttcatcactggaatcaagcatgtaactaaaaagagagtaagagagcggggtgcagattatattttg

SEQ ID NO: 38578 - DNA, 450 bp, Zea Mays
tggctgtcaccccacacatctagcttttttggcgttgatgcacaggtgtgggaacggaaaagatgcgtgggaatgggaatggagaagatgccatggttgtgggaccggttttggtgtcagacaacagtgtgtgggtgggaatgagaaatgccacgaccaggacatcggaatggaaatggcagaaccaggaatggggcagcctaccccttagagccttaataagtagtatagatttccacagaccggcagtgcacgtggagtgcctaacgaacgcgacctgcagatatagatgtccaaatgggtgggccgtgccgatccggcccagattagctagcgggtcatgtcgtgccggcccacgggctccaagcgaggcccaagcacgacctgctaggttaataacggttaataatcgtgtcgggccggtctacagcccgacagatgtaatgggct

SEQ ID NO: 38579 - DNA, 3036 bp, Zea Mays
ctaccacatctcaccgggccgcgccggagctgctcccttccgtttcgtccctctccttccggcggcagctgcgtcggccgcggctgccaacggccggtatggcgggcctcgaggagatcaagaatgaggcaatcgatctggagaacatccccgtggaggaggtcttccagagtctcaaatgcagcaagctgggcctgtcctcggaggaggcggaggcgcgcctcgccgtctttgggcccaacaagctcgaggagaagaaggagagcaagttcctaaagttcctggggttcatgtggaacccgctgtcgtgggtcatggaggcggcggcgatcatggcgatcgcgctcgccaacgggggcggcaagccgccggactggcaggacttcgtggggatcgtgttcctgctgctcctcaactcgtccatctcctactgggaggagagcaacgccgggagcgcggcagaggcgctgatggccaacctggcgcccaaggccaaggtgctgcgcgacgggcgctggagcgagcaggacgcggcggtgctggccccgggggacatcatcagcgtcaagctgggcgacatcgtccccgccgacgcccgcctgctcgagggcgacccgctcaagatcgaccagtcggcgctcaccggcgagtcgctgcccgtgaccaagggccccggcgacagcatctactcgggctccacctgcaagcagggggagctcgaggccgtcgtcatcgccaccggcgtgcacaccttcttcggcaaggcggcgcacctcgtggacagcaccaaccagacgggtcacttccagaaggtgctcaaggccatcggcaacttctgcatcgccaccatcgccatcggcatcgccgtcgaggtcctcgtcatgtacgccatccagcaccgcgcgtaccgcgacggcatcgacaacctcctcgtgctcctcatcggcggcatccccatcgccatgcccaccgtgctctccgtcaccatggccatcggctcgcaccgcctcgccacgcagggcgccatcaccaagcgcatgacggccatcgaggagatggccggcatgaccgtgctctgcagcgacaagacgggcacgctcaccgtcaacaagctcagcgtcgacaggggcctcatcgagatcttcgccaagggggtcgacgccaacggggtcatcctcctcgcggccagggcctccagggtcgagaaccaggacgccatcgacgctgccatggtcggcatgctcggcgaccccaaggaagctagggaaggcatcaaggaggtgcatttcctccccttcaatcccgtcgacaagcgcacggccctcacctacgtcagcctcgccgacggtagctggcaccgtgtcagcaagggtgctcccgagcagatcatgaccctatgcaactgcaaggaggatgtcgtgaacaaggtgcacgccatcatccacaagtacgctgagcgcggcctaaggtctctcgccgtcgccacacaggaagtgccggagaagtctaaggacagccccggcggcccatggcagttcgtcgccctgctgccccttttcgacccgccgaggcacgacagtgcggaaaccatcaggaaggcgctcaacctgggcgtcaatgtcaagatgatcaccggtgaccagctcgccattgccaaggagacgggcaggaggctggggatgggcaccaacatgtacccctcctcggcgctgctcgggcagagcaaagatgaatccatcgcctccatccccgtggacgatctgatcgagaaggccgatggctttgccggcgtcttccccgagcacaagtacgagatcgtcaagaagctgcaggagaggaagcacatctgcgggatgaccggggacggcgtgaacgacgcgccggcgctgaagaaggcggacatcgggatcgccgtcgccgacgctacggacgcggccaggagcgcctccgacatcgtgctcaccgaacccgggctcagcgtcatcatcagcgccgtgctcacgagccgctccatcttccagaggatgaagaactacaccatctacgcagtgtcgatcacagtccgtattgtgctcgggttcatgctgatcgcgctgatctggaagttcgatttctcaccgttcatgatcctggtcattgccatcctcaacgacggcacgatcatgaccatctctaaggacagggtgaggccgtctccgcatccagacagctggaagctgaacgagatctttgtcaccggcgtcgtctacggcacctacctcgccgtcatgaccgtcatcttcttctgggccatgcgcagcaccgatttcttcacgaacacgttcggcgtgaggtcgctgcacggcagccgggacgagatgatgtcggcgctgtacctgcaggtgagcgtcatcagccaggcgctcatcttcgtcacgcgctcccgcggcttgtgcttcacggagcgccccggcttcctcctctgcgtcgccttcgtggtcgcccagatcattgccaccctcgtcgcggttatccccaccatcgggttcgcgcacatccgcggcgtcgggtgggggtgggcgggcgtcatctggctgtacagcgtcgtcaccttcctgccgctggacgcgttcaagctggccatccggtacgcgctgagcggaagggcgtgggacacgctgttcgagcacaagatcgccttcaccaccaagaaggactacgggcgggaggagcgggaggcgcagtgggccacggcgcagcgcaccctgcacggcctccagacgcccgaactggccggcgtcctcaacgatcgcaccagctaccgcgagctctccgagatcgccgagcaggccaagcgccgcgccgaggtggccaggctgcgggagctcggcacgctcaagggccagatggagtccgtcgtcaagctcaaggggctggacatggaaggcgtccagcagcactacaccctgtgagtgaatgcggtagtgtatttgtaattgttgctgtactcattgggaaataataacaacaggaattgaaatggttgtgatgattgat

SEQ ID NO: 38580 - DNA, 379 bp, Zea Mays
ggaatggtcgacgatggagtctgggtgccgggccaatggatggtcgtgggcggcaatggccccgccggctatgctagacatgccatcggccgacgttggggggaagaaggaggatgcgggaccattggatcttggacgtacgaccaggattaaagcgagacataccccttcacctaataagatcttagtcgtaggtataggatcagacggccagaggcagatcttggcgccgtgatatcagggtcgtggatcgtgtgatggggttgcccggatcatataccggttcgttttaaaataaatctaatcctagcgctctgttattgatcggatggctgttatcggcgcgtaccccttcgcaggcgtactttttcatatgaac

SEQ ID NO: 38581 - DNA, 1209 bp, Zea Mays
agcagtcagcagagcagagaacgcaggcagaggcagagcggcagcccgcagagcaggcaccataccagtcaaccaccgcttcgttctcctcccacaccgctcgccttcgccttcccatcttctatcatccccgagctccagttctccacacctcacgtctataaataataaataaggcgcccgcggtgcccatcaattcgtgtcaccgcgtcccgagagcgcaaatcattccgcgcgacgcaaaaaccctagcccagccaccgacccctctcatggcaaccaccaccacccaggcgagcctcctcctccagaagcagctaagagatctcgcgaagcacccggtggatgggttctctgctgggctggtcgacgacagcaatgtcttcgagtggcaggtcaccatcatcggaccgcctgacaccctatatgatggagggtacttcaatgcaataatgagcttcccacaaaattacccaaacagcccgccatcagtcagatttacctctgaaatgtggcatccaaatgtctatcctgatgggcgggtttgtatctctattcttcatccacctggtgaagatccaaacggttatgagctcgcaagtgagcgatggacacctgtgcacacagtagaaagcatagttctgagcattatatcaatgctctctagtccaaatgatgagtctccagcaaacattgaggcagctatatccttctattgttaaaatcaggaacaagtgccagccctgaaaggaatggagggaacagagggaggatttcaagaaaaaggttaggcgcatcgtgcggaaatcacaggaaatgttctgaaggaaatgggagtcctggcgaagttaaccatgccatctcaggctgcaggattttgctgccaacctcaaagtgctcatctgacaccagcgtcttgtgtattttccatttatcgtctgttcattggtgacaattgcctccagaaatgcattgggacgtggtcggcttgaaggttctgtttgtgtcgtgtggcttgcgctctactaatgtttggcaaacctgaagtggtaccggttatcgtaaatttggtggtgaacctggcataagcaggcaccattcatgtcatctagccgttttgaaaacatatcaggccttgttcgtttcttatcaaaatcaattggttggaggaaattaaggctttatttagatactctcatattcaactca

SEQ ID NO: 38582 - DNA, 1931 bp, Zea Mays
tatatatatgcctgcttgcattgcacacgtacgtacagcgtagcggggagcggagtaaggcgcgtgatggcgctctcagcttgcccggctcaggaagaactgctgcagcctgctgggaggccgttgaggaagcagcttgctgcagccgcgaggagcatcaactggagctattccctcttctggtccatttcaagcactcaacgaccacgggtgctgacgtggacggacgggttctacaatggcgaggtgaagacgcgtaagatctcccactccgtggagctgacagccgaccagctgctcatgcagaggagcgagcagctccgggagctctacgaggccctccagtccggcgagtgcgaccgccgcgcggcgcggccggtgggctcgctgtcgccggaggacctcggggacaccgagtggtactacgtgatctgcatgacctacgccttcctgcctggccaaggcttgcccggcaggagttccgcgagcaacgagcatgtctggctgtgcaacgcgcacctcgccggcagcaaggacttcccccgcgcgctcctggccaaggtgccggaggacccggacttgatcaaccgagcaaccgcagcctttcgggagccgcaatgtccgatatactcggaacagccgagctccaacccgtcagcagacgaaaccggcgaggccgcagacatagctgtgttcgagggcctcgatcacaatgccatggacatggagaccgcaggcatagctgtgttcgagggcctcgatcacaatgccatggacatggagacggtgactgccgccgccgggagacacggaaccggacaggagctaggagaagccgacagcccgtcaaatgcaagcctggagcacatcaccaaggggatcgacgagttctacaacctctgcgaggaaatggacgtgcagccgctagaggatgcctggataatggacgggtctaatttcgaagtcccctcgtcagcgctcccggtggatggctcaagcgcacccgctgatggctctcgcgcgaccagtttcgtggcttggacgaggtcatcgcagtcctgctccggtgaagcggcggctgtgccggtcatcgaagagccgcagaaattgctgaagaaagcggtggccggcggcggtgcttgggcgaacacgaactgcggtggcgggggcacgacggtaacagcccaggaaaacggcgccaagaaccacgtcatgttagagcgaaagcgccgggagaagctcaacgagatgttcctcgttctcaagtcgttggttccctccattcacaaggtggacaaagcatccatcctcgccgaaactatagcctacctaaaggagcttcaacgaagggtacaagaactggaatccaggaggcaaggtggcagtgggtgtgtcagcaagaaagtctgtgtgggctccaactccaagaggaagagcccagagttcgccggtggcgcgaaggagcacccctgggtcctccccatggacggtaccagcaacgtcaccgtcaccgtctctgacagggacgtgctcctggaggtgcaatgcctgtgggagaagctcctgatgacacgggtgttcgacgccatcaagagcctccatttggacgctctctcggttcaggcttcggcactagatggcttcatgaggctcaagataggagctcagtttgcaggctccggcgccgtcgtgcccggaatgatcagccaatctcttcgtaaagctatagggaagcgatgaaagggcgctacatgtgaagcttaattaatggaagcaaacttgtatttcttgtgcaaaagcttactatatatttctgcaaaacctggtgtgccttgttttgattttcagtcgccaattgtgcccttgtttttatcaagtgatgatctacactatatatatggaatatttgaaaagagcgatgtcgtagggtt

SEQ ID NO: 38583 - DNA, 5097 bp, Zea Mays
aatccctctcatataccaccaaaaatttcccattgttttagctttctccatttctctgcagcagcctaccagagtagtgaggactgaggagcgagcagagtccaccaccactaccaaacacgcagcgcagtggtgctctctagtcctctcttcttccactccgctcttcccccgtcgcacgcacgcgtggtcatcggattcggccgcgtgccggcgagatccgggccgtcgcagcacggtccggcagacgccgcaatccgcgatcctgtcgccgcgggagctgcattggcgccccacgcggccgttccggcgtttcttgggaggttgcggcggggggaggagctcgtgtccgggatccgccagatccgagaacgtcggcggtagtagcagtggcgggggtcgccatggaggcccacgcgccgctcgacttcgcgctcttccagctctcccctcggcgtcagcggtgcgagctggtggtgtgcggcaatgggcggacggagaagatcgcgtcagggtcggtgaagccgttcgtggcgcacctgcgggctgtggaggaacaggcgtcggctcagccaccgccgccggccatccggctgcagctggaccggcccgccccgtggtttagtaagggcacccttgagaggttcgtgcgcttcgtgagcacgccagaggtgctggagttgacgagcacctatgatttagagatgtcgcagctggaaggggctaggaagatatatgcgcagggaggtactggagacgctacctcaggtggaactggctcagcagcggcggtggcagcagatattacaaagaaagaacttcttagggcaatcgatgtgcgtctaagcacccttaaacaagatctggctgcagcttgttctcgagcatcctctgctgggttcaatccgaacagtgtatctgagcttcttcttttcgctaaccattttggtgccagtcggctgagcgaagcatgcacgaaattcatgtcactttgccagcggcgtcatgacatcagtcctcaaaccgcacagccagcagtttcatcacactggaaggtctttgatgatgggaatgttcgtggttcttccagttcagacatgtctatagatgagccacaagttgatctcggtgaatccaacaacaaatctacagtcggtggaagtggctctcaggtccacagactaagcaacagccaaggcttagaagtcgctgcagaacagcaacccaagccaaccatcccacaggccatagataaacaagaagcagaaacagacgcgtctcccgcacctgctgcaggagggctttcaaggcgtctgagtgtgaaggacaggataaacatgtttgagagccagaaaaaggagcagactccaagttctggtaacagcaactcagcaggtactggtagggtggttccagggagaggtgagcaccgcagggttccttctggggcctccatggagaagttagttagaaggtggagcagtgttagcgacatgagtattgatctcagcaacaatgagagcgttaacataaatgacaaaaaggacaatggaactcctgttgtgactccaacatctactgatttggaggccaactctaaagcaaaagctgatgtggactctaatggacagaaggatttagtcacatcacactcctggccttatcaaaaggataatgtaccaatggatccgactaccacagatttgtgcccaccctcaactttaagtaatacacttgctcctcatagtgatggtgcaggaaacgacatggttataaactctagcattgagagtgagtcatcctttgggaaagaagcgggggttattcaaggactcacaaggatgtcaaatcatgctacttcaaatgtttccactcgaaaccatctaaaatcttctgcaaagccagttgaggaaggcttgctgaaaaataaggatattttaaccagcacatcgttagaggagcatgttcgcatgatagataaggaaataacagctgttcctcatgaagtattagttgcaagtgaacagattccccagaatgatattagaggtctccatacaaaagatattcacactgaatctgaagtgactggaaggaaggatcagccttcacgatcatttggaaaggtatctggtggtgttaatcctaaaccaaaaacatcatccaattcccgagctaatgttaaaggctcatctggtagggctaatgtcaaaggctcatctggtagggatgagattacctttacagaaactgagttccgtgatgttagtttgcagcggaatcgtctaccacggaaggcagaggatgtagggagaaaggttacaggtggttctgattcagattcttctggtcgccagggaacaaatttgagcaggcaatcatccattaccatccaggaactaaacttccaggctagagtgatgggaccaggaaaagggaaccaagatcggcatggcgaattgcaaatgaaggctaatgagttggagaaattatttgctgaacacaagttaatatcatcccgacgaggcaaacctacagatgtgcaggttgatagcacacgtacggtgagtgaggtaaagccgataacagttcttcatgagacaattcatacaaaacaagttgtaaaggagagtataacaaccaatgattttgatgccagtgagcttctgaagatggtgagtaatcaaggatttaacattagcacaccacaaaaacttggcattctaagcttagaagagtcgagagggaagttttatgagcattatatgcagaagagggatgcaaaactgaaggaagactggaaactgcagaggggggagaaggaagcaatgttaaaggctatgcatgagagcctagaacggagcaaggctgagatgcgagctaaattctctcagtctggagatgtttctgactcaacttatgtttatcattgttctcagaagattcctccttcgcgatcagcaagaagaaataatgatcagggggttgactcattcttggttgaagaggaattgaatagtgactacctatctggtgacggttcttccaggagtgctgattctaggaagcattttccaaataaagttgcttccacccaaaaggcatctgttggtcctatccataagcgttcttcaaggactgcaagctccggttatggcaatcgcaggaatctaccagaaaatcctatcgcacagcctgtccccagtttctctgacttaagaaaagaaaatacaaagccttcacctggactcagtagagcggctgcaagagttcagcaaaagtcttttgcccgtagcaagagcattattgaagagtcaaagagtatattgaaagaagatcaatcgaggaggtcacaatctatgaggaagagccaaattccggatgagttgaaggacatttcatcagggaatgaggatatttacaattgggctccatcaagaatttccaagaatcaatcagagggagcttttgcttacagtgcccgtagaacgggtccaccaaagccatttcttaggaaaggcaatgggactcaccccgttataggtatagctggatttcaggctgcagcggctatgatggcgaatgccctccagaatggtgacagtggtgattttgaagatcaccaagatgattctcctgatgatgccaaagaagaagaagaatatgaaagtattgaagaaaattttagagaaagtgactttcctgctgattctgacagtgagaacccaagagttagtcatgaatttggaaattcagatgacccagggtcagaaaatggcgatgctaacttttcaagtgaagcacccgcaattggtggtactaagttcactgcttttacaggaaacgttcatgatccagctagtgatgttccagcaccctggagttctcgtcttccacagctgtccccttacatgaatgataatacagatggtgacacattcgctgattcaccgtgtggaagtccaccatggaattctcattcacttgatgaaataacagatgctgatgtatctcggatgcggaaaaagtggggcagtgcacagatgccttttgctggtgtcagtgcatctcaacagccacgcaaagatgtttccaaaggattgaagaaactgtggaaatttggtaggaagactagagggggtgatggtttagtaaatgattgggtatctgcttccactgcctcagaatacgatgaagacatggaagatgggcgggatctggtagtaggatcttctgatgatttcaaaaagtctcgaatgggttatcttgcttcatatgatgattttgttgaggatgaggtttttgctgaacaagaacaatcactacgcagctcaattccaaacccacctgcaaatttcagaccgagagaagatcaactgactggaagagcgccacgttctttcttctccctgtcaacattccgaagcaagggaggtgatgccaggctcaggtgatcctcagaaagtcagaagacaccagaggtggagtgtataaaatatcttccgaggttaggtatgagtatcaaattttcagggcggtacgcggctagcttgtgattataaatatatatctatatgttgtgtatctatggcaattcatataagctaccagttgagccccccattgttactgtttgattattctttttccgtaatattctttgacctcctgtgtagagttggacttagagatctttttgcagtctgttcttccaactggcccaaaactactgtatttttcgttgtttttgtgatatatatgtatctccctcttgtttcttcattcacatatatcacaaattcaagatatatggtaattttggcaattgtagcatggaaactgggcttattcaaggcacccgcaaagtcacttgttttagtgtgatgagtgtatctgtctttgatctatgtatatatattttttagaaaacttcatcgagttttttttgaaactttgccttatttactagtgactgcaccacacatatctttgttgtaagtttcagccattttttggagtatttatggccgtacagctggagctcatgtacttggttttggctgatgaccgcataccagtgatggtcctctgcctcgc

SEQ ID NO: 38584 - DNA, 5075 bp, Zea Mays
cgacgtcccgatttggcgggggttgtggttcggccgccacagccgccacggagatcacgctgggttcctctgtttctttatgcggcgttgatgaagaatagtttcttgccggtcggacttcagatctgctttgcctcagggattctggactgctgagcgcggatttctcctcagagggatcaattggatccaagggtgcgattgatgtgaatagtttatctgtttccacagaaatagcaggaaggccatctgatttaatgatcaaatcttgtacttgcactggaaggttatcatcttcttcagctcataatcttacagacacatatatttcaatgacctgcaaaagctgtactggtgaatcaacagaagacagaggtgggccatcgtgtagcggcaagcttaacaatatgggtttggagctcccaaggcctatagatcttgaggttaaatggatgactgtaaaaaaaaggcaaagggacaccaggagagcaagggcttcctttggcgaagacacaagcagggatggaattggatctttctgtttatctggctgtgctacaaatcaagagatggcgcaagacgctccagtctctgaatctgagaagtttggagtatccattcttggtagacgctttagtgatcccatggaaaatgttcctataaaaaagagaagatttcatatggatttttctccatcacctccattcactccattgctagtggatccatatgaaaagataccgggaagctcttctaaagctgtcagatcatatgagaaacattataagcttaagacgcaacaaattgagtataaggtgggaaacaaaggtcgttttggtgacgatgatttttctggtattgatatactagcttctgctgcctgtgaaagtgagatgagtggtggaatattagatggggagtgctcaacgttagctcacctcccagaagaaaggaaactggagaatactactggtagcagcaaattgagtctattacataacatggaggatacgttaaatattcctggtacttcacattgcatatatgatatgcctcttgggtcttctagatctgctccagatatgaagtccttatttgttgccacaccaactatcttagaaaatcttgttgaatcggcatctgctcccaaggttaattgttcattatattctgcactgaacaatgcaaacgaaatagagattgtttctgatgctaagtctacaagtgttgcaattgcaaacagttcagacaatccagaaaaaactataggatgtttaaaggatacagttgtgcaaaccaaccatgccaatgcgactaatgccaagtctacaagtgttgcaattgcaaacagttcagacaatccagaaaaaactataggatgttcacaggatacagttgtgcaaaccaaccatgccaatgcgactcgtgattctaggctgcactgggatcttaatgttgccatggaggcatggggcactgattgcggtgctgttgaggatcctttagttgctactgtaagtgatcatgatgatgccagaaatgacatgaacaaaccagggacatctcatcattttgagtcaagagatggtagtgtagttgatcactctgttgacactcatatggatgatgcactgaaacacgtgtctgctaatacaaaggatacatgtgattctcctgctgacagtccgtctcacccttcgcgcaacttgcagctattggaatctggatatgtagggagtgatgcccttgctgaaacaatggatttgcctgaccagaagaatagcaggttcgcttcagctatggattcacatattagatctgatccagaaccagctcttatcatggagcattttgcttcagcttcacatgtggagaaaatcaatggttcgcatcccgaacctgttcaatgtgatggtttgtctaatatgtcttctgtgaatgtccatattggaagtaattcactccaaacaagtgaattgggcaccacattaaagcctttggctagcatattagtttctgaggaaagcaaaaaccttccaacagtaggcacttcccataaaaaggttactgactttggctggagtgataataagcttgaagaagcttctgaacaaagcatatctgaatctaagaaccaggagcttttggatgttgattcagaaactagtaagaagggtgaacatgacactggtatattttatgccaacgaaaggacaaaatatgcagaaaatctcattcatccagaggacaaccatggatcttctaattgtgatatggctcatgtacatgaagaaaatggtgctgttgcaatgattaattctaaagactctttaattacttgtgccaacagtagcactgtagagacatattacatttcagatgcagctcctcaggttcctgttcccagttcagaatgccacaaactggaatgttttactgatgcgggcagcactgtggattcaaaatctgcagcgcacagctaccagaatggttgcgaaaatgagcttgggaaggtcatatcaaatgttcgttcagatcaatgctatgaaactgacacatcacatattagcaaaaatctagctggggttgaaaaagtttatgtcgaggaggacgattctcaatatgaggatggggaacttagagaatctggtgattgttattgggtggatgatggttatgaagatgttaaacatgccaactggcattatcaggtatcagattacaagaatgaagaagctactcctggcctcacgtctctccatactgattctgttgcaaataatgtggttattcctgttgctaatgacaatggaccacaatctagaaaggaggacattgctgtttcacctgtgtcatctaagtgttcatggttaacaaactgcttagatggtggatctatagctgatggaaagtctcaaagtattcatttgagaggtgatactaacatgtatgggtcaaacccaagccgtgtagcagttagatctgctacaacagtaagccagtctgaaaggtgcaacgatgccctaggtgatatgttaaatatcagaatgaagaacacaggttgggatatgatgcctgaagatcaaaagcactctcaacatgatgcaagggatgtgactgattcgtctaatcggtgtgttttgagctcagatgcggctagagacgatgattcactgcaaaaaaagggactattgaatagagatcttcaaggagtggaacggcaaaaatcatttgacagaccccagaggaatgaattgagcagatctgacgatggttatggctcaggctcaaaatctggaagggcaatggactctcatggatcgcatgacatgtatggcacatcccgtcatgttcagacaagcgctcgggtggagtgggtggaaagttcaaaacgtcctcgttctactcggcacaaatcacctgaatattataattatggcacatcaggtccaaggaatgctgcagaagctgctgtggcaaagatgcagagcagtggctttgttgttgcacgtgatggcactttagtaagagctgttgatgctgcaaatgctggtcagatgcccagaaggatgcgaaatcctttaagtagctcatgccacctgatttctggatggggttccccagttgacagggatgaagcctgtgggatgtccagaggccccgtgcatgctaggaaagcatctccagagcgtcactttggtgcaaatagtaaccggtccagtcgatatggttctgaaatggagaaaaatcatactactgatgcaaatttgagttctgtccattgctcgctgtccagtagacaacgaggcaccccgacatctagagcatcacttaacctttcccgtgctcacagcagatctccttctgggtccaggtctcgatccccacatgattgggcacctaggaacagaggcaagatcatggcaaatggaggttcaactttatggaagcatagtagatctccacctaatcacatgactaaaggtgaaattggtagaatggcttcacctcggagacaacctggatatgatgatcgagctatgtgttacagtccactatcaagaaacaacacatactccaagaatgcttcgacatgggttgatggaaggaatggttcagcagtggatatttctgatgatcataataaaaggtattcaaggagaagctcacctctgagaattacctcacggaatgacagatttgatgtcatggactcccaaggacgaccaaggtctggagaattctaccgtccgacacaaggaagacttctttatggttacaatagggaaaataagcatggcagaaatggtgaagatggaagggaatgcactgatagatatgcgaataattctgtcaagcgatatgaccggagtggtgcagtaaagcaatttagaaatgatactggtgataaatttcggactcgtatttctgctcccagatcgccagatctccaaaggggggtgagtcctcggagatttgacagaagctttgagaggtagctgactagctggctgtgaatttgccttatagaactaaaatggaaaataaagacctgtctggatgattgagccaggaaatgttgcaaaaccttgatggagttcaatcataggggttgatggaggactcttggcagcactgtttttttttctgcttctgctgcatatattcaaggcacagaaatgttggaccatgcacttctgtacggggaattcagattaacttcataattttcctgtttcagtctgtaaatatttatgttggtagcagaattacaatcactcctttcagctttattatagctgttcttttttttaatttctgatactttatcatgtttgtcccttttgttttttcaatgggtattgtccctgtacgaggtccattttaacatgatgaatcaattaaattttgagctcaaacacttgtgtgctttttatacttatgtttttcatctggcattttgtatcatcttgttgccagtgtaaaatgttttatttgttgttgaatatacaataatttacagtggcctgtgaccatgttagacaacttttggatcagctgaggtgaataatttt

SEQ ID NO: 38585 - DNA, 237 bp, Zea Mays
gacaaggctccctatttttcaagtgcctattagactagcgccgggcaaataatgctccagtgatctcctttaccagtccctttgccgagtgctccgctaggaactctactggactatccggactccattgaaattttatgatttcatgtgaatgatggctaggtttctacatatagtgcgtgaaactctgtcaaatttttatcacacttctacatataatatcatgatatgtcaaca

SEQ ID NO: 38586 - DNA, 431 bp, Zea Mays
gtgattatttaaaattcatcactcgcgcgaatccgagttcggaagtccgactcactcggatgattttatccagaaccaattaattggaactcgataatagaagtgaagcaaaattaaatcggaccacactcggatctaaggggcgcaggattattgtttgagttgttctccgatcgaatgtttggataacggcgaaaaccaattaggatcaattaaatcaaacgtcgcctaaaatatcgaatctaatctcgtcgggtttgaacccgtctacagctcgctcccgtgacgatgttgacatcgtctccgaggaaactccgattgcgatgccgtattcggctcgcacagtttaaaatttattcctttctaaagtatcgagtctagagccggttcaaaaaataatttggtctgtggcttttcgccttgatttaaaa

SEQ ID NO: 38587 - DNA, 265 bp, Zea Mays
cttatacacattgttagatgtaaaattcattatgtgcacattaaaatcaatgtatttgtacaacgagtgatctcttgacaaggtaattctttacttttatcattaactattacatgaaaacattatcgcatgtaagtttaacgggtccccacggggaacggggatggggaatgcttccccatccccgtccccgtttacccgccgggggagaacttttccccatttacatccccgtgggggaagaaacttccccatccccatcccc

SEQ ID NO: 38588 - DNA, 703 bp, Zea Mays
ccaccgtgccgcgttccagctcggactactctgctcctgcgcgcgtcggatcccagctcgtcggtcgcccgcgtctctgttcttctgcgccgccgttccctgcaccggacatggaaatccctcgtccgcgactccctgtaatagccgacgttcttcacagccgacgcttggcctcagctccgccgttcggctatggatgtgtgaacccgcacctcaagctccctaagctccctgtgtcgcgttctgttcgcctgaaccagagttcgccagttgtccctgctcgccgtgctaaccgtctatgtcgtcgccggacttgcctccctagccatggtggcgttgttatttgctgctgcgccgcgacatcgtcaagctccggtgcttagcgtcttggtcactgcgcagttgctgctctatttccttgtcctcgcgcggtgtgtggcggtcgtgtccgcatccgtggccgcagctacgatcccttgcgtcgtcaagcgatcacgagaattcatataaagcaataaatcccacatggtgctccacgtgctcgacataatggcagaatcggagaatcatttccgatctcgcggagtcgagtcagctgttggaacggtacgtttgttgactacgtgatgcggagaacctaagccaagtcaaccccaagatgacgtaatgggtggactactccgcatagtgaagctgatggacg

SEQ ID NO: 38589 - DNA, 734 bp, Zea Mays
tctttttgaaagagaaggttgcaatgcatcagaatggtagacaattatgcatgctcctttggtctttgcccacctctccagtatgcatgctcagttaaaaacaaatgctgccattgctgcctagctaactccacaacgtgcttctattcactgttggtacgtacttcatacaaagtgtttgggtataatggaagtatggtaacgtgacaaatagcgcaagcaatgaacaccacagctactcgatcctatcgtgaagggtcaccacaagatcgtgcgcatcgtccaggagcttccaaatgtccagctgcccagccatgctgttacactcccttatgatctcatccatgctgttgtagctttctattatcagtttccgcttctgcaacacactagcagcaatcgcatacagtaacagatcatctgttggaggcgctcccaactgcaatttacgccaggatgagtttgcgatctcggcgcggtttgctgcctgatcagcccacatcacctcccagagacatagggtctgctcgaaggtgagttccctccggaacatcacaaccaccattctgtaaacgaaaaagcagtcttcagcttggagcatctccaaatgtctgtagagatggaagtccttgtatttgattatcctggcaaccatattgagttgccggcgtatacccacttcatcaagcctaaagttgtggcgggctttcctcataaaaccagcaaagcaccag

SEQ ID NO: 38590 - DNA, 2535 bp, Zea Mays
tagcttacagctttttaaatcaatcttcgaccaacggtttgaaattccgtgtttagagttgaattactcgattcagaagtttaagtttctctaatttaagctaaagggagaagagatggagcgcctggcttgagttggccgcacgcagctgggaagaaggatctgaaaacactgtcgtccattttcagactcagttatttgaaacatcaagatggttaatttcggaaagaaattgatggctgatcaagtggacgaatggaaaggatactacatcaattacaagctgatgaagaaaatgttaaagcaatatgtccaacaaacccaacatgatgagaaagatcgcgaacaagttcttaaagacttttcaaggtttcttgatgaccagattgaaaggattgtgctttttctgctacaacaacaaggccatcttgccagtaggattgagaaattggcagaaaaacgcactgctcttctggaagagtatgacatatcacaagtttatcagctgcatgatgcatacagggaagtcgggcttgatctcataaagcttctccgctttgttgatgtgaatgctactggtatacgcaagatactaaagaaatttgataaacgctttggctacaagttcactgattattatgtcaccactcgtgcaaatcatccttattctcagcttcagcaagtatttaagcaagtgggaattgtagctgttgtaggtgcattatcgcgcaaccttgaatatctgcagcatcatgaaggaagctttgtatccatctatgatcgtccagcagttaccttgaaggaccctattatagaccaagtaaaccatgcagtacagaaactcacgcatgccacgaattttatgcaattcttgggacagcacgcgcttattgtccaggaagatgcagaaagcgagtcggaggatcttgttggtgatcagagctaccatttcatgtccctggtgcttaatctagtgaacacattcctttacatggtgaatacatatatcattgtgccgactgcagatgactatgcagtaagccttggggctgctgcaactgtatgtggtataattattggatcgatggcagtcgcccaagtattctcctcagtctacttcagtgcctggtcaaataagtcctacttcaaacctcttgtgttcagtagcattatgctgtttcttggaaacctactgtatgcattggcatatgatctgaattcactaatagttctcctgactggacgactgctatgtgggttaggttctgcaagagcagtgaaccgtcgctatatcagtgactgtgtgcctctcaagatgaggctacaagcctctgccgggttcgttagtgctagcgctcttggcatggcatgtggccctgctcttgctggttttctccagattaaattcaagatatactcgctcagttttaatcagagcacattgcctggatgggtcatgtgcatttcttggcttatttacttattgtggttgtggcttacattcaaggaaccagaacacttcactaaaactctggtcaatgaacagccgtcagaatctggccgccaaggaaattctaacttggaggcaggtctagctgaaccattgcttcaaggtatagaacgaaggcaggatgagaactcagaagttaatgatgatactgaagtagagtcagaaagctctcatgaaccagcaacatcaattgcttcagcatacagattgctaactccatctgtgaaggcccagctactgatatacttcatgctcaagtacgcaatggaaatactactatcagaatcgagcgttgtcaccacatactattttagctggtctacaagtgctgtggctatctttctagcgattcttggattaacggttcttccagtaaatgccattgttggaagctacgttacaaatttattcgaggataggcaaattttgttggcatctgaagtcatggttctcatcggtataatcatgagcttttgtttcacacctcactactccatcccgcaatatgttctttcagctttcatcacatttgtatttgctgaggtgcttgaaggagtgaatctgtccttgctctcacgagtaatgtcatcgaggctttcccgagggacctacaatggtggactcctttcgacagaggccgggacgttggcccgtgtagttgcagatgccacgattactgcagccggttatctcggcacggacctccttctgaatgtcactcttctcccatcccttgtgatttgcatagtctccatcgcagcagcactctacacttacaacaatctctattgaagctattgttgctgtacaagtgtacaacaatgttcctaagctaaaatgttcctgcccacaacgggtttgtatatctgttcaagcatggtttgtaaacattttgatcaagtttgtatgcaaaatttcttgtatttagtgcatttatgtaaagattcatcctgtaaagaattataaactatgagacgctattgccatttatgatcatttatgtttatctttttagccttatgtta

SEQ ID NO: 38591 - DNA, 1117 bp, Zea Mays
gcctattcccattcccgcttgcccagcacacgcacacacctccctgacccggctgcgaatgtcgtcgcacgaggccgcgccaccgctccgtcccggctccgagccgccgcgccacccctcgccacctccccgagtcccacagccgcgacgcgcgtgtccccgtcgtgccaccactgcctccccatcgctgcctccccgaacccccgcagccacgacgcatgccgtcgtcatcgaacgaggccgaagccccaccacaccaccactccctccccctcgccgcctccccgaccggtcgcatccctgcagctcagaggctaccggtagacggagagaaccctgctcccttgcctaggattcccaaaaccctagcctcgacccgtatacacgaggacccccgacaatgaggaggctgctgcgacagctgcgccacgttcatggtcgacaaggtcatcgcgctcaccgcctcgagcacccccgacgacgaggaggctgctgcgacggccgcgccacgttcctggtcggcaaggtcatcgccctctaatacctcatgcgccattgttgcatcgtctatcccaagatcaggtataaacttgtcatcgtggctggggacaaaacgggtgaaactgagtttgttatgtttggccggataacacagcatgtcagcatctcgtgcggaaaacggctgcagtggtgtatgccctgtcaatagaatcagcggtgtattccctacaaaatctgacaatagcatcgacggtgtatgccctatcaccggcaaggatcatggtagcaacctcaaggaaagtcgtgatcatggtgaagaaaagggcaagggtccttgtgtggtaccagcaaaatgcccatttggttatgactccaacacttccaagctaggtctgcttagcttcactgtctgccagacactgctccatgaaagtagaaaatcgcatgtatatcatgctttaaagacagtccactatgtggtgccgatatagaattcaagctcttgttcaccgattcattgatggtcatgccagaatcaagcgatcacatgctacaggggatgtggaagcagcaggatttttgtgtctaaaacattggaagtgcaaagtcaaggctc

SEQ ID NO: 38592 - DNA, 815 bp, Zea Mays
gtcggccctctccttacctcaatgtctacacaagatgtgaagtttatacaattccaactaacggtcaacgtcgcagctctgataatcaatgtagttgctgctgtcagttctggaaacgtgccgttgaatgatgttcagttgctgtgggttaacctaattatggatactttgggtgcccttgcattggcgacagaaccacctacaaaccatcttatggagagacccccagtagggagaagggagccattgattataaatatcatgtggagaaacttaattatcatggctttgtttcaagtttcatttctcctcactctcaacttcaagggaataagcctcctgcagttgaaaaatgatgatccagcacatgcagataaagtgaaaaataccttcatattcaacacatttgttttctgccaggtgttcaacgaattcaattcgtgtaaaccagatgagctgaatgtattcaagggcatttcagagaaccatctgtttattggcatcatagctataacagttgtactccagttgaatttaaggttcctcttcccttgtttggaagaggttatgatcattgtacgctcccggctcaatgttgaacactcttgaagtacactgtgaagttgcagaggatggtcatcagaatctcaaagatcaagaattgccataaaggtgctgatgagttctttgatgatatatgtaatttcaattacatgaactataagaaagtgcaaattgaataagtagagatgatataatattacatatttatatcatcaaaataatattaatattacgatgatattttatcacaa

SEQ ID NO: 38593 - DNA, 132 bp, Zea Mays
gcctaagaagctgcggaagccgtcgctgcattgcagcgaaacctcggtggtgtcttgacattcggtccgggtcaaccaagcgcctctcccttccttcttccgcaccccctcgctagccgaaacaacaggcta

SEQ ID NO: 38594 - DNA, 1377 bp, Zea Mays
gccgtatacgtacagcatacaggttccgtcgtcccgcaccgcacagccgctcaaaaaccctagttctcgccgccacctccgccgctcggcgcccgccgccagtccaccacttgcccacctcgtcgcgacgtcgcgcagatatcttcaccgcccgtcgcagcaggtgtggatgctggtgaactgggtgtgggtgtgggttgtggggctgctggtgaatcagcaacaataccatttgtcgtctatgggggtgaattgggagatgcggttgctgctgaatgtgcaccaccgttggcatcatcaagcagtgcaaagtgtagttcgagggcagactgttggaaacatatggtgaagaaggaagtcattgaggatggtgtagtacatttttttgctgtaaagtttctaaaatactttgaacaaatatcacatgtatactgttttgcaactatttttgatccacgcaagaaactggatggtttgcaaattgcattggagggaataggtgatgcattggacatggatttttcagatgcttttaatcatgcaaaagatgacttgtttcgtgtctttggttactattacaaaaaatatggtgaaagtgagatagactcacctgctgttgagtttggtgcagaaatttcagatacctctcttacagctcacttatggaagagagcgaaggggaaagaaaatgtcgcctcatctcaaaggtggaatcctaatgctgaattaaatcactatctgtccactaactttgtaggtactgatcgcgcactaaggggtgagaaggtaaagttacttgagtggtggagggaccacaagtatagttttcctgtcttgtctcagtttgctagagatatacttgttattcctgtctcaactgtttcctctgaagctacctttagcactgttgggagaataattgaggaacgaaggtcttctctagcacctaagacggtggaggcaatcacttgccttaaagattggaacagagccgaagagcggaagcaacatcaacttgaggatcctgagattgaatttgccgctgcagatttggacattgattagacaataatgtttagttgctgctacagattgaatttgctactatgaactttatgtggttgtaatatttagactttatttggacattgccggtctgtactcttttccttatagaggggccctgtaatggggtataaggtttttaatgagacaggccgaggaatatatttttgtttccctcaaaatgtgtgttgattcattagttcacatgtttgtaacatatagtctggtgctactgttttagtttgtaatgaaatactatcatgtatatctctgcaattgtgctaatagtttagcttctatgttcttgaacac

SEQ ID NO: 38595 - DNA, 1337 bp, Zea Mays
ctctaatcctccccaaccctcttccggttcttctcatcccaactgaccgactaccatggccggcggcggcggcggctctctgtctagcccctccgcctccttcctttccagtcccaccccaacaccgccccctcgtctcctccgcaggtgtagcacgaagtctgcctcacgagatagccccatcctcagaccaaaaaagccgcctccactcttctgcgcggcggcagccactcccacccccgctcccgcggccgcgtccaagtcggctgggtcatggagggacctgtgcagtctcaacgcctgggtggtgcgagactaccgccgccttgtcgactccgtcggcgcgctcgagccggcgcttcggaggctctctgaggaacagttgaaggcgaagacggccgagttccgcagccgcctaacgcgcggggagacgctcgccgacgtccaggccgatgcgtttgctgtggtacgtgaggcggctaggaggacgcttgggatgcggcatttcgacgtccagataattggcggtgctgtgctccatgacggctgcattgcagagatgaagacaggcgaggggaagacgcttgtttccacacttgcggcttatctaaatgcccttacagggaaaggggttcatgtggtgactgtaaatgattatttggcacagcgtgatgctgaatggatgggtcgtgttcatcgctttctcggtcttactgttggtctgattcaggcgggtatgaagtcagatgagagaagagctagctacagatgtgacattacatacactaacaactcggaacttggatttgactatcttcgtgacaacctatctcgaaacaaagaacaactagttatgagatggccaaggccattccattttgctattgtggacgaagtggactcagtacttatagatgagggaaggaatccattattaataagtggagaggataatagagatgcagttcggtatccaattgctgctaaagtcgcagaacttcttatggagggtgttcattacaccgttgaactaaagggcaataatatagatctgacagaggacggtgtagcacatgctgagattattcttgggacagatgatctatgggatgagaatgatccatgggcaaggtttgtgatgaatgctttgaaggcaaaagtgttctaccgaagggatgtccagtatattgtcagggatgggaaagctattataattaatgagttaaccggccgagttgaacccaagagaagatggtctgatggtatccaccaagcagtagaagcaaaagaaggcctaaaaatccagtttttggtgtgcaatgctaattgcaatttaa

SEQ ID NO: 38596 - DNA, 2720 bp, Zea Mays
gtcctttcaacaagttgtgatagcaggaatctgcatacttgtttgggttgtaaatatcggacatttccgagatccttctcatggtggctttgttaggggtgccatccactattttaaggtggctgttgctcttgccgttgcggctattccagaaggtctcccagctgtggtaacaacgtgcttagctcttggtaccaagagaatggctcgcttgaacgccattgtcaggtcacttccctctgtcgagacattaggatgcacaacagtcatttgcagtgacaaaactggtacccttacaacaaacatgatgtctgtgtcaaaggtgtgtgttgtgcggtctgtgcaccagagaccaatgactgatgagtactccattagtgggacaacatttgctcctgatggttttatttatgatgctgatgggttgcagttagagtttccccctcaatcaccatgtctcctccatcttgctatgtgttcagctctttgcaacgagtccactctacaatacaatcctgataaaaaatcttatgaaaaaattggagagtccactgaagttgctctgcgtgtgctggtggagaaggttggtcttcctggttttgactcaatgccttcatccctcaacatgctaactaagcacgagcgtgcatcatactgcaaccattattgggaaaaccagtttagaaagtagaaaacaccaagaaattatgttttcaaaaggtgcccctgaaagtataatggccagatgcacacatatattgtgcaatgacgatggttcttcagtaccattgactatggacattcgtaacgagttggaagctagatttcaaagttttgcagggaaagacacgctaaggtgcttagcattagcattaaaacggatgccagctggtcaacaaagtatttgttatggtgatgaggccaacctcacatttataggattggttgggatgcttgatccaccaagagaagaagtttgggatgctatccactcttgtatgtctgcagggatccgtgttatagttgttacgggggataacaagtctacagcagaatcgctgtgtcggcaaattggtgcttttgagcacttgaatgacttttcagggtattcctatacagcatcagaatttgaaggattgcctcctttggaaaggacaaacgcattacaaaggatggttctgttttcaagagtggaaccttcccataagaagatgcttgttgaagccttgcaagcacataatgaagtggttgctatgactggagatggtgtcaatgatgcacctgctctaaagaaagcggatataggaatagcaatgggatcaggaactgcagttgctaagagtgcttcagacatggttttggcggatgacaactttgccacgattgttgcagctgttgcggagggaagggccatatataataacaccaagcagtttatccgatacatgatctcatcaaatattggggaggtggtttgtatttttgtggcggcagtgcttgggatgcctgacacacttatacctgtccagctactctgggtgaaccttgttactgatggattacctgcaactgcaattggtttcaataagcctgatggcaacatcatgtcagtcaagcctcgaaaggttaatgaagctgtggttagtggatggctctttttccgttatttggtcattggagcttatgttggtcttgctactatagcgggttttgtttggtggttcgtttattctgataatggccctaaattaccatattctgaattgtgtgtatttactggaactattgttccatggcctgctgtcaactttgattcatgttctacaaggcagacttcatattcttgcagtatatttgaggatcgtcatccatcaactgtttcaatgactgtgcttgttgtcgttgagatgtttaatgccttgaataacctaagtgaaaaccaatctctgcttgtcattcatccatggagtaacctgtggcttgttgggtctattattctgaccatgcttcttcatgtagcagtcctgtacattgaaccactatcagcccttttctctgtctctccattgtcgtgggttgagtggaaaattgttctttatctatccttccctgtaattttgattgatgaggttttgaaattcttctcaaggagaagcccacgaggtcgaagattccctttaaggttgtggagacgtgagatacttccaaaagagtcgagagacaattgattttaggcttcagcatatcagatgcatacaatgcaaagcgaaaagcttgtcttctgttagtattgagcctaattttggcaaatgttcatggatgaagatgacattgtacaaatctttatgtggctgatatctagggccgagcatcttcgagaatagagttcgcgactacacaattcattggggggggggggggggggggttctcagaatgctagttttgctcagaaaacatagagaagcttcgaaagccttctcactagttatagacggtgctacacttgtatcagaatgtcagatgcttacaaaaggatgagttcatgcaacacccctttctcccaaccaatgaaatcactgtacgcatcaggttctgtcaaattttcagggtgacagacgccgttctggtatttctgccattttatacatcgcaaaagttttgcaccttgatattgttggaaacaatggcatgttcggctgaaatttacaaccactgccg

SEQ ID NO: 38597 - DNA, 484 bp, Zea Mays
gcactctttaaagggtgcatgtttctaggcaaacctcctggctgtctttccacccccacctcctttatcactaagcagttatttaggggccttagctggtgatccgggttgtttccctctcgacgatgaagcttatctagttatcctccatcgtctcactggccaaccttgacccctattatttttgggtcatatctagtatttagagtttgcctcgatttggtaccgctcgctagcccgcaccaaaatagtgctttacccctagatgtcaagtcaactgctacgcctcaacgcattttggggagaaccagctagctctgggtttgagtggcatttcaaccctaaccacaactcatccgttgatgcgtcatcatcattcggttcgaacctctgcttagtttcatccaagcttcatcatggtcatgaatagatcacccaggtctgggtccataagcagcgacaatcgccctatgaacactcgctt

SEQ ID NO: 38598 - DNA, 3810 bp, Zea Mays
ccgtgacatcgccgggatcccgcccggacctcacccggcgatatgtcgacggcggctcccgcgccgggctccacggccacggtgcgggtatccaacatcccggcctcggccatcgccgcagagctgctcgccttctttgactccgccgtcaccatcgctggcgcgaccttcgcctgcgagatagtcgccgctcaccgcggctggctcagccgcggccacggtttcgtccagtttgattcctccgccgccgccacccacgccatcgacctcgcctcctctggccgcctgccccccttcctcggctcctgcctatccgtctcccccgcccgcgctgacctcctgccccgcgcgcccgacctctccctccgcgctgccagcgcgagcctcattctaggcaaccgcgtcgccgagcgcgagctggaggtggcctactcctgcgacggcgtgcgggccgaggtcatcccgaggatgcggcgtgtggacctctacctgaagcacgattcccagagctacaagcttgaggttctctttgaggacatcaatgagtgctttgggtgccacctcgatgggacgggcgccatcttgctgcagttaaatcaaggtttacagatgatcgctttcatgcatgcaaggaggacgccaaatttgcatgggtcagagcactagatttcacacctaatagctcttttggcgagtgttccactcttgtcctgaaactgagcaaaggtgcatcagtatcatatattcttgaaagtttacccttctcaggagaattaggggaattggccattgcttcgatggatgtgtttggctcctcctccaatgtggttcctcttgttgactgcccaaatggcttttctgtgccttatgaagtactttttcgtctgaactctcttgttcacatggggaagctagttgccaggcatgttaatgctgatctgtttaaagtccttgaagatctgtcaatcgatactttaaggagaatatttgagaaaatgagcaaattaaaatctacctgctatgaacctttgcaattcatcagacatgaggctcatagcatgaatatgagaaagaaagccttgtccaacaagagggagagtggaaaattgatgaggtgttacagaattcacatcacaccatcaaaaatatactgcttggggcctgaggaagaagtttcaaattacgtggttaagtaccattctgagtatgcttctgactttgctcgagttacttttgttgatgaagattggagcaagctttctcccaatgcattgtcagctagaactgaacaagcaagtcagcttcgtggtaattctgtttggatgtttgcttcaaatagttctctgactgctgagaatataaggaggtggatgggccactttgaagatatccgttcagtctccaagtgtgcagctagaatgggccaactgtttagctcatccaggcaaacatttgaagtctcatcatatgatgtagaagtaattccagatattgaagtcacaactgatggcactaaatacatattttcagatggtatcgggaagatttctactagatttgccagacaagtcgccaaattaattggcttagacccagctcatcctccttctgcttttcaaataaggtatgggggctataaaggagtcatcactattgaccctacatcctttttcaatctttctctgcgacctagtatgaagaagtttgaatcgaagagcactatgctgaacattacaaattggagtaagtctcagccatgttatgtgaaccgtgaaattatctctcttctttcaacattggggataaaggatgaagtatttgaatcgatgcaacaagatgacatgcacgaatcagatggaatgctaacaaataaagaagctgctttgtctgtcctagggaaaattggtggcggtgataccaagacggcagctgatatgcttctgcaaggctatgaaccaagttcagagccttacctattaatgattcttaaagcccatcgggctaataggctgaccgacataagaactcggtgtaagattcatgtccagaaaggccgtgttcttattggttgtttggatgaaacttgcaaattagagtatggccaagtttacatcagaattacaaagaatcacaaggagcagaagtacagtgaacagccgttcttttgcaacgatgatggcaaaacagctgtaattgtaggaaaagttgcaatcacaaaaaacccttgtctccatcctggtgatgtcagagtacttgaagctgtatatgaccctggattggatgctaggggtcttattgattgtgttgtatttcctcagagaggggaaaggcctcatccgaatgaatgctccgggggcgatttggatggcgacctcttctttattacttgggatgacaaactgattccggagaaggttgatgcacctatggactacactgcaacgaggccacgcataatggaccatgctgttacacttgaggaaattcagaagcacttcgtcagttacatgataaacgataccctcggtgccatctccaccgcccacttgatccacgcagaccgtgatccactgaaagctcgcagccccgagtgcgtccagctggccgctctgcactccatggcggtcgacttcgccaagacgggagctccagccgagatgcccctggcgctgaggccccgggagtttccggacttcatggaacggtgggagaggccaatgtacgtctccaacggcgtcctcggcaagctctaccgcgctgccctgcggcacgaggaggacgcagaagcgctcctgcctgcgggcccaccgagctgcgtgtacgacccggacctcgaggtcgccggtttcgacgagttcctggacgcagcggaggagcggtacgaggcgtacgccgagaggctgggcgccctgatgacctactactcggcggagcgcgaggacgagattctgacaggcaacatccggaacaagctggtgtacctgcggcgggacaacaagcgctacttcgagatgaaggaccgcatcatcgccgccgtcgacgcgctgcacgcggaggtgagggggtggctcagggcgtgcaaggaggacgacgcgtcgagggtggcgtcggcgtggtaccacgtgacctaccacccggaccgccgcggggagaagcggttctggagcttcccgtggatcatctgcgacaccctgctggccatcaaggcggcgcgcaggtgccggaagcgggtggaagacgccgccgtgcccatggactgcgacggttcctagacggaggtgccactgtggcagtgaagtgagcctgtgatgcgagtggaaactgtagtaataagatgcagtaccgctgagcgctgattgctgtaaaaagaagttagcgcgggttgtcttgagctcctcctaacaggcgtacgtatggtggaaccgtggaatcatgatttgccgcccttgctgatgactagaagcaggtacggttagctaagccgttacgtatgggtcaccgagttccccggccctaaagttgttgggggcttggggtggctgcttgaccaccctcgagtcgtgacatgttctgtcccccctgcgatcgtctaccaaacctccaacagtccaacgctactactactcatgtgagttttgactttccacaaatacttgacgttttggttaacaaagtcgtggagcttagcagctatcaagagttaaatccagaaacataaacgtcaaaatatgtacagctttgtgttgtaaagtagttgcataagctcttataagtcatcacattgttgagcaccaaaagggtgattattct

SEQ ID NO: 38599 - DNA, 2762 bp, Zea Mays
cgctcgtaattggccgttattattgtactcccttctccattccactcgtccccttcctccccttccgtctcgcaacaggcgaggcgagagaactcgtcgtcgaagcgaaatatagccagcgcaccaatcccaattcccaacccgacgcaacgcaacgcaacgcacctcatcccggttgcttgcgccaacgtaggggatcgcccggccccgccccgctccgcttcgcgcccctccttcctgcctgccgtaaccgcgccgtgcaactgtgcaagggtggggtggtggtgccatggcgagcacggtgtggagggaaggcggttgtggccagcatgtacttttctgtttcggtactctggttcgatcctgatggggttttcgtccatcgatcgcgtctcggtcctgcacgcaatgcagagggggttacggttctttctgttcttcctccccgcggtccgcgtcgggatgctggtctggtcgatgctttttttggcttaccgcggacgcgacgggatgcttcggccgttgttttcttttgatctctgtgacccttctgggaatcgattccatgccggattggtcgcaatgtgcgggaggttttttcttgtcctgttttttcctcgctggctggttggattctgccgcgaaaagttctcccccttatgcacctttcccccccccctcaagatatctttattcgtcgttttcgtggttccttatgggtgcttgggttcccttgtgtggttaaaaggccaataagctgcagtgtttttgttctcaagagttctttccttgtgacagggggacatcacagattctttggtatcttcctggaaatttccatcaattgttttctcctcaaccattgctggtcatgttgtttgtagtgattgtctgtcaggtgaaacatgttgtgtttggtgatgttcttactagcattcaaatgactcaagatacattagttatttgtcagttgttttgtatctgatggaccaatatatgctcaggattcatatttgggcacttgaggtgaaaaccatcttattcgattttgttgaactgtgataccactcattcttaatgaaatggatcatttccctttgccagtatcttgttgctttatttgcacccttgactatagttagtatagtttcagtattcgaggtgttgtcctatttgcaatatcaaacaggaagcataagataagagaaaagtgtatgtggcttcattgttagatttaaaatattgatactgtctaagtgattgtcaagctaggttgtcatatccatatggttcctcattacacatttaattgtgggatctgtatggtttcacagacgcatttataacattcattgtgcgtttcatggatcattatttaattgttgtatattaatgctccatttcttagggcatttctgcattcatgtgggcaagctggatgattcaaagttgttgatatgtggttcagtaggttgttgagtctagataccagatgatggacctgtccacgacttcagtgctggcagctaaagcttacaaatacaaagcagaatcacttgttaaggagtaccttcttgcagattcgtatgtttcatacactgctgtacttggtgggatcctgatgtgcaagatggcttatgacataacaagcataatcagctcattgtactacaagggttatggttcacttacaaaaacccaaaagcttgagtggaacaacaggggcatgtccactatccatgcgatattcatcacagtggtgtcagtgtacctggttttcttctccaacctattctctgatgagctggatggactagtaacttatcggagttcaaatctatccaatttcactttgggggtttctgttgggtatttcatcactgaccttgctatgatattatgggcttatccttctcttggtggaatggagtatgtccttcaccatatgctgtcgcttatttctatagtctatgctatgtattctggggaaggacagttgtacacatacatggttctcatctctgaaacaaccacacctggaatcaacctccgatggttccttgataccgctggactgaaaaaatccaaggcctatcttgtcaatggtgttacgatgtttattgcatggctggtggcacggatcattttgttcgtctacttgttttaccacatttacttccactatgatcaggtcaagcagatgcatacgtttagctgcattctgatatttgctgtgcctacaatactgctcgtcatgaacacaatgtggtttgccaagatcttgagaggccttaaaaagacgctagccaagaggcagtgaaaagaagaatggtaaaacaagctcaaggacatcgatagccaaaatccatcccctcgtacagtcactttacagttacatgcacttcccgagtaaagccgtcagtgcagctcgtagcacaagctaaagcccttgcacatgatcctgaaatacgctaaacacagctcatttttttccctggatgctctgccttgtacatacggccgtctgtattgggtgcttacaccttgagggatcgtttggtgaccaggaaaatagatgggaaagaaatccctttgttacggcctcgttcgtttcaactggtttggctttggcccgtttccggcctcattccgggtggaaatggaatttggttgtttctctatgagctgttcgatggctgagtctgacgattgcgctgttgcgtttgtcttttctatttcttccgatcttaaatatacgagga

SEQ ID NO: 38600 - DNA, 2823 bp, Zea Mays
ccaactgagtagggacagagagggcgggcaccatcacgcggccccagatcctagccacgctcccgcacccactcttccatcgcacgcacgggcgagtgcggcagatcgctggcggatccaatgctgctgccctggtagctgctgcaccgcgcggctgctggtttggtgccctccggctgcggcgccgggtcactttcgatgtgaccatctgaggaggaaaggatggcggcttcggcggcggcagcgcctgggtcggctgagaggcaggcgcgcggcggcgcggcgtcggcgatcggcaacgcggtatttaagagtggccctctcttcatatcatcgaaaggaattggatggaaatcatggaaaaaacgttggttcatcctcacacgaacgtcactggttttcttcaagaatgatcctagtacattaccacagagaagtggtgaagtgaaccttacattgggggggattgaccttaataattctgggagtgtagtggtcagggaagacaaaaggctgctgaccgtcctttttccagatggccgtgatggtcgcgcctttaccttgaaggcagaaagttctaaagatttgttcgagtggaaaacatcactggaagaagctcttgcacaagctccaaatgcagctcttctgatggggcataatggaatatttcgcaatgacacaacagatgtggagagagaagagacctaccaaatcactagttgttggcaggccaatactacttgcactggaagatatagatggcagtccttcttttctggaaaaagctttgtgtttccttgagaaacatggaataaaggtggaaggaattttgcgtcaagctgcagatgtggaggaggttgacaggagattgcaagaatatgagcaaggaaggacagagtttgcaccagaagaggatgctcatgttattggtgactgtgtaaaacatgttctccgggagcttccatcttctcctgttccagcttcctgctgtacagcattattggaagctttccgtctggacatcaaggaatctcggatcaaatctatgcgtgcagcaatatctgaaacatttcctgagcctactaggcggctgctacagaggatgagcactttaggtgctccttatcacctgattctcaaacaggagatagtggaagtgaagaatcaactgatgatgaaactgtggatatcaaggataatgggtttcatgatgcagaaaatgatgtagatcaagaattagatgatgccgagcgaatactgaatggaaaattgagtgaaaccagtgcatgtgtccatgctgacctccatgactacaaggaagttaatggcaacgattcagacgctgagctctttgttgaggataacacatttgaaccaaatgtaaatttaaatgatactcccctaagtcgtttaatagaaaatggaaagaaaccatcaaatctggcgtccagtcatgaaactccattatcagtgggagaaattctttcgtctttggatgctggagttccattacctggtcgtgcagctgaatattccaaggacagactctctagcaaacccaatggaattcagcagcatgtgaagcgtactaacttatggggacggagcaatgcaagaaagggccaacgttcagagttagttgatccttcaagtgaagaagagcttgctattcaacgacttgaggtaatgaagaatgacctacaggtcaggattgcaaaggaggctagaagtaatgcaatcctacaggcaagtttagaaagaagaaaacaagcactacatgagcgccgtgtggctctggaacaaaatgtgtcaaggttgcaagagcagctacaggctgaaagggatcttagagctgcactggagattggattaagcatgtattcttcacaattttctagctcgcactccatggactcaaagacaaaggcagagcttgaggaaattgctctcgcagaagctgatgttgcaagattaaaacagaaggttgcagagctgcatctccaactcaatcaacagcgccagcaccagtatggctcttcggtagatgcaaatgattgtcctccgcaccttccaaatcatctctcacagaacactgtccaaactggatttgataggaccgttgctttttgtaatcaagagaagcaaagaaatgaggagagcttgccgtgcacatcccactggagaagcatcaaacagcatgtgctctctcaggattcttcaaggcctttctcccgaaagcattcctcagacacctccttgagtgattcaatggaggcatcaacaagtgtgcttgcagagggcgggccactgttggtgaacatcgccagaacaacagaaggtgttgaatacgggagacctccgactgtgccgtcatctactctagttgaactaacaaccaggctagatttcttcaaagaacggcggtcacaattgatggaacagctccacagcctcgatttagggcatggatccgcgtcccatggtttcccatacaaatcttcatctccctggaacaacccaaggtagggggcttgttcagttgctgcattaccgcgcatctgtatattcttggtataggatcccttttgtttcactttatctctgtagaagctggtctcgtttttgtttcacttgttatctctgtagaagctggtagtgagaatgtatataccccttgcctgccttcacttgttttgctagtgcttccagcggacatttttcgagcgtgatttttgttttgcttttgtatttattgtgtatgtaatgactcaaggggaaatatatagatgcgtctttttttcttggggatatattccactgcag

SEQ ID NO: 38601 - DNA, 3318 bp, Zea Mays
gaaaaacttcagcatgttctaggacattttcagaaggaattcgaaggagaagtttctgcagagaacctcgggtcgaaatttggtggatatggttcatttttacccacatatcagcgttctcccctgctgccccaatctgaaagcccacacattgcattgaacattagcatgtcaggatcaccttaccaaccatctgctgagagaatggatcaaaacccctctactgtagctgtggagcccatttcccgaaataacggttttggagcaccttcagctagtgattcaatcaagaagaaaaaattcctgagtacaaatgatgaggaatcgattgcaggttccgattctttggacacttcacttagtggtagtgactcaaagtcactcaaatttcagaccaaagtttgtctcagcaatgatctgccaagagaaaatgcagttatctatagtggcctgggccttgatatttctccacgttcgtccatggaggagagtcctaatgggcttgggggactatctcctgagtgcagcaatgtgccatttgaatcacctcggactatcctacaggtcatgacatgccttccagttcctggaggtttcttgttgtcacctctgcatgggaatttgctgcaattaagaaataaagttgctccggtgctaaagaatttggaaacacatttagacatggaaaatgtatctagagcattggaaggacgttcacagtcttttcatccccttggacttatcagaggcaatgtgactaagcagatgaggccttgcagtaagaaaaaagtggcagtggatacaaagactagcaagtacaaaggtgatgctagtgcaaccatgaacaatgaagttaacatccaagtgcctgccagccaaaaagagaagatgaacacgaataacaagaatgagtttgaagttggttctgcaaggaaggagatcccagccagtgtaaagcatggagagttgtatatgcagccggccagcagtgtatcaactatgaatgcatatcatgttcctgcaccagttgtgatcgaggaccactgggtacgctgtgacatatgccataaattgcgtcttctaccctatggaatgaacccttctatgcttccaaaaaaatggaaatgtaccatgcttcactggctgcctgggatgaataggtgtgatatcagtgaggatgaaacaacaggggctctgaatgcattgtttgccattccagcgactgccacaaccctttcttcaggtagtcctcatactgcagttacaggaggtattatggaaaggaacaaggcttatccaaagttaaagactaaaataaggattgatcaagatgaacagaaatcatataagaaaactaaaattgaggcttggcatcaaattgacagaggccaggaccacaggtgtgattcagatggtgtggaagttcctgatgaacacaaagctttacttgcaaaagcaaaagcaatgaagggttcacatgaaactgatgacatgtctttatgcaagaaaaatatcgcttcagggtatgattcatcggaaaacgtcaataatgttaatgctttggatgtaccctttcacagtgagaagaaagaacatccttctgatgtagacatattagatttgtcttgcaagaagaatgcagtgaagaaattggagattcagcttaactctttacattgtataagcaatgggccccagaagaacttgaaggaaaagaagtctaataaattgaagtctaaagagatggcatccaaggaagatagtagacatggaaaagtgcagcatgcagatgccgtgttgtcttctctggggcacctaaattatgaactaggtgctgacaacaagtttgttactgggaaagaaagtctttcagaacaattagaaactttacctgccaagcaagttttggacttggctgaagcccctggaagggatgtagcctatctgcagtcttctacaactgtgagctcaagctcttcgaagatttcaagctccagaagaaacacaaactcgcaagaagcaaatgactctccaattaaatcagcctcttcattgccactgagagatttcagcattaaaatgatttccggtaacagaaaagatggaacagtggatgcttccttgggcaacacacacaatttagcaaggtaccaaaacagtgaagtcattgcattaaattatggtcagcaagctggaaactttgagggggatcaggttgcaggtgaacccaattttcatggttctttgcaaggaatctcggatagcaatatcaaggaaatacctcagtcagctggtgctcaagtctccaatatcactggttttgggaggagtttggataatagtctgccggaggcatcatgtagagaggaccttactgtaaatgatactgttgtaggtagaggagaccatcaactgtgttctggtgaacaaaaggactttaatatggaggttcgtttaccactacctgatcagcattgttttggcaggattaacactgagtctggttctgttcgacatgaaagtaagaacattgaagttcgccaaggtagtggaactgctcagcggctgggcatgttatttaaaaaagaaaaatctcaccttagaatccttaatcgagatattcagaaccatgttaatcaagttgtcaattttcctttgaaaggaggtaaacaaaaggtctgccctacttcagtaaaatctgaatcgttgaaaatgaaagcaaagttagtgaggttcaatgttgaaactggagtgcaacatggcagtgttaagcaagtgacatcaagcactttggacacaagtccaatgaggaaggatggtagtatgattacatttgctctcaaggaagctagagatctaaagcataaagcaaatgatttgaagaataaaggacaagaacttgaaagtacaggtctgtacttcgaggcggctttgaagtttctgcatgttgcgtttcttctagaaactcctagttttgacatttcaagacaaggtggtggaggtcggtcaatgaagatgtactctgaaactgcaaaattatgcaacgtacaagtgtgtagaagttgcttacctcaaggctgcatactacaaacaccgtactgctacaaaagatcaacaggaacttcaggcagctgtacagataacccgaggtgaaccaccatcgccttctgccctagatattgataatttaaatagccatggatcatcaaatgcctcctcattaaagggtgacaattcacctcatgtgccaggcaatcatttgcctctagctattcacaaccaagcccagctgttgagattacttgcctatacaaaaaa

SEQ ID NO: 38602 - DNA, 1994 bp, Zea Mays
cgcggccgtgacatgggatgggaggaagcttcccttcggtgaggtaatcaaggagattgggttcgttgcttccccagcacagtggtgttttctgcggttggtgtgggatccatggagatttcctgcctctggaaatgaaatacacatgtgtagaatcaaacaacagtagatttttatgaaatttaggattgttcatggagctgaatatggatacatgcaggtggcctttttatagaggaaggaatgagtattaattaagttctaattagttgcgagtagtgttttgtcctatagaactagggagttttgcttcatggtaggtgttcctaggctgcaaattttgtctgatcttgcattgagaatatgatgggtgaagtctgtgacacgtcgcgtcgcgccgtcggtcgaagccagctcaatagtgaggttgaggcctcacaactttctgcaaaactacatgtcaagtgctccaccttgtcagaattttaaagaaacattttgttgtttcaccttgacttcttattgacatggcctattggagagagatctctgtgtgtttctggtttctaattggacatgtaaaagtttatgattagttgttgcataaatggattggctagaattttcaaagtataggtgcttggtgtcttctcatggtcatagggaaaatatcatagctgatattttcacacaagtgaaggatccacaaaagggatttgttccctatggaatgatcaggcatgctaaacatcttagttgtctaacttagttcttcagataaatgatttgtcctttttttaaatgtcatatttttgcttcagggaactactcgtgccattctataaggcaaatgggagccgcaaaccaaataggaaaattttctatggagacatgccagtgaggagcagtttagccggttcttgcattatgaagtggatgcaattagaaagcttggaagagggctaccttcctctagttacattcatagtggtgcaaaagcgccatcacacactgttttgtcctgaagatcatcgttcacacagacaaccagatcgacgtggaaatattttgcaagccactctggcattcaggtgagccgatgatagatgttgcgattctccagaaagaaaacaaattctcgtctcaacacatatggttttaatcattttgcacttttggcaagggacgagccggtcatcacattaccatggtggacatttgagatttgcaaccttgttgtgcatagttttacacactaagcacccattgcaccgaaaaaacttacaggatgaactagatgcaaaacctgaagagctggaaggagaagagttggaatctaagcttctagagcctgttgcagctctttcggtgcatccagtgcatgtcccaggaaacaagcaactagcttgccctacttcacagaaagttatagctaaatacgatgagctggctgcactacaagctgaaatggcattgtgatcaggacactttggagacaatagttcttatggcgcagtcaggctagcaggctgccatctgagtttgaaattaccgattgctgccatccttgtgatccagacaaggaaaatgttcttgctatttaagttatgaggtggagtgatggctcttatcttgaagatcaggatcactggcggttgggttactccttgattcttacatggattaacgcatggaccgaggaagcgcaatgacaagcctaatagcctgcaactgatgaaaggaatggtctctactacatgtattattgtccatcccatctttgtttaatggtcgtagctgctttatacaattattcctacctatgctagactgtgagccattgtatatcaatgtattttatcatattgatttcgtagcaacgtacgagcatatacctagtatatttataaacaatgtgtagcacttgccacatttaaacagctaatcttaaaaagacacgacatgcgaggattgttaatcaatatcgtttgtat

SEQ ID NO: 38603 - DNA, 2636 bp, Zea Mays
agctcgctcccctcccgccccactcgtcggctagtcgcctagtccctttcccttccacacgattcggagcagcacgtgcgcgtcaaaccttaccaccaccgccatcgtcttgcggctaaattgccttgagacgccgcagcactgcagcagcacagggggggagaaggggcgggcgctcgagtgaaccaccactacactactccgcgtctccctcccctggctacgaggctataataacgagcgcgtaagacggccggcggcgcacgcagccatgtccgcgcacctccgcctactctcggccgcccacgtctccgcgcccacacccacctccctccaccgcctccgtggccctcctccttctcctcccgcggcccgcctccggctgctgctgcgaccgccgcggctcggggggagccaggcgcgcttcgccggcgccgtccgctgctccggctcggcgtcggcgccggcggtcgcgcgggttggcgaggacagcgacgcggcggcgggcatatgggagcaggtgcgggatatcgtcgtgttcgccggccccgcgctagggctctggatctgcggtccgctcatgagcctcatcgacaccatggtcatcggccagacctccgcactccagctcgccgcgctagggcctgggacagtgttctgcgattacctaagctacatattcatgttcctctcggtcgcaacatccaacatggtggccacctccttagccaaaaaggatgaagaacttacacaacatcaagtgtctatgttactgtttcttgctcttgcttgtggcataggaatgtttttgttcaccaaggtgtttggtactcaagtattgactgcttttactggatctgggaattatgaacttatttcttcggccaatacatatgcacaggtctgtatagttgaacatatctctctgcaatgttatcacggcatcaccccattttaattgatagaaaaggaaatatttctggttaaagctagcatcgtgtggtttcgagttttcttttattgagcattagcagtaaaaaggatcaatagtataagtggatatggtgcaaagttcagttttatgatgtatgtcaaataaaacctcagaggcttgtgtatgagagtgggaagcaggcagaaaagaaaggcatgctacaaaagactcctgcatatgaagtttacatgtaggatatcatagggtatagagttaaccttttatttttgtgtgcagtaacgtatatcaatatgtatacttgctttcagataagaggtttcgcatggcctgcagttcttgttggcttagttgctcaaagtgctagtctgggcatgaaggactcttggggtcctttgaaggcattggcagctgctagtgttataaatggtgttggtgatatatttctttgctctgtttgtgactatggaattgctggtgctgcctgggcaactatggtttcacaggttgttgcagctttcatgatgatgcaaaatctaagcaataagggttttcgagctttctcatttacgattccatcagttagagagctattgcagatatttgaaattgcagctcctgtttttgtgacaatgacgtccaaggtggcattttatgcattgctcacatattctgcgacttctatgggagcaataacgcttgcagcccatcaggttatgatcaatgtcttatgcatgtgtactgtttggggcgaacctctgtctcaaactgcacagtcattcatgcctgagctggtatatggtgctaatcggaatctgaccaaggcaaggatgctattgaagtcacttgtgatcattggagcgataactggattgaccttgggggtagtagggacacttgttccatggcttttccccagtgtctttaccaatgaccaaagggtcatccagcagatgcaccgagtactggctccatatttcagtgtattgctggtgactccttcaatacactcccttgagggaacactcttggctggaagggatttgagatatttgagtcaatcaatgggtgtctgcttttccattggaacccttctcttgatgcttctccgcagcaagggtagcttggcaggatgctggtgggttctcgtcttatttcagtggagccggttcggaagcgctttgctacgacttgtttctccgacgggcatgctgttcaacaaaaacttcaaccaggtcgagtacattgaggcaaaaacgacatgaagatgcactgtacccatcacaagaggtgggatgatgaagatgtagaaaatgaggcacagaaacctggaaagatgaatagatgcaaaaggattcgcaaaaaccatgggaagatcatttgggcaaatcacttccgtccagaaggggatcagagttggctacgatcacttccattcgtcctaggaactatatacctcacagattcatggaagctgagaactgtagtagtggctacgctttccaacacttggcagtttgcgcccgtagaatggagttaaactgagtgctaaattttgtttcttgttactaaccgttaagaatcacgagatggttaatgatggttgagcttgtccagaaaacatggataagtgaggtctcaaaaaatgtagcatcttttccaatattatcgtttcttatgccat

SEQ ID NO: 38604 - DNA, 1982 bp, Zea Mays
taaaacaatttattacgacgctgaggcattttctcgtgaaagaaaacgcactcccgactcccgagtgatcccgagtcccgacggccgacgcgcgcttaagggcttacggctaatccggcggctacgaaaggaaacatctaccccgttcaaccgttccatttcttctcccgttccgttcaccccccccgcgagctctatctttcgtggcgcagctcggcagctgggcggccgccccccgccggcgccacgccctaagctacgccaggttcccagttcttcgtccgtccttttgctaggtcttcgttggacacttaaacggcgacgagcaccgccagacgcgctggtgcctggatccggcgggagtgcttcaggttttgacggttcgtctctctcgttgtttccggcggggttatgaaggcggtgggatacagcccctacgacagcagcgcacaaaatagaggactaagagggcgatctttcagtgggaatgtcgtagcatctgctggggcatttccttacatgagggcaaataatgatctggagagtgaaatacatcgggttgagcaagatgcatatactggtattcttagggcatttaaagtgcaatctgatgcaatatcctgggaaaaggagagcttgattactgaactcaggaaagaactgagggtttctgatgaggagcatagggagctattaaataaagtcaatgaagatgggaccatccgtcgaatgagggagttaagacaggcaggtggatccccaagtggtttgcatcatggcaacatggttttatatggtgcagaacctgggtccactaccaagaggcaaagggcatctcattcgattcctttgcaatcagcaggcctccagtcccctatgatgccctcccactcagtttcatctgcaaaatggggtcctttgcaagcaagaggcacgaaagcgaggacgcccattcctttggcgttaccatctgtggatccaagttcactaataaaccataaagtttatacaaggtggccagaagacaacaacttctatgaggccaccataacacgatataaccctgtgacgggtgagcatggacttgtctatgacatgggcacacaagccgagagttgggaatcagttagactttgtgatatggcacctgaagatataagatggggatttgatggacacctttcaaatcgtgatgtctggagcccttctggccctatgttgatgaggcacatgaccaacaatggtgctatggcaggttcaatcaagggaagagggaggttatcaataaatgagactataaaggactatgctccacctgaaaatggcaccaataggaattttgatcatgtcgacataccaaataccggaagtgttgttatggaggtgaagagggtattgttcaacccaaatatgcctgaaatcgagaaggcaaggaaacttttgaaagatcaggagcagtcattacttgatgcaattgccagacttgatgaagcatctgatagcgataatgaagatatggccatggaaggccgaatgggttctgctggggaaaggaatggcatcactacgtagttgcttctggcatgttggaattttggtagattaacatgcatttgtgtagcacctacctcgaccgcagaacaaggaaaccacattatggcaaaactgcatgccagaaaatggtgtcctggaaacggttgacgcctgaaatgggattttttggctacacaaaattgagcgcacgagcggcagagatgcaaatgttaaagaactgtttaagcgccattgcatggtgtttcctatgtagcaaactagaggcaactaaatgttctagttgatcattagcatggagcacttagcattcctgattcagtacaggtagatgtctaacactccagcataatatccaacttggctgttcttgtactctaatgtgaaaaaggattgttgtgcacgcttttcatgtaagcctcgagtgagta

SEQ ID NO: 38605 - DNA, 2319 bp, Zea Mays
  misc_feature (2318)..(2319): n is a, c, g, or t
gtagtctgcctctcctgttctgcctccgtcgtgttctgcctcccctctcgttctgcctcccgcgcctccgataaggctctccctgttcggccatacgcacaaccgctctctctccctctcgaagcgacgcagaaccgctcgccagtgtcgcagtcgcctcctgtccctctcctctctctttgccgctgccctcctctaagcatctccctctcctactccctcctctcaaagcacttgttggccccccaccgccgcatctgcatcccataatcgcctacgccatcgccgccgccttcgggtccttctcgctcagcctcgactgctcgctcatcttcaccgaggcgctcctcacccccgccatcccctccgtgtcggcgtgcgccggcggcatcttgcccagtctcagccgatttatccttcggtctgttagggccttatcaaaccgccgccacggcgaactcgcgccgctgccatgttcgcctcgcgcacccaccatctcctcaacaacgttcaaaccgccaaccacgacatcctcctccacaacccgacctctcacgcatcccaacttggtgcggcgtaaacgcgcagcagcacttcgcctcggtcgaccacggcctgcccccaggcgttgacatccagatccatctcgctccgatctacattcgagaagtttgtctctggcatcgattccccaatccgaatcattgccgacgtcttctttgggtggacggtcgaagtcacgcgcacgcacatcccacacttgttcctccccggcggtgcattcagcaacaccgtcttcttctccgtgtcggagcacctcgggccataggggcagacccgtgaacgacattcttttggcgtgtcacgacctcctgtcgcaagctcgatgctctccccatcgacacgtgagccccttggagggagccccgacctagattttactgagagtttctcctcatcaacctagatctcagtttctctggactttactgagcactcaacattgtgttttttggttgctggtaaattgctcatttactgctatagttgattagtaaatataccggtattagtatttatatagttactggttacttgtaatacaaacatttttcattgaagcgcgtatatggtttgtaaaataccagaacaaggtcagtacttttatcattggcgagtatcttttatgtgagtaatatttttatttccatgtttatctacttagttctcgtggcatgctgccttttcagtattggacaatgctaatggagttacaactccaaggacaggaaggtatagtgcagatggagcaggtggtgatgcttctgtagagcttacacggccgtgcaggcacgcagctgccgcgcttggtgatttgatatttgtgtatgacggtttacgtggaggtcaaggaattccatccttgtgtttgcatggacctagaaaatgcagatttaagaatgatgcgagtgatggaggcctatcaggtcaaggaatttcatcctgatgtttgcaaggacccagaaattgcagatttaagaatgagcgagcgatggaggtctatcagggagtgttcttcgttgctatccattgtgaaacatgtcctacagtatcccttgccaaccagctcctgtatctgttgcctgctcgattcgttgaagcacagagtatggagaaaacacaacatatatcgcatggattatgatttgttagtgcatgtgttacatattgacttatcgttttgagttgtcaataggtccaagagactacagtgttgtgttgtgttggttcactgtaccacaaacaatattgaagaggactgatgaagagcgcaaagtttatagcatagtcgaagattttgaattgcaattcaaggagaaagaggattgctaaaggatgaccttcaaaacaaaaaaaagctcattaaagaacatgggcattatgaaagcacaataggatccaaagaggtaggtccctttttgtcacttatttaatattcctgaataacctgtgttcggtctgaaagagcacataattgcactcctatttttaatccttacatgattactgcataactgtttatcagtttgtggtctacaggtatcaggctcgctcgcaccacagatatctttgagttattttttactgcattgcgactaattttaggcctccaatttgacaaacagaattaagtagcttatgtatcccttgtttcttgtttcctcagtatatatacacactttccaatatgacgcaggtagcattgttgtagaattgcggttcacggaaacacaaggctagcgcttttgtgcaacaann

SEQ ID NO: 38606 - DNA, 2600 bp, Zea Mays
ccccccacccatcatctgcagcctcacatgttactgtagaatatagcggccgctggtgcagctgcagcaacacagaacgatattttgaagatacggaaagtgtacgattcatttcttacggaattccctctttgctttgggtactggaagaaatatgctgatcatgaagcgagacttgatggtgtcaataaagttattgaggtgtatgagcgagcagttcttgcagttacttattcagtggacatttggtataactattgtcaattcgcaatttcaacatatgatgacccagatatcgtccgaagactgtttgaacgtggcttggcatacgttggaactgattatcgctccaatattttgtgggatgagtatattaagtatgaagagtcactggaggcatggagtcacctcgctgttatatatacaagagtattggaacatcccatccagcagcttgatcgctattttaattgcctcaaggaattggcttcaaagcacagtttttcagaaatacttactgcggaagaagcctcggtgtatgttgtcacgtctgagaccagtgctcaagcgcctgatggtgacacacatcctgatgatatcgataaggctggtcaaccagaactttcatctttggcagatgcagaaaaccttgcaaagtatgtctccatgagggaagagatgtacaagaaggctaaagaagcttgaaaattggcatagctaccttgactttatcgagaaggaagaagacattaataagtatttggacgaagcttcctttgtaatgggatgttgaactgaggatagagcgtggacataatgtttggtttcgatgaggctaagtactccaaactttcatttggcagtggtcgttctgggttcatgatatatggtaccaaataccagttttgaatttttaatctcatatatgcaggtatttgcttaatgctcaccttcttaaccatctatctatcgagcaggatggtccctcctttcttatggaggggcctccataatcagctaatggagtaatctgttatcaaattgtatgaaaggtgtgtgattgcatgtgctagttattcagaattctggatccgctatgtgcaatgtatggaggataaagggagtctagacctagcaaacaatgccctggctcgtgctactcatgtgtttgtcaagaagcagccggagatccatctatttagtgctcgctttaaggagcttaatggggatatttctggagcacgtgcagaatatcagcatctttactcagatttatgtcctggctttctagaggccatcgtgaagcattctaatatggaacaccgactgggagataaagaattatcttgttcagtttatgaaaaggccatcgctgctgagaagggaaaggaacagagccagctcttgccgacgttgcttattcagtactcccgtttcttatttttggccatccgagatttggagaaggcaagagaaatattaactgtgctgcatgagcagttaaatgtaacaaaaacagtgcttgaggctgtcattcatctagagtcaatttttccatgcgaaaagcgtattgattttttagactcacttgtggagaagtttgttacacctgaatcatctcagggagaggtggcaagtctagttgacaaagaggaaatatcttccatatttttagagtttttggatctctttggggatgcaaagtcaatcaagaaggctttaactcggcatacaactcttttttcatgtaagagaagcattctgccatcaaagaaacggaaagcagatgacactgttgtctcagacagggacaaatttgctaaaactgtggttactcagtcagccacgggaactgatccaaatgcttccaatcctcctgtttggcctgcaacttctgaagcatctgggcaacaatggggagcttcttatgcacagcaggctgcatatcctgcatatggaacttacgactacagccatcaaatgccccagcctgctcctcaagcagctgcctatggtgcttatcctccaacatactctgcacaggcctatacacaacaaagctacccacagcctgcagtaattccagcagcaccagtaccagcacctacagcgccgtcagcttatcctcaacaacctgcggcagctcaaccttattatggcacaacctactactgataagtagagtagtcgtggatggtgatccgatgagcctgttaatctaccttttcgcatgtgtggttgctctgtactgccattgtttagctcgcctttagacgaatgctagcgacgagatgatcacttgagaacaaatctgagattcgtacaatcagcatttttgtcgctaggagttgccattgttttcatgcaatagcataatctactttagacgagatagcgttgttaaccatgaatatgaacataatcgacataattcagtgttcatgcctcctttcgtactgtatttttaccccaccagtggtgatggcgggattcctgtcaagcacgctcactggtggagccctccgaacaaattgtcagctaatggctcacgatctgcgactacgcagttgactaatttatactgtgtcaatgctcaacag

SEQ ID NO: 38607 - DNA, 2028 bp, Zea Mays
gagaccatcagctttcagcagcttgcaggcttgcagctgagctgagagagtcaaaccctccggagtccggaaaacgggcacaaccacctctcctctgggtctcgtactctcgtcggtcccctctccggtccacactccctcgcgcccgctccactccactttcccttccccagtcggccagtccccatccccacccccagccccatgagccgccgccggtgaccagcaacatcccatgggctgcgtgcacggccgcccccccgcgtccagccccgaccacccaccgcagctgcccgagccgccggctcccgcggcgacgcaggaggccgccgggaaggccgagcagccggcggcgccagctgagaagccggcttggcgggagaggcgctcccgctcgtcgcgcaatgcccccgcccctagcttcgccaacagggcgcgcggggagcaggtcgccgccggctggcccgcctggctctccgccgtcgccggcgaggccattgacggatggaccccgcgccgcgccgactccttcgagaagattgacaagatcggccagggcacgtacagcaacgtgtacaaggcgcgcgacacggtgagcggcaagatcgtggcgctcaagaaggttaagtgctatatgcatcagctgctgtcgggtctggagcactgccacgaccggggggtgctgcaccgcgacatcaagggctcgaatctgctcctggacaacaatggcatgctgaagattgcagattttggtctcgcgtcgttcttcgacccagaccgtaaacagccgatgacgagccgggtggtgaccctatggtaccgcccacccgaactgcttctcggcgcaacggattacggggtgggtgtggacctgtggagtgcagggtgtatcctggccgagttgctcgctgggaggccaattatgccaggacgaacagaggtggaacagctacataaaatttttaagttgtgtggctccccaacagaagaatattggaaaaagtcgaagctacctcatgctacaatatttaagcctcagcagccgtacagaaagcgaataagagagacgtttaaggattttccacaatcagcactgcagttgatcgagacactacttgcaattgatccagcagatcgcttaacagcgtcttctgcattaagaagtgatttctttacaaccgaaccttttgcatgcgaaccgtcaagtcttccaaaatatcctccaagcaaagagatagatgtgaaacgaagagacgaagaagccagacgtttaagagctgctggtggtagagctaatggtgatggagccaagaagacgagaacacgtgatcgacctaaggcagttccagctccagagaaaagaaggtttattactcatgcaaatgctaagagcaagagcgaaaagttccctcccccacatcaagatggtgcggttggtgtccccttggatgcttcaaatcatatggatccactatacgaacctccggacccatcttccttcagcactgtgttcacttacgagaaaggcgctgtgcctacttggtctggaccattggttgatcctgctgcagtggtgaaccaaaagggcaagcacaagtccgggcgctcatcgaaacagccggccactgcccgtgctcggtaagatcctaaggatcgatatttacaggtaaaaaataaggagacttcaacatggtgggaaaatactccatggcggcacctgcacgctgttttgcaaacgaggcatgcaatgataaagtagtttgttggttacctgttgtcatgtgagtgatttttttttctagacttcgtgtataggctggggagggagttgaagtagttacttctgtacattaggttttctttcctgctctttaagcagctggtgatgttagattcatttgaatggaagcttagatctctagtgttcccgccactacacccccttccattgtaacagtgtgttccctgcataatcagttcttatcaattcaattgaaatcgtaagttttggtgaagatttgatggatt

SEQ ID NO: 38608 - DNA, 380 bp, Zea Mays
cggtgtgcaccggactgtccggtgagccaacggtcggccgggccaacggtcggccgcgcgatctgcgcggtacacgtggccgagccaacggctagaagggggcaccggactgtccggtgtgcaccggacatgtccggtgcgccaacggctccaaggccgccaacggtcggcttcgctatttaaggaaggaaatcggacaccggacagtgtccggtgtgcaccggactgtccggtgcgcccgtgctcaacggctcctagctgccttggggctataaaagggacccctagacgcatggaggagaagaccaagcaaccttagagcattcttgatcatccacactcagtctttgcgcattcgtttgtcattatcagtgattcga

SEQ ID NO: 38609 - DNA, 3080 bp, Zea Mays
cggaaggcaaccaagcgcgtcgtcgacgcctgcaatggcgccccccttccctcgcaggcacagcagtcagcaggcgttccatccagcgtgcatgcgtcactctccccgccctgcttcctgctctctctctctctctctcgcttgcttggatcgcccgcccagtccccaggcggtggctggcagcagccagccagccagcaagaccaccaaagtaacccaacgacaacgagagaggcagccgaggcaatttaatgcgtgttcccccacacataccctcctctcttctccccgtccctctctagctactactactactattctgtagattgatacagatagcggcgctcttctcgcttcgcctcgctgccaatctcgtcgccgatccccgggtccggcgccgccacgagcttccagatccaccgcccgggcaatgctgtagcgcctcgcgccgagatgggcggcgtcggcgccgcctcgcttgccctgctgccgctccccctcctcctcctcctgctcgtccgcgcggaggcctccgctctccacggaactatattgcctaacccagcaccgagtccatctagcccccctgaagcgagatcgtttggacctcgaatttccccttcatatcctccaagggcactgtctccaggatctcctgacattgatgtgcgctctcattcgcacaagcccccacaccatagagagtcaaatcagggcccttcaccatcctcagcagaaggttgttctagttatatatgcactgaaccactgactgcaacaccaattggttccccttgtggctgtgtcgagcctattagtgttatcgttgatctggacttagctccttacctactgttcatgagcatagctgagttagaagttgaagttgcagctgggacatttcttaaacaaagccaagtgaagatcatggctgcagttgcaagtatccaggatgaccagaagacacgggtgaccatttatttggtgccactaagagaagagtttgatacttatacggcatccctaatatctgataggttcagggataaaaaggtccagataaattcatctatatttggagattataaagttatcaatgtcagctatcatggattgcaatccccaccatcatctgtgcctggaggatcggatccttcaggaaccgaagatcctataactgcagaggtgcctgatcagatgaaaaagcacaagaaatcagatattttgatcgtcgtggtagcgttagggtcttctcttggacttctgttgacatgtgctgttgtcctgatcttactagtaagatggaagaaacttggacggcttcatgaggatatgaaccctgcaactaccccaacagttaatagaagatacggtgctagatcaactttgtcaaccggcatggtgagctctgcgtcagcatcagcgttttcaacagtggctacttgcacaacatctgtaaagacattttcactaggccaacttcagaaggccacagatggttttgattcgagaagagttttgggtcaaggtggctttgggtgtgtctaccatgggacaatagaggatggaaacgaaattgctgttaaattgcttacaagggaggacaggagtggtgaccgtgagtttattgcggaggtggaaatgctcagtcgactgcaccaccgtaatcttgtcaaattgattggtatttgcgttgatcggagcaaaagatgtcttgtgtatgagctcatacgcaacggaagtgtggaatctcatcttcatggcgctgacaaggctaagggtaagctgaactgggatgttaggatgaaaattgctcttggggctgctcgaggcttagcatacctgcatgaagattcaaaccctcatgtcatacaccgtgacttcaaggccagcaatatcttgttagaggaagatttcactcccaaagttactgattttggtttagcaagggaagcatccaatgcaactcaacctatatctaccagggtaatgggcactttcggaatatgcaatgacgggtcatcttcttgtgaagagcgacgtctacagttacggggttgtcttgctggaacttctatcaggaaggaagcccgtaagcatctccgagtcgaaggatcccgagaaccttgtgacctgggcccgtcctctgctaagccacaaggagggcctggagaagttgatcgacccttctctggaagggaacttcaacttcgacaacgtggctaaggtggcgtccatcgcttccatgtgcgtgcacgcggacccatcgcagaggccgttcatgggcgaagccgtccaggcactgaagctcatctacagtgatccggacgaggcctgcgacgattcctacagcccgaggaactcatccgaccaagacggtggctacgacggagacctggtcttcgggagcgggagctgggggtttggggcctctggctctgggtgcctggactaccggaactccctgccgtttgttaccatggactacagttccggccgaatagaagggccgcgcgaccctcgcgcggcgttgtcggcgggctcccatgcccagccaccggtgctgcagaatagatcaggccccttgcgggtgaagaagaagctggccgcctcctaccgctctagaggcagtgttagcgagcatgggcacctgccgcgccattgatcagtagtagccaatgaagtagtgttaggccgctaccttccggtttgaccttggaggctgcggtggggtttgtcatcacctctcgatgattcgtgcctcgtgctagttagtgtacagttagttcgtggtgacccttggacatgcatgcatgcctgcctgccttgggtgtaggtgtttttttctttcttattcttcttgtttgccttctgcttcttccccggaagcaatgaggatggggttggcagatgctgtctaattttcgcaaaaatgcggctcatgcatctgattggtgtaatctggtttagggctttgacggaattctggacatcatgttgttgtggctaggttgttgtattggatgcagttcgtcactaacaagcgttagggcctgttcgtttcgcatggaacgaaggag

SEQ ID NO: 38610 - DNA, 6416 bp, Zea Mays
atggagacggctgccgcgaccgcgaggcccggcgcagcgaggaagcggcggtggaaccaatcgcagccttgccaaggggagggtccgagcgatctcaagttcgctagacttcgcttcgacggcgacggcggcgccaagggcgcgtgggaacacctcgacctcgtcctctccctccagagcaaggagctgtcgctcgaaagaaagattgagctagcggtcgaatttctaaccacactgccaaataactcaagctgcagcattcagctattgcggctggtgtcatttattggaaactggttgcagtctatcttaaattttcctgagaatagtaaaaagattctacatatttttgatccagcattggatagtagatgctgggcaattttgagagtgtgtgttgaaaagaaaccatccatttcaatatctctgaacttacttaaatcccttagtcgagttgcaagtcatggtttgggcagagttgatagcaacacatcatgtcctgacaatgaatctattgagctctttgaacaagtgtttgactgcatgtcattgcttttctcttccaatacaagagctttcttcaacgctggtgtggatttatgggcctcttgtgccattgaggttgtcaatcttgctcagaaggtgtcagctaaaaaggacaatttttgccctgttcttcagaagcttgcaaattgcctcctcgggcaattcgcatgcttcctgagattttatgcaaatccgaagaatattttccatgcttttgttgataaggttcttgggccattgttggaattgttagttttacttaattcacaagcacattccagtgaacacaagcagacaggaacaatgttgaaaattgttgaagatgttttttcaaatggactgtttcatccccaacatcttagtggatatttcggtctcaggagtttgaataaatcttctgctgctaaggatatcaaaggaagctaccatagacatctatttcagcgattcaaaggaataaaaacagaaaacaaggctgtattgctggctgggtttggctacttgtttcaattgtttgttaggagggctagaaatcaaagaacaactgtagcaccaagtagaacgactttgggtacgctgcacaaaagcaatgatggttctgaagaaccacaacatagggaatcactttttgaagtgtttattatgttcatggaacccatcgtattagagtgtaaatcgtattcccaaaaggacttctctaagttaggggtgacaaggctagtagaggtccattgcatgctgaaatccattaatgtgatgctgataacccttattgaagagaagatctatgttcctacagaggacacattggaaggatctcacttcaattttttgcaagatatttactctgtcttgatcttaatatctgaaaagatgtacaaattctggatgtctgctgtgcatctagaagatgtaaacattaagaagatagtacctttaatgtttgcagagattatttctgcagttggcaattttctagaaatcgagtacaaagttctaggagacgaccttgtgaaattgtggttaatgatttttgctttgtctgctattaatacatcttccaaggacatcgaaccctgttttctgcttgcttcaaagatttcaagcctctcagcccaagtgatttgcacattcagtgaacttcgtcaggtttcccgctcaattttcagtctgtgtgatgctgtgagggcattcagagttgagggccctgatggagtacatggctcattttctgtggcctctttatcgtcccaggagtgtttgggatcattgacaacactgttgagttccgaaacattgatgggtgctattcgcacttcaattaagtcgatgcctcaaggccagtctagccgatgtatagaggagcttacatcggatctcacagaaacattgaattggatggcagattgcagttttgaagatgatgtaagcaaactcagagagccatccattgccaggaagtctattttttgtcagaaagccgaacttcttggcagacacttatctgaagtatatgctagcattcttgattcaataactgtcactgtttcaaatagtacactggtaggaaaatctgttgaaaggttggtcaatgcagtccggcgaaatttcagtcacttggtcagaaacaaatcaaaaaatataaatggatttatttcttcaattatgggaaaaaatgtatctaaaaaactacatgccaaccggcagaagatcccaagtttttcctggattttttgcctattctgtcgcctatatatatcatgtagaagcttgtatcagcaatctattggcctcatgcctccagatgtagccatagatgcaacaaagttagtggggaatccattcattgtatgttcaggaaaggaatggaccaatccgacgaatattcttgggaagggttattttgcattgatcgatgaaaattcaaactcccttttggatgttattgagagtttatcagagtctctctcaacaaactgtgcttcttttgctccacttgtttacatcttccatgtcatggttctgcagagactcaatgaccttaacaggcagattaaggcatttcaatttttgcttgaagatgatgcttggcaaatagataataaggatataggaaacactcgactgttaaaggaatcttgcagtctggaggctgctaaattgatgagttttgtgatgaattatgtgaagctattatcttcaggagaaactggtccttttgggtcttatgatgttagtagttcctgggatttgagtctatgttccttagatgaaggctcttttcctatagccacgtggcagcttctgtgtgaaaacattgacgtttggagctctcatgtttctaagaaggatttaaagaactttttctctaatttgataaggttttcttttactcaaaagagatcttccctggacaaggagaataatggcactcaatcttcgggcagagaaatgactttgcatagtgtctctattggagtcctttgtgatacaattatttatgaaaaaaaggtaattttgaagaatctggcatcaagtttttgtcatgctttgaagaaatcgttttcttttgttaccaactctgatggagataatgtctttttggacacttcacctgatttgatggagacaataagtaacctggaaaatgagaagttgattggtacaggttctggtgctacgcatgcgcactgcttagacaaacactggatctgtgaggatttccttaatttttttagtgctgttcctggatttcatgcaaattccaaggcattcatacggcttataaactatattctccatcttgaaagactgctgctgcttaaattgctaggtcttcgttgtgaatcctgcaatcccatgaagttactgcgtttgtttatatgttgtcgtagggctctgataaatctcatcttgaaattcgggaaagagtgcccagaggcaaggcaatacttgtccttttcaaataaaaatggtaactcatattccctggtttggtttttgagatctgttcaggaaattgttggttcatcacataaaatatttgacgagtgtactgatgaggtgaataggttgatgttctccttgttagataagacatcagaattattttctacactagctagtttgaattcatcagtttacttgtttgatttaaagaaacaaattgaatcttcccttgatggtagtcctattaaaaaggagacttcagaacataatgaccaggcatttgatatagtagaagtatcagccttagagtgtgtcagaagtatggctgaattgttgcagaagactgcaactgggatacctgttaccataaaggacagcaagtgtgttatcaaaatagaagactgccgtaacactgtatgttggaaaagattgtcatgcagcatgtcttgcataggaggatttttgcagggacttaattcagcattagaaagcacattcaatgatcacccaatagcaagcccagaggacaggaagatgttgcttcagtattgctcaagatttagcagttatgtcgctaagtttgggacctttgtagatatttgtgttcatgtcttgtttatggataacaaagattctgcctctatagatttagtctctgttcatcttccacaagagctagattgtgcgaatggttttctgaatattgaagcaatcatggatgaattgacaaagtgtggaagtcatggagttgatctgtctaagatacagtacatggaaaatgttcttctggaaaacctgttgaaaggtgaatgcccactcatatcattcactttgagagagatatacagtatatctgctgctatcattaaatttcatggttacctatccttttcaagtgatgtttctaggcagacttgcagccctgtcgaacagctttcattgggtaccatgcttgggatagctttcatcactctacagaaagttgcagacatgtctagctggccacacatgttttgtcttgtatggattgatggggtattaagatatcttgaagtcttaggaagtgcatttacattgtctgagctcaatatttcaatagaactgtatactcagattataaatgctttattgagggctgttggtaaatgcatcttacttcaacagaagaatgctactctccctactcatgagattggctcaagcacgaaaacactgcaattacagaatgcatctggttatgcttttcctaaagatttcattgatacacagaatagattaaattcattgaaatcgaggcttcgactagtacttggaaaatttgtcagtattgcatcaaacacacatctaaatgcagctctacaagtaattgaaagggcattggttggagtgaatcattgcagtcattcaatataccaaatttacactggaaatcctgatggtgggacagtttcttctgatgttgctgctgggatcgactgcctctatatgattcttgattttgtgccaggaaacaagcgcgtttttaagaggactgtccctggcctagttggtgctttattcaacattatactacaccttcagagtccacatattttctatagtcagaacctgccacctcaaggtagtgtgttccatccagatgctggagccactgttctaatgtgtgttgaggttatcacttcatttgtgggaagacattcttttcaaattgatgcatcccatgtttcccagtgtctgcttgttcctgtgacactcttcaaagagtttaaacatcttctagcaaagtactgcaaccaaagtgtacaacaccatggagatcatgctgaatatattcttgacagacaattttcagttgatatctatgctgcatgttgcaaattgttatgcactactcttcggcaccaacaacgtgagattgggtggtgtgtggccctcctggaggattcagtaagcatactgctcggttgtttggagtccacagattcgaagatgattaacgtagctggatattttgcttggaatatggaagaggcactaaaatgtgcttcctttttcagaaggatctatgaagagatgcgccagcagagagaaaccctaggaaaacatgccatgcactttcttgctggttatatttccatgttttctggacagggtccttttcagacagggataacacgagaaattgatgaggtcctgagacctggtgtgtattccctgattgatatatgcgaggaaagtgattttcaacagctccacacatacctgggtgagggtccatgccgaaccactcttgctgatctggtgcgtgattataaattacacttccagtatcagggcaagatctaagccagcctgttctttatttttgaacaactggcgtttatcctgtcacgtctggttagaaaatctatgaagtaccatcttctggatgatcttgtgttttgggtggactaattttggcctaatggctgcttaccgacttatcaaggagacatggtggctaataaagatttaaggcttgtgaaatcaacttcataggatctacagctgcctcgtgctgttctgcaagttgacctggacacctggtaatatcaagtagatatcgacatttaattccagggttttcctggtacttaacaacagcaaaaataggacggttagtatcaagtggtgtttggctaccttgtaagagatttactgattaaaacattgtaatgctaaagcttgaatagatcataattgaggaaagagaattatctagtgtcctggtgaagttctgccggtgttggtctcgatcgacctgcttctagtgcaatccagatccaggcatatttatcactcagaatcgagcccccctacttctgttttgcccgttttctttttgcagtttcctttcacagtttgacacaaccacaaaagtc

SEQ ID NO: 38611 - DNA, 1076 bp, Zea Mays
tctctctccccggcccccctcttctgtatatatatagccaggctgtgtttacccctttgcaaaaggcattcgttcgttcataaacatcgcctgaacaccaaagtcaccctccagcagtttcgctttcttgcttcaccctgcgatcgagatcgagctcaacaaccatggaggatttagtgagtagcccatctttcaggagcgtcctcagcagcagtagcgaagggcaggctcagtcaggagagagttcttggacggattacttcgtggatttcatgttatccgaggaggagaggaagagacaggcagatgctagctcatactcatactgcgctaccgaagacgaaggcggcagcaaatacggtggcgatggaagcaaccgcgatgaggaggaggaggaggaagaagaggagtccatggtctccgatgccgcctctcatgcccctacgactgcaggcgccaccgcactgataccagctggcaggtacaaggagctgaagaagctcaagaaaaagcctttcggcaaagccctggatcatgacggttccctggaggataccgcaagctctccggtgaatagcccaaagtgttgtgtcacagctggaattgagtgctaaaaggaggtgcaacatcagggacctcaccaagggagtcgttggaattggcgatgatcacggcggggaggggatggacgtctgtacagatgcaacgaccacggaaggagcgaggcttggtgatcagtaccacacgagcatagctccatgtgcggagctgaaggacaaggggatttgtttgttccccttttccgtgctgctgcactaccatgggccaaactgaggaaaaaagcaatgtgcgaatgaacagcatatgtagtgtttcgcaacttacactctatgcgcgcatgcatgtgtggtatgaacgaataccagaagaatgtgatactgtggatatatatatgtttttccttaattaatatatgtgaatactactatgaaattgttactcgtacacgtgtgttcctgctggtggtttcatttccatttttttgctttaccaatacacaatatatattgagtagg

SEQ ID NO: 38612 - DNA, 1566 bp, Zea Mays
cggagccgctccatcccaagttcccaactagctccactaccgtagcgtttggttttgaagaccgttgggatggaatggctccacggttccctccgagagatttggggagccggatggttaacatttgaacatgattttttttaagtcattctgtcgtgctcacacaaaatactccgcgaatacaagcttgacgtaggtaccctatagattatgggggcatgcatggaccctaacccaagtttggaagagcatcatttccttgctttgcttggcaaaccggcccaattcctcagcctagcttgcgctcttgcacggcagagcatgcatcatctccttctattcttccctttccctcgcatgcaatgcaatccaatcctttgcttgcgagccggtcatgcacggatcgcctgcaaagaccgactcctcggcgacgtataagacgccggcggcggcggcacgtccttttcgcacctcctgctgtctccatccggctccatggactccaccctgctgctgccgcgtcttcctcctcctcccctcccgtcgtcgcttcgtcgccgtcaccggcagccgcactgtcttcctccgcaccgccgacccaaaaccgtcccgagacatggcaggatgccgccggcggcgcgagaaggacgcgccgacgccggcacgaagttccgcgcccgagggctgttcggcggcggcggaggaggagacaggctccgggccgtgatgaggatggtgaagctcaactcggccatccagaaccggagcgtcagggagctgctggagctgctcggcgacgagtgcctctacttcctcgggaacctccggtccgtcgacgttccgcggctgggcaaggacatgttcctgctcctccacgcgctgatggtccggcaccacgtgtcgttcgtgctcaagccgtcgccggacgacgaggcaggcttcgacctgggcgtcaagtggtctctagagtggaaggggaagaagctgccctgggacctcgactgcaacgtctccaccacccacgtctaccgcggcctcctgctcatcagccaagtgaacaagacctgcgtgccgctgctccagaggattcttgggatcatgcagcagaacctggacgcggtagtcctggccgtcgtgcacaaggtgctgccagaaggcaccctcgacgagaagcagaggagcacgatggttttctgcgccgtcatcggcctcctcgtcatgctgctgttctacgcattgctcaagaacttgtagcttcgtcgtcgccgtcgccaccagcagcaccaccaggagggcaaggagcaagtatctagccttgtacagtaggcaggatcttgtaaacggcctgcatcatgcaggaacagaaaaaagcagtagctagctgttcctttcgtaaacagctgctgccgcatacgatgcacacacaatgatgatacatgcaggggttcaggaaaaggatgagtaaggataacgatctaaactgtattaaggttaggtatcacctaacacagcaacatttcgaggtacagatgtttcgagtcaacttagggcactagcaatgcaaga

SEQ ID NO: 38613 - DNA, 1820 bp, Zea Mays
aagtgtggtggccttaccatggctatcattactgtatcaagcttgctagctagtaaagatcctgacattggatcagtggaacagagtggcaaattctattgggtctacactcgagaataatccagacatagaggtcatgagaaagattctatctatcagttatttgatctaccacattatctgaaaacttgtcttctttatataagtatcttcccagaagattacatcataaatagaaagagtttgatagttagatggattaatgaaggatttgttcaagaagaatatgggaaaaatgcacatgatataggtgaaagttactttaatgagcttatcaatagaagactggtccaaccatggtttatcgatcatgacagtgggagtgtggtgacttgtcgagttcatgacatgattcttgatttaatcataacaaagtctgtagaggagaactttgttactttgttagactctcgagaacttacatcaagtccacagaacaagatacgaagattatctatccaatgtggtgacggagaaccaccagctttggtgctagaagagtcaacatcgctatctcatgtcagatcagtgactatctttgggcatgggaagcaactgccatctctttcaaacatgaaggctcttcgcgtgcttgacctagaaggttgtaagggattagaaaaccaccacctggaaaatatagagaggctaatccacctgaaatacttgaaccttagagaaacagaaatcacagagctcccaaagcaagtggtaaaactccagtacttggatacattggatataagaaacactggggtgagtgagttacctccggctattattcaacttcggcaattggctaggctgttcattgatcttgacaccagattaccatatgaaattggtaaaatgcaaaatttggaagagctgacacatgtcaatacgtgtatgtaccatatgaacttcctgaaaaagctggctcagctaagtaaacttagagagttggagataagttgggatcattacggaacacgagttgataaagtttcttatgcgggtattttgatacattcacttcacatactggccacacataaccttcggtctctcactgttcacatcatggacgaacagagcttccctcttcatacctggcatcctgctccttctgcacttcgaagactccacttcgacatgaacaacaacgaacaatttccaaagttccaacctgggtgggatcacttgtcaatctccaagaactaagcttccgcattacaaaaatgacacaagatgaccttgatgtacttggagatataccggctcttcgctctcttgccttccacatggaaatctgcaccaaaactacaccctgggaagatcctagacccgaggattggcttaggatcagaaaagggtttcaaagtttgaactccttccgcttcgaatgtggcccttgggagtggatgtgtctcatatttgaagctggatcgatgccaaagctcgaaatacttgaccttgaggttccatctgttgagaattacttgattcaaaaacttggttttgatcttggcatcaataacctctcctgcatctccacagttactcttagatttagtaatcggggatgcagccaagaaaatgaagttgccatcaggaaatcagtcagcatacatcgcaatagacctgcactggaaataataagaaaaaaggctcgaagttgaagaggcaaaaggaaaatctggatgggctgatagtaaacctgaaactctggtgaacttcgagttgggacttgtgagcatcagataaagggtgtttcgtac

SEQ ID NO: 38614 - DNA, 760 bp, Zea Mays
accctttctttattctcttcactcaaaagcggctaggcgacggggcttgccctttccccgccccaagggtacacggtcgccgccacctgccctaggccgcaggagggagcgttcgccgccccgccctccgtctcccgtcgcctcgccccgcgctccgtctgccgcccctctccggagaaatgtctgagcatctctttgaggacaccttcgtcgtcactagactcgaccctgatggcaaaaagtttgatagagctagatgttgccacagatgtttatcctatgcatgctggcgagaaatttaacatggttatagcgcctactctgaatttggatggcaccccagatactggctactatactcaggctggcagaaaaactctggcagacaattatgagtacgtcatgcaagggaagctttacaaaatctcagaagacacatcatccagccaaaacgctaaagtggagatgtatgcatcgttcggcgggcttcttatgctgctcaggggtgacccttccactgccgctagctttgagcttgatcagaggctctttctgctcatccgcaaggtgtaaaactgtggttgctgaccacttaggtgtttgccttgctcgccacttatttaatttccatccgtgggtgaagctgttatatactgttgtaagtactgttttctgtatcgccatggatttatggtaacgagttcatgtttcttgctaaaaagattgctccagcagattcccctatcttatttgtagaaac

SEQ ID NO: 38615 - DNA, 1557 bp, Zea Mays
acggatgatctggtcctgcacgtcaatacagacgatatgtttcccccaaatctaaggcgtcgccagccctggcaaagcgcttgccgctgctcccctcttccgtttccagcgccgccgccctccttccggttcctgttctccagcaccgccgttgaacctcctcccctctccctcgtgcttccctctctcatcctctctgccgcttccccgctctccccaaactactctgtgccccgtcagatcgacctggactttggcggcagctacttctagaacgcggcggcacggcagcaagccagcaaggagaacgcggcggcacgggcgtgctgctacttctgcttcctctccgacgcttgctgcaagcttgctccagccgccaaactaaactgccagacgcacagccgcggagccgccagagacagacgctgccgccgtcggccgtcctccgccctccagttgagcggttcaagcagagctgatggctacatcagagccagtacaagagagtttggtggtgcactactcacaacctagtaggccccgggtcctccttgctgcttcaggaagtgtagccgctataaaatttgagagcctttgccgtagcttctctgagtgggcggatgtccgagctgtggccaccacgccatccttgcacttcgttgatagatcatctctaccaagtggcatcgttctttacactgatgacgatgaatggtctacctggaagaagataggagatgaagtcttacacatcgagctgcggaaatgggcagacgttatggtgatcgctccattgtcagcaaataccctggctaagatcgccggtgggttatgcgacaacctcttgacctgcatcgtgagagcgtgggactacagcaaaccgctctttgttgccccagccatgaacacgttaatgtggaacaacccattcacggagcggcatcttcacacaatcaaccaactgggcatagccttgatccccccagttaccaaaaggctggcctgtggcgattacgggaacggcgcaatggccgaaacctcgcagatccatacttccgtgaggctcgcgtgcaagacgcaaccgcacgatgcgagcagttcactcgcgggtcctgtcagtaataaccggccatctagctgatgcagcagttggccacttgattgtcaagcttaggaatttgttttatatgcagtgtgcatctggagtgttgtaacagattttttttccaactagtgtttgtgtgtattgaaattgggggggaaaggctgttgtcacaggataacaataacttcctccctgctcagtaattatgagtctattcagtttgtaattgtcggtgggagtacaattatgctacaatattgtttgtttgtgtgtgtgtgggagttggggagtgctgctgccacagagatagcttcctccctgcccagccagtaatgatagtgattattcagtttgtagttgtcagtggaagtgtccagcaaacttttctactaccctttgatattcctggtacaaatgttggaacgactgtcctaaccatttgagtgatttgc

SEQ ID NO: 38616 - DNA, 1399 bp, Zea Mays
gtcgaaggggcctccctgtcgtatatttttacagcccgtgttgggctgccaaatgtcttcattcgtcctgagggtcatgcatgtcgaagacttgaggcccatctaaactgtttaaaacccctctgaagcgtcaattgtccgagagcccattccttcttcgaccatctctgatctcctctcccggcgggaaaagaaaaaacaaacctcccttctgagctgagcctctccagaagctccagaagagccttccacggagccgatggctgcagcggcgtcaggcggcgacaccccgaagcagctcctctccatcatccgcgacttcgcctacgagaaatcgcacggcgagcgcagggtgtccgacctcaggcggcgcctcgctgatgcgcgcgccgcggcagacgtggccgcggcggagctcgacgccgcgaagcgcgcgcgggaggctgcggagcaggagtttcgcgggagccaagtgcaagacgcgatcgccgccgactccatccttgcgctagaggcgacgatctcgtgtctccatgaggagatctcgaaggccagcactgatctggacgcgctcaaaagcaaggaagacagtgagagagaagacttcattagcaagatgtatgagatgaacgcaaagataaggcaatttcaacagatggtatctctagaattagcagagtacaatcattgtgagctgccatctacagatggtgaacatgtcaaagacaagagtaaaaccgtggactcggaaggcatttcggaagagttgtcagataaggtgagcaacattgaagctgaggtgcagctcttggaagaagagtataaaaaggatctgctttatcatgataaggtccgtcaggagctggccgaagtccaagcaaagagagctcttatggaggctgttatggaagagacaaagcagttgcaggagctcggcgaatatcctgaacatacagagctctgaactggagaaggtgcacgcttcacttgcagtggagctgcagcgtcggtacgtatgccccggctgcggagtcaataacatgcctgggctggaggaggccgcgaactagaggaggcgtcagatgatgtgcagtgcatacacaatttggtcagatgtttgacgtggggcggataggtgaacttgttaatgaggcatttgatcatactcctagtcagtagaagccttagacgagcttgtcatacacatcggcgagatgtgggttcctgtctggagttgagctataaaaagtttgaggaattactggtcctgtctgaacctatatttcctattcatataatggttgctatcttaggctatttccagtgagtgcacagtgtcaaatacatttaggctctgtttgtttggtttgagaaatgagttagtcaatcatcttatcac

SEQ ID NO: 38617 - DNA, 2791 bp, Zea Mays
gatatggcgggcgcggcaccccgtttccatccttgttcgcttgtcacttattagatcaggggcgggaagaacatgacaaatcggaaggttcacgcgtgaccgcgagcgtgccacgcaagggcgagggagcccgcgaggcggaatgcgcctcgagatctcctctgcgcggctcgcgggtcagaccatcagaagcagaaagtcgcattagtaaattcaatcatcgtccccgcctgcaaaagatctgccgtggcctcctcgtttacctattgctggttctcaaatcgcacgccctcactgctagtgctaggctccccttcgcgcgcgcgcgcagttattacccgtccacggccgcgtgttcgcaagtatccagatccggctccccacctccggcgaccaccgcgcagagaacaattccgtccaacgggaaaccccgcgataaatcgccgcgcccatcgtttggcgtcccccacagcaccgaattcaccagggctggaggaagtgtctgaaagactcagcaacgcttcatgtgactgattggttggctgcgccggctctctagcaccgagttcagggagcaccgacttgttcgttcgtcttgaggctctggagctctgtcacgttgtggtagttgagagggatctgtccaatttgcatagctgcgaaggaagattcctgaggtacgctgtacttgttttcttatcagaaactagcacacgccattattgtgacctcgtctaacttgtcctccttgacttggacaagtgcttatgtggtacaatacctcccgttgatatttctaacacgtcctgtcatcctagcaacctaacatggttgcgacgtgccccaagcttgtttgacttccctgcctgtcatggacaaaacgcattatgccccacgagattagttcatagggctagctgctaggtggttattgcatactggtctccactctttctcttgccacctcgggcatcctcagccgccctaaaaaggatacatgcttcatacctagatcatttggtgttcagttttgtttttaagccatggcgaattcccggactggacgttacaagatgtctaatctctcacacacctcaaaggaagatacttcacctgagggttcaggtactaccgagagaactggagcctggagtaacatgttgaacactcttatgcagcaagcctcaatctatggtgtggctgctgggtattgtttatcagcgtcgctgctctcgatcatcaacaaatgggcaatcatgaaatttccatatcctggagccctgacagctctgcagtatttcactagtgttgctggagttctcctatgcggacagctcaagctcattgagcatgacggccttaatttgaggacaatgtggaagttcttacctgctgctgtgatgttctatatctccatcttcacaaacagtgaactcctgcttcacgccaacgtggatactttcattgtgttccgctctgctgtgcctatatttgtcgcgataggagagacgttgtatctccatcagccatggccatcactcaagacatggctttcactctccacaatacttggtggaagtgtgatctatgttttcacagacaaccaattcactgtgactgcttacacctgggcagtggcctacctagcaagcatgtccattgatttcgtgtacatcaagcatgttgtaatgaccattgggctgaacacatggggccttgtgctatacaacaaccttgaggctttgatgctattcccactcgagcttctagtaatgggagaatttgatcagatgaaggtcgacagctccaaagtgtcaaactggctttcatttgatgtggtcctccctgttgctctctcatgcctgtttggactatcaatatccttcttcggattctcctgcagacgagctatttctgctactgggttcacagtgcttggcatagtgaacaagctcctaactgttgtgattaatttgcttatctgggacaagcatgcctcttttgtgggtaccattgggctcttgatatgcatgtcaggtggtgtgctctatcagcaatccaccacgaaaccgaaggcacccaaggttgagccgaaggaagagaacgacgaggagcagcagaaattgctgcagatgcagggagttcaagagagttcataaaccttacaaagaaagtacaactacaaagaagcatatggctagtactcggaaagaggacagcctcacctgagcgtttttgtattgactagtacttgggaagaagcatatggatgaatgtagtcatgaactaggagctacaaaatcccatgttttagatattagaagtcatggaggggacctaattatcactgtgcaattctttattactatactaccacttccatttgtaacgcaaaattgttatgataggatggcaaatatacctgcattgaatacttcctatacgaaagcatctatctcatacagttcggtgacggtgatactatgatctatgtttagtcatttctctgctggagtttccctatttgttctgtaccttattgttggtgatgaagccattggttcttttgctgaaaagaaagttttgtaatcatcgatgttggtgcataagggcagctccattgtgctttctaagccggtgcaaagagcacagtttttttatttgtttgggctgcaaggagtttacacattggagaccttttatgtttctaacaaagcacacgttgacgtgacaattttgtagtaccttgttatgagaaaatcctgtaactctgcaattttgtaccttgtca

SEQ ID NO: 38618 - DNA, 6564 bp, Zea Mays
ccccaccttcttcctcacttgccattcttcgctgacctctaaacctaaccgcccatgggcaaaggggcccctcctgccgttgccacagccacctccgtccctgaggcgccggtcttccaccccacagacgaggagttcgccgaccccctcgcctacgtcgcccgtatccgccccctcgccgagccctacggcatctgccgcatcgtcccgccgtcctcatggtccccgccttacgccctcgacttcaaggctctctccttccccaccaagaggcagcccatccaccgcctcctcgcccgccccgcccccgctgaccccgacaccttcctcctcgactatcgccgtttcctcggggcttcctccgcacatcgccgtggccgcaggaagggccttcccaagtcgccctctctctcggatggtcgcccgctcgacctctgccgcctgttccatgctgtcaagcgcttcggcggttactacggtgcctgtgaggggaagcgctggggcgacgtcgtccgcctcgttgatgataaggcgccaatgcacatatcagagtgcgccaagcacgtgcttgcgcagctatattacgagcatctctatggctatgagaagttcgccaacccacagcatgggaacaagggaaggaagcagccacggcccggatctgatgatcgaccatcggtttctcgttcacaggacgaagagagcaacatatctgttactggggagatggttgaggaggttacaggccggaaaaggagaaatttctcacgcaaggaattaggcagagggacatctcatggtcgttatggccgtgttgttaacatcactggaaataatgtggcatctgctgttgcccagaagcggacgaggaggaactctgatgctgtggttaccacagtcgatgaggtgtctgctggtgtccggaagcggaaaaggagaaagtctgatgccgcgtctaccgtgtttaatgatgaagtggatcaagtttgtgagcagtgtagtagtgggttacatggggatgtcatgctcctatgcgatcgctgtgataaaggctggcatttgtactgtttgtcgccgccgctcgagcgagtgcctccagggaattggtattgctcagattgcctcaactccgatagagattgttttgggtttatccaaaggaggaagtcctgcttgcttgagactttccggcggtttgacgacagggtgagaaagagatggtttgggcagaggaatcccagccgtattcaaattgagaagcagttctgggagattgtggaggggaaggcaggggaacttgaggttatgtatgggagtgacttggacacttcaatttatgggagcgggtttcctcgtcttggtgatacagtgccatcatctatggacctagagacgtggcagaaatactgttcaagcccgtggaatttgaacaattttccgaatctgcctggctcagttcttaggacagtcaaggataaaattcctggtgtcatggtcccatggctctacatagggatgctgttttcgtcattttgttggcatgttgaggaccattgtttctattcaataaattatttgcattggggtgagccaaaatgttgggtatggggtgcctggagcaaaagcaaatgcctttgagcaggttatgcgccaggccttacctgatctgtttgatgcacaaccggatctgctttttcaccttgtcacaatgctgaatccatctattttacaagcaaatagcgttccagtatatagcgtgatgcaggaacctggaaacttcatcatcaccttccccaggtcattccatggtggcttcaatttaggtttgaactgtgccgaggctgtaaattttgcccctgctgattggttacctcatggtggaattggggctaatctatatcgtttataccgcaaagcgcctgtcttgtcacatgaggagcttctgtatgtggttgcaaagaatggtgtggatgctgagtcacttacccatttgaagggagaaataaaaaggctttttataaatgagagaagacgtcgagtagagctttggattaatgggactgtcaaatctagcctaatgttgccaaggattaatccaaactttatcggaagtgaagaggatcctacatgcattatttgtcgacagtatctgtatctttcagcagtctcctgtaactgtaggctgtcttcttatgtttgccttgagcactggaagcacctttgtgaatgcagtccgaagaagcattgcttactttatcgacacacccttgcagagttgggggatttagtgtgcgaggtctctttggttagcccccaaagggacaatgttatgcagaatccacacttgctcaatgatgtttatgtgccgtctaaaaaggtcaaagatcactatatattatatagacagcttgcagaagattgggtttcaaactctgaacatattctccagatgccatttgtggaaaggtcttatgccactgctttggaagaagctgaacaatttctttggggtgatcatgccatggattctgtccggaacataacagtaagactaacaaaggctatgaagtgggccttgggtgttagaaaatgtctctccaaaattcaggactttctgaaagatggctgctctgaaaaagtaaattatgtggaaatagaagaactagttgctacgaaatgtgccccgtgctgtgagcctagtcttacaaaattgcaggcgtatgcagaggaagcgaaattgctgattaatgaagtaaacaatgcactatcatctttcttaacagtagacaaattggaaacattatactcaagggtttcagaattcccagttaagctaacagaatcatcgactttgttttgggagttatcttctgcaaagtcctggttgaagaaagcaagtgattgccttgaacagaataaactgggcattatcgacatagatgtcctcaataaactaaaatcagagataatacaacttcgagttctacttccagagattgatcttatctcaaagctgtggaaagatgtggaatcatggcaaacccgttgtcaattatatctccaagacttccctgatctaaaggagctggagggttttctccttgctgcggatggtgccaactttagcattccagagctgaacattcttaagcaacattactcaaattgttgctcttgggtgagtcgtgctaagaacatactcagaaaactttatgctacgagtgactatcacaatgctgttgaggagttgacaggcattctgaaggaagcagaattactaggagtaaaagttgatgaattgcctattgtggagaaagaactaaagaggtccttatgtaggaagcaagcatctgaggcacttgcaacagtaatgccaatggaggtggttgaagaaattttaaaagaagcttcgatactacatattgaagaggagcaaccatttgatgatctgtctcggatgctcaaagaggccacttcctgggaagagaaggctagacttattcttgaacgatcagcttctctctctgagtttgaagaccatatgaggtgttcagagggaataagagttatccttccgtctaaactgcatatgaaagcagaggttgatattgctaaattgtggatagacaaatgtcaggcctatttgagaccaggctgcaataaacttgcatttggagactttcttaaagttgatgatatcaaggatttaatcaatcagcctgcaaatttgaaagtcattcttgacacttcagaacttaattctgttctcaacaatattgaaaaatgggaacacagttcactaagtctactcaataattttagagccttacttcatttgaatagtattggctctacagttgacacacttcaaagaaaattggaggagctgcaaggtaaaatgaacacagaaatagaagttggattatctcttggttttgagttcaaggttctttgggaactgaaggattcttcgttgatgctaagatggatattgaatgcactgtctctgtgctgtatgattcctttattgcaggatgttgatagattaattgaagaagcagtccaccttcctgcttccttagcagattgttctttggttacattgttgatgagggcattgtcttgtctaagaaaatcacttattttgcttcctggttctggaacatctgcaaaatccaaattggaagatgttgaaaatattctagcagaattcaaggaggttgatgttccttatcctatcatgactgccaagctggaggatgctgtaaacaatcataattcatggatagagcaatgcaataccttcttcatgctgtctgatggccagtcgtgggctatgctgcaaaatctcagggacaatgggcagtctgttgcatttgattgccctgagatggataaagttgttgatgaggttaaaaacgttgaagagtggctcaatcagtgccactgtactctacttctagatggaaataatagttctttgctctccatacttgtaaagataagaggattattggatgatgtttgcacgttatatgctgaggattgtatgaagttaagattatgtgctgtatgctcatgtgacatcggagataggctggcatctagatgtgtgacttgtcaagactggtaccatggctcctgcgtggaaaacctgtctgctactacacaaacgacaattgaatggatgtgttcattttgttcacttttacagagtgaggaccaattgaagaaccaactatctgtaaagatgtctaaaggaaactgccctgcacttgccgcacttgatgaactcatctcttctgcaaagggtttatacactgggattgaggaaattaatttgctaaaagaaattgttgataaggctcgtaacttgaatgcctacttgatgcaaattctggatgattcagactgttatcatggagaagatcttactgtcatattcaaatctcttttagttgctctcaaggcgacatcagcttctggcttgtatgatgacaatgtcagttgcagaattgagtctgttttgagcagatatttgtggaagaaacaaatacataaactattgtatggtggtaaaaagtcatcgattcaagaagtactgtgccttgatgaagaggtaataccgtttttattttgtgtaaagactagagttgtttttaaggtcatctctaggtgttcagtaatgggtaaagttgtggtgagatgtggaagtttccctatacaccatattaggccattcgccaatgagagtgatacctcataccactgtggggggctaaattcagagaaaacaaacagagaaaattccttatttgacactcaaaaaacttgctcttcccaatttagcactttaaaactgctactcccctgcatctcttcaatcatccatcttgctcaaaaactgctacaatgtccgcggccgtttcgaggagacgtgccaagaacccatgccaagattttccctacgttgaaacagaagagtggctggcgtgggcccatgttcgcatggacctattatcaatgattctcagaggcgtatcatcaagaacctgggttactccactgatgcagcaaggattgaccaaagagcacaagacatacagtgagctgttcaagacgactatcaatgatgttcatctttctgctctagcggcgatttttggctggaggacagataaaatggatgatccttgtgcctctggtgcattgggttcacatttagagatatgtgatcaagatttcttcaagttggagattagtaaaataaaggaaaccagcctgcagtggctggctaaagcagaggaggttgcatgtgattctggtgagcttgcactggatcttgtgtatggacttatagctgaaggggaaaatctctctgtagactttgagaaggaactaaagttactgagggatcgcagtgtcctctactgcatctgctgtaagcccgacgataacagggccatgattgcatgcgaccagtgtgatgagtggtaccattttgattgcatcaacctgcttggaccccctccagaaagcttcttctgccctgcttgccatccaaacaatggtgaagaatctgtatcacttgcacgctcagaggatgatgaggatagatcaagcactggagccggagctcacacgccgccggacagagtggtggagcgagacttaataaagcttcttagctgccatagcggtagctcatggagcgagagcagaagggctcctcatcgaacagctagaaggcgtagtagtttcgtcggattgttatgatgtgcaggaaccttcttagcaccgtgaattgattctttttagttaggttagaagcaggaacgatccatcatctgctgttgtaatttgtagctgttgacaggaggtagatgtagcaaggcagagctgtaagaacccattattattgatcttgtagcagtctgaggttttggaaattgtatcatatactaccgccgttcttgaatatttgtcgcctattgtttcaaaaaacgacaaataaaaaaattaaaaaagaatggagagtatttttatgctgctgctatgcacggc

SEQ ID NO: 38619 - DNA, 2157 bp, Zea Mays
ccgacccattgctatcctacctgccagcgaacctgtctcgtctccttgttgcccacgtggcctcgccgtcgccgcgagctccaccttcctcagctctgccccgagcgcgatgtggcgagcgacgaggcggtctccgccgttcctgcgatggctatcgtcggacgcagcctcctctaaggcgccgcggcagcgcgtagcggcgctgtgggggaacggtgactacgggcggctggggctgggctcgctggagtcgcggtggagccccacggtttgccccttcttcctcgcccgcgccgccgacccgcccgcctccctcgcctgcggcggcgcacataccctctttctcacccagaatgggcgagtgttcgctacagggctgaacgactttgggcagctggggataggaacctctgttacacatatgctggagcctgttgaaatttctggatttcacgaaagagttgtagaagtttcagctggcaaccatcattcttgtgcagtcaccggtaatagaaaataattagattctcttaagtgcccggttttattcactataatatggtgaattcgttaaatgataagagcagccggaagggaaggtgccatcttcatcttctatgttactgtatatttttaatggagcagcagatacttcatgcttctcgggtgtagaagttagtgattgtgattccttgcttcttgtttgtgtgggcctaaatacacaacacaagtatgggttgaggaaacattttttttgcctttctggttggttgaatattgatctagtgttgaatgttcatttcaagcaaatttccctttatcgcatgggaaactacatgtgtatggtgttgtaatatgttaattataatattttttattatggccccaattactctactagatattgacaatgggtttgataaaccaaaatacatattgggtaggttgcacgttcaaacaaaaagggccatatggaattatggatttgtgcactctccctaggcctatgtgcgatcacaacttaattgaaatatgttattgctcatttgctaattgagatgtcatatgctctgtaaaatgtattaattttgtaaggttattgtcactgaatgctgcactgcagcatacagcacattacaccataataatgttttactggtatctggataagtataacagaaaagaagtgtgataaccatctcttctatttatttataaaattgatttgtgctgcacatatgtgcattataacaattgtattatcaattgttagagtggacgcactaaccaatcaaacacaaaagcttaagctgttaggaaaaagtaggcaatctacttatacacttcaatactctcactcacgtgcaaccagagagaaaggtgcaaacatgtaaataaaggggcagagacacaaataaagcctctaccaggatttgaactcaagacctctggctttgatactatgttagagtgagatgcactaaccagttcaacccaaagctcaccatatcaaagtggacacactaatcagtcaaacccaatagcttaagctgttagaagaaggtaggcaatccacttatatatttcaacaccaatctccactaaatttttgtatttttactttcttgaacagcggatggtaagctctttgtttggggcagaaactcaggtggccagcttggccttggtaaaggggcaggtaaagtagtttctaccccaacaaaggttgattgtttgactgacctcagagtaaaaacggttgctctgggatcagagcattcaattgctgttacagaggaaggtgaagtcttgagttggggagctgctggttctggtaggctcggacatggccgtcaatctagcatcctgggattttctctgacctcaactgaatatactccaagattgatcaaaaactttgatggtatcaagattaaaaagatagctgcaggaatgttgcactcagcttgcattgatgaaaaagggatttggaagaccgaacgaagaattcagaccaaatattgttgaagagataccattttcagaagaagttgcttgtggaggttaccatacttgtgttgtaacagatagcggtgatctgtattcttggggttcaaatgaaaatggctgccttggtctgggttgtattctgatatg

SEQ ID NO: 38620 - DNA, 1297 bp, Zea Mays
aaccgcagaggccaacagcacaacgagcgcaccactccccaagaaatggagctgacccaactcctcctcctcaccggcaccgcctcccgagctcctgctccgcgcgcgtagccgcgccgcagttcccagtaataacacgcccgcaagctccgcagtccgctccctgcgcgagggtgttgtttgagccatgaagatggcgacgatgactgcttacaagtatcaagctcaggcgttgatgagggactacttgctagctgatctactcgttccgtacacctctgtgctctttggcattgtcctctgcaaggcttatgatttcactcgaatactgagctccttttatttcaaggggtatactttattgacaaaaatacagcgcatcgaatggaacaataggggtatgtccagcgcacatgcaatttttatcacggctgtatcattatatattgtcacgtcgactgatcttttctccgattgtgtcaaggggcctattacattccgtaattcgataatatccacttctgcattgggggtttctgttggctacttcatcactgatcttgaaatgatcttctggctgtatccttcccttggtggaatggaatatgtcctccaccatactctttctctggttgcaatagcttacacaatgttgtctggggaagggcagttttacacatacatggttctcatttcagagacaaccacccctgaaatcaacttgcgatggtttcttgacactgctggactgaagaaatcaagtgcttacttggttaatggaattctgatgtttgttgcatggctggtggcaaggatatttttgttcatgtatgtattttaccacatttatttgcattacagtcagataatgcagatgcatgcctttgggtactacctgacgtttgttgtgccatcggtgctctttgtaatgaacacaatgtggttcatgaagatcttaaaaggcgtgatgaaaacactggcaaaatggtcatgatggatgatgccaagaggatcccagaactatcaacaggatttggtctttctggcatcattgatctgtaaagttatggatatcagggtaactagagaaagttaatatgtaaagtattagcaaacaagctagattaggtgaaattgccctattttcagcagtgctggaagttcataaccagtttggtttgtaccggagatccagcacgctgttctgcttacccccaatgccatgtgtatatctggagcattttgcttaccccaatgccatgtgtatatttggagcattttaatggatggtttgttc

SEQ ID NO: 38621 - DNA, 508 bp, Zea Mays
cggcggcccgcgtctgcggcaaggaggctgggcgccgagtagggagctggagggagatggagcgctggaagctcggaccaagtcgctgggagtcgaccatggagcatggggagctgcgcgcagaggcgaactcggcacggcgagggacgacggaacactgcgcgtgcgtccagggagagagggaagcacgagagcgagctgaggaagagagagagagagagagcgccatggggaaggagcagagcgcgtgcacggaggaggaagaagacctagcggccgacacgcatccgggcgagaagaaaccagggctgcggcgcgggagctggaggcgctcggcaggaagcgcggctgcgcgcagggagagccgcgacgctcagccgtgggagcagtggagcgcacaggggcgagcactagagaaggagcgagcggccgagctggggactgggcagaggaactcgagcaggcaggggagagagcatgcgccaccacgggtgagctggaggccgag

SEQ ID NO: 38622 - DNA, 3085 bp, Zea Mays
cgttacacacagttcctttcaggcttcacccgttttgctctcgagtctctcccggttcggatccaaattcagcaatccgacctgagaccaagaccgcgcaccacgcggctcgccgccgatggcgaacgccgacgccgacgaagcgccgctgctctctgtggaacacctccgtccaggatcctgcagccgcgagctcgagctgcgggagttccgcgaccgctacgtgatccgttcgctcgacggcgccgccgctttcgccgtccttcgctccggcggctccatccgccctctctccccagaggaagccgtagctgagagcgactgcaaggtttccagaatatacggcgtggtcggcaccataagattgctcgctggagagctgcatttcattccattaagaagaaaaacagagataatacaaaacagccacctcgcgggggccaagtacaagcatattgatactcatccatgaataaaacacccaaaggaagctatgtactcgttatcacttctcagaaagatgctggctcttatctgggctcccctgtgtaccaagtgaactcaatgaaattcttatgctgcaacgaggctatcaagcacttgactccacaggaaagaagggatgaggcatacttcatgtctctcctgagaattgcagaaactacttgtggattgtattattcatatgacagggatttgacactaaagtaagtgctttgtcatgcatgtatctgaataaggcaaccaaaagacattggcttaatattcagaaaaggccaacaacctttgtgtagtgattatgcacatccttaagatatttttttttctcaaacaacacatgagaactgtgtgcatttcattaagtagagaaaaaaaaccaaaggagaagcagtgtgtggcgctgttagccttgtactaggtggcctagggaagttggcctcctggaaaaaagccgaaacagtcagagcaccctgaatgtcctggatccagagattctgatctaaatcctcctgtaccgttcatctcctcgtcgacatttgtaactaatcgattgcctgttagttccattgttccttgcagatgtgtagtaggttcttgaagtatggatctattgagcacttcttaagaggttctagttgtatgactgttatcatgtactgaatgcctctgtggtgcatttatttttcttttgttatactggattgtatctaactgatgagatagaaataatgcgatgatggaatgctcctcaatgtaaagctataaacactatgattatgtagcttgcagagggcatccaagttggctgctgggagggtacataaaccactatggaagcaggctgatccacgttttgtttggaacaaaaatttgttagaggaacttattgaagctaagcttgatgagttcatcatcccactgatacaaggaagttttcagtcagcacaatttaccttgaaggatagaccagtgaggataacattgttctcaaggagatgcaacaggcgtttaggaacaagaatgtggagaaggggtgcgaatcttgaaggcgccacagcaaattttgtagaaacagaacagttggttgagtatgaagatctcacatcctcatttatacagcttcgaggttcaattccacttctctgggagcaaatagtggatttaagctacaaaccacggcttagcattattgaacatgaagaaactcataaggttgttcaacgccactttcatgatctttcacaacgatatggcaagataattgttgctgacttgactgataaacgaggtgatgaaggagatttgagcaatgcatttgctgctgaaatggacagaattcctggtgtcaggtatatacattttgatttccatcatgtttgtcgtggaggtaactttgacaatttgcaagctctctacaatcaaattgaggaagctattcataagcaaggatattttcttatgaacactaaaggagagattttgctggagcaaagtggtgtagttaggtccaattgcattgattgcctggaccgtacaaatgtgacacagagtttccttgcaagaaaatcattggattctcaattgcagctgatgggagcattattgtcatctgaaagcatttctctctctgataacattcatgatacattcaaaaaattatgggttgagcacggtgatgagctgagcctggagtatgctggctcttatgctttgaaaggggatctagtgagatatggaaggcagacattgcctggactaattaaagatggaatgagtgctctttcaagatattatttgaataattttcatgacggagtgcggcaagatgctcttgaccttattagcggttattatacagtcagccaaggcagctcttctccttttcataatggtgttgattcttcttcgtatctgccggtggcttcagcaatcatagttggtgggattaccgcgacaactttcactctcagtcaagttggacggaacgcgcagcacttgatctcctccattatctgtgcgggcttaacagtcggagtagtagccttggtgaaagccaatgggaaacagttttgctctaggccccgtctgtgtggtctaatctaatccttggtcttttccccccttccctttcatattgccctttgttagaaattgaatgtaaaaggattagaatgttgttttattcgttgcaagagtaaggttaaataaggaggcaggatggcctgccggtcccgtaatctgaagctgctaatttgtaagcctatagtttggatttgcacattctatttgttatactttttatgtatccatgaatagaaaattacgcctcgaaattccaaatttgtaataaatccgagagaccacatatttttttagtgtgactggttggtagcgacggtcttggcgtcttgcatagttgctgacacagaaaagacacctccgtccctctgtctggtacagtgagggtggggcatcaaaaacacaaagatgctgttcttatcaggcacagatgtttgccaagtataattccacgttgcgctatacagtcgggtttgctcgtatgcatttatgatctagatactta

SEQ ID NO: 38623 - DNA, 2732 bp, Zea Mays
ctttcttctccctcgttcccgagtccgaatctgggtccagcggagacaaagaggagctggccgcgtcgtatcgactcctgccgccgaaaggccgagcccgagcccgtgtcccggtgcccgttcccgcaaccctaatcccctaccaccgtcggctctcgccggcgaagaagagggagccgcgcggcgtcgccagggagcacgcgccccctcccttcccggctccctccgcgccgtggggaggcgcgtccacccggatccgccctcaccgcgaggcagaggggaggagagggagccaggtccggcgcacccgctgtcgtccgcgccgaagagcgttaagagtctccccacaggcttggctgagggaaacttgtgctctgcgcatcttggacactacttcaccatttaccaagtcttgagttattgctccggtgccagacaaaaaaccaaactctctggccgaacacagtgatggcgcaagcctgtaagaagaggagaggagtttatataagcagtgaatcaggagactctgatacagattctgatgttgagggaagcaaacactctcaaaagtctggggtgacatcaatttctacatgcgagcaccagtcatcttataacctcaaggctgcaagtatgaaaagtagcaggatgataaggctgtgtggaaatatcgtaaggaagctcatcgatcacaaatgtggctggcttttcaaagaacctgttgatccagatctatatgggattccagactactttgatgttatccgcagtccaatggatttgggcactattaagaataaactcacaaaaaagaaatatgtaagcattgaggagtttgcagcagatgtgaggctaacattttcaaatgctatgaagtataatcctccaggcaatgatgtgcatatttttgctaaagaattgaatgaaatgtttgattcagaatgggaatcagtagaaaggaaatttagaggccgaaaccttggtcaagaccagcagacaatgaaggccataaaagttcgagctatgatggattcaaagtctacagttgctagagggccggttgcatgctcaaaccctaaaactttggttgctagaggtccagtagcttgctcaaattcgattgcaaagaagacactgacagatgcattatcctccaaagtaaaaatcaaattttccgtgcgcagctctgcgcatacctcttccaaagatatactcgttcaagcagctggtagcaaagaggggtccttaaatcactctgtccctactggcaacaaagaggcatcttcaaattgtactattcctatcgctaaggaggctaaaatatcaagggcacgagaaattgagcgctgctctggttcaattggaaaacaatcatggtcttgcaatgacacttctacttcacctctcgcttcctctgtgcaaggggaagaatatagaccctgtgaaattgcaattggaaaaggagaggctggaaaagaggcagcaagaagagaaagcaaggatcgaggcccaggtgaaggctgctgaagcagctgcacaacaaaagtttgaggaagaaatgaggatgaagagaaagcaggaaagggaggcagcacgcctggcactacgcatgatgaagaagactgttgatattgacaacagtgacttcctaaaggagctggagaacttcagcaaaacatggcaggcaaatccacctggcaaattaatcgtggattttatcagtggggacttgccaccggggttagggagtccgctggagaggctcggcctcttcatgaaggaagatttcgaggatgaggtagaacaggaaatggaggacagagtgtcaccctcaatggatgttgacatcaggaaagatttccaggaagacttaggacatgaaatgcaggacagtgcatcacccgtgactgtcattggcacaaagaatgacgtacagggagtggcaggacatgaaatggaggacagcggatcaccagccacagtcattgacacgaagaaagaagagacagaacatgagatggtggacagcgtatcacctttgatggatgttgacacggaggaaggggagatcagctgctgacggtagctacacctctcttcacccgcataatttattgaggcagacatccttgcttggttgttagattaggcaatttcataagcagagtgatgcagaaacattagttttatctgctttcatcgtagaaccatgtggtgtggagaacatgtctcagacgaaatgacgagtggttttggatttgctgcggattttaattttcgtggtcttgtcagtctggcaagagtatgatgactctgtatgttgaatttgacctcccccgctggatgacatgtataaaaggatgagaaaaaaaggatagtttggagctagtgtatgttgttggagtttatggtggagccagatttggtgagcgtgtcgtggacgtaaatgtaggtatagctatatacttgaaatattgataagagtgtttggttcaaaggatcaattcattccagttaaacatcatgagcttgttaatgggtgtttggttcgagagttcgttaatgggtgtttggtttgaagaataagctagtctactatttttttatttggttgttgaatgtaattttttgacctgtcatctcatttcttacaagtgaatgattatttctaagtctatgagaaataagcttatggttagtattagtgttgcatctcaggaagtatataccca

SEQ ID NO: 38624 - DNA, 3496 bp, Zea Mays
gtaactccaaaacctccctgccttctctccttccatcaccgcaactccaaagcctcttatcgtcttcttccatcgccgaacgacgactgggcccgctgtcgctgccgccgccgccctacttcgccaccttcgccggcgacgggcaccaccagtgtggactgtaatgtttgatgatgatgatgatggagtggacccacaaattgaggatgtcaacagatactactttgaggatggtgaagagaaaccagtttgtttcagtatcttgcctttccagtttggtgaggacgatagcgaggcagttttcctcagaaaggatgttttcttgtgtggatttgtggataaaaatcttcctgtgtacaaggaggtggtagcttggaagataaggcttgacagtgagcatcccaacatctatgtgctttctattgagcacaagtggataaagctgttgaaaccacgaaaatgctatggagacattgttcgatcaacattgattacggtgcaaatgctccacttttttgggagaggggagcaaagaagttcgaatcacctttgggatcaccttgatgaagtttttggtaaatacaatcctaaacccgtggaggatgacttgatgaagcaccataccctaatcaagttgtttgtagagaaagatcaaaccttgatgaagtcaaagattcttcaaaggctcattgagaatggctttaagagaactaaaaagtgatgatggtgatggcagcagtgatgatgatgttaccgatcaaatatgtgcgctatgtgatgatggaggacatttgcttagctgtgacggtccatgcaagaggtctttccaccccacaaagaaagatggcagagaatctaaatgtgaaagtcttcattacacttcagcagaagtaaagagaattggtacttatctatgtgcaaactgcaaaaataagcaacaccaatgttttagatgtggagagcttgaaccatcccatgggccaaatgctaaggtctttcaatgcaatcaagcatcttgtggatatttttaccaccctaagtgcattgcacaattattggatcctaatgccactgatggtgagttggaaagaaggattatgtcgggaatgtcatttccgtgccccatacattggtgtttcaaatgtggccacatggagaacaaagctcaaagagcacttcagcttgcagtgtgtagacgctgtccaagagcatatcacagggaatgccttccaagggacttatcctttggaacaaaggacaaggatggtaaccaacgcgcttggaagctttccgacacaattttcatttactgcctagatcatgaaatagacaaggatactggcacaactagtaggaaccatataaaatttccagctacacctgaatacaccaaaacaaaagggcttggtaacagcaaaggaaggatgactggcaaaaggagaaagaacaaaaggagaaagaacactgaccaatcaacaaaacctacagatttgccaaacaggttgtgtggagcagaaagtgagcaagctgacaatgtaggtgcaaaaagcacattgccccagattgttgtagagcctcactgtgcagcaaagcacttgaagggtgatccacaaattgccaaacagggtgttgctgctcgtcaaaatggtgcagaaactatgaaagggcatgaaaatcaatttggcatttcattttgtgttgcaagtactgaaacagagaagagggtaacatgtttggcacaaaggggaacatgtttagggacacaatatgatgggccatcaaccaagggcatgtatgattgttctgttcaggacacccctatggacgacgatgttgagttggataatgtggcctgcataatcgcggtggataaatatgtcaatgggagggggaaaacacaagaggactacactagaaaagaagctgctcagcgcaaagactcgagtgaaaatcaagggcagaatgatgctctagagctagacaacctccggatggagatgcaagctgacgaacgtccgttagaaccaggaaacaagagggacaggaagtggcagaaaaatgtatatggactcggatcagcttcgggacagaaggaaaccttgtccaggagagaaaatccacggtcagatagagggatggtccacagtaacgacagcaaaacaatttattacaggaagggtgggacggaagtcgataatgttgatgaccaccctttagaaaagcaagaccaccaggatacatcaagtgacggatctaaaaagagaagccgaccagtggacaacgcatctggtggcaacagaccatacttggatgagaacaagaagcgtaatctcagagaagatggaagatatgctcattatgaagactggagaagtgaaaggaatacagcagcagacacgtctggatataaggcccaatcagaagagaagcctgtatggacaaacactcgaacaggatcaagggagcattcactggacaggcaaaggatagagtgcggtgacagctatcgtggaacctataacaatagacaaagacatgaatggctgcacccgcacgctagtggtaattcctcgagaattggttgggatgacaggaggcagtggagttcatctcggtcaccatttccttcggctgaatttggtggtgaccgttcctgttctcgtgcccatccgagaggttctaaatacagaaccggcgggaggcatgatcacccccagtacctgggactgggaacacctcaacatggtacaagtagaccgcaccacacaatgggctgggacagggacaccttccatgatcaccagcatggcagaagaccgccgcaccacacaatgggctgggacagggcccccttccgtgatcaccagcatggcgaatacgacgactccaggtatggtgaatatgatgcaactgacaatggtcctgacagcgcgcatcgaccctacacggctgctggcgtggctggacgttcagcaccgagttatcagcttgctggtggttatggagagggatcaagggcttggcggccagttacggacaagtacgccccatggcccttgccttgaccgcacaaactaatattagccaaggagccagagtgagctacaagaacaccgtttgctattgtcggaaatgctttcttcgaggactgtctcagtacggggaattgatgggtcggtgttgaaacccaaatgatatctgccttccagttgcttgctttgcctatcgtaatcactgcatgttatttcacataagcagctggattctcaagttatgtgggcggtgcatttgagttatactagatgacagcctgtgcatattgttactgaagtaaaatatcttttttattaggttccccttatctcgctgtgttgttggtcaatggttatggactatctagtttgtcaaccccattttttgaagaaatttttattttttaaagaaaaatcagttcattttaaaaaaatgagaatctctgagaaagttgataaacaag

SEQ ID NO: 38625 - DNA, 1391 bp, Zea Mays
ggtccagtaaattcacctttctaccccgatcaattcacaccatgtcgaccacaaccctaaccctatccctttcgacggttccacttgcaccctacccacaaccccatccatcgtaacccgccgccgccgcgatacacgcaaatcctgccggcgcatccaaccccgcccgacgtggacgccagagaggtgcacgacttccgcaactcgtggcactcagtgcggtggtcgtccaagctcgtcctctggctcgtcctcaacgccttcagcttcctcgtgccgtcgccgctcgcccagatctacgatgcaatggcgaggcaggttcatatccaaacaagaagccacgatggaatctggatttcccctctatctgatggaatctggatttggtgccagtctgttttcctgtgattttgggataccagccccattccccttcatggagggtatgcgttgctgttggtcggcacactggaatggaacagatatagacagaaccttcaggtaagttcctcgacattacttatataattactaagggattcattttaacactataaatggatagtagaccttgatatctgtcaagtgctaaatgattttatgtcaataaagtaccatcagtttattaaatcacttatgaaaaacatgcatatataacaattcattagtaggtaaaattatttcattagtagccgaccatttcatatattgttgaaagcccgtgtgttagctcgtatcgtgtgtttattaggagttcgctattatcatttcttacagctaaagagcttcactgttaggacaggtttggtcgccaacgaaagcactactccacctcttttacactttccaactattctagtcaataccatgctaattaaagttcagcaaaataaaggaaataatattgcataattgctttgcgaccggacctatataatatcttgtgtagtcctatgatcctatcctcttcaatttacacttctgctttgaatggtcttcaggttcataagcaaggagttgcgcttgaccgatctatggatctctctagatgcactgactaaggtgaattgaaagcggaactagacatgatgtttgaattcgagggtgaattagtatctgcaaaccaaaactggcagattgtttataccgacaacgagggtgatatgatgcttgtgggagatgacccgtgggagaatttgatgtggttgtgtatgatgtactttatattttggcatactatgcacaaaaacaaatgccttctatgaccatcgtgatttatacattttcaaacaaaattttatgatacttcttattgtgttttacgctttcactaaaaagcaagtgtcacattcgccgttacaaaacagatcgataatttacgtaaattttgt

SEQ ID NO: 38626 - DNA, 2857 bp, Zea Mays
tgggcattggccactgccaacccgccacaagtgacggccgtcatgccgacatgccgtggccggtccaccactaccttcccgacgggccgcattggattcctcccgtcctcctcccgtctcgccatcgcttcctgttcctcttcttccgccgccgccgtacgatcacactagcaccgccagccgcaaggtcccatggacctcgacccggcctatcccccatcagcctgcgccgacgcctggccctttgactcgctcaccacgtccctgctcttctccccgcagctcacgccgataccggccaactcatccttctcctggctcaccccacactcgccgctctggctcttcgaggaccgccacctgctcccgctcgacgcgcccgccgtcttcgaagaggtccagcggccacgctccgggaattctcacacttcaagcaagccagctgaacagatcagtcacagatggcagtttcatctgtccctggacgaagatggcacagacaactccagcttgttcaaggagaagctgacacacgctcttcgctacttcaaggagtccacagatcaacatctgctggtccaagtctgggcaccagtcaagaatggagaccgctatgtgctcactacttcaggacagcctttcgtgcttgaccaccagagcattggcctacttcagtacagggctgtatccatgacctacatgttttcagttgatgcggaaaatgttggagacctgggcctacctgggcgtgtctataagcaaaaggtgcccgagtggacaccgaatgtgcagtactatagcagtgaagataaactatgcctgcgaggtcgataaagtctgcaaagcacttgaggcggtaaatcttaaaagcactgaaatacatgaccatccaaatgtccagatatgcaatgaaggccgtcaagctgcgctggtcgaaatactggagatcttgaccgtagtatgtgaagagcacaagcttcctttggcacagacctgggttccttgcaagtatagaagtgtcttggcgcatggtggtggtttaaaaaagagctgcttaagttttgatggaagttgcatgggggaggtctgcatgtcaactagtgatgtggcgtttcatgtgattgatgctcatatgtgggggtttagagatgcctgtgtcgagcatcacctacagaggggacaaggagttcctggaaaggcgtttatctcacacaaaccttgcttttcaaaagatatccgcaagttcttgacgaagatgaccaaaatgccttactggagtctgtattaactctgatgaagaggtgtcttcggagcctaaaggtagttggtgacagagatttgagtggggtctctcttcaccttagcaatgtgctaaaacttgagaatgaagaattcaagacagatgcacagtttgataactctgatggttccctttgccaatcacctaacggtgatagacatggaggatcccatgagtttgatggtgggaacaagaaggttttggatgtgccagagggacaattgttgactgatgacttctctcaaggcaatggtacttctgctggcagaccaaatggtagcggtgcttctgattcttctgtgcttcacaaaaccaacaaaccccctgaaaggaaacgtgggaaagccgaaaagactatcagtttagaggttcttcagcaatatttttctggaagcttgaagaacgcagctaaaagccttggtgtttgtcctacaactatgaagcgcatttgccggcagcatgggatttctcgttggccatctcgaaaaatcaataagagaaattaactcaaagtaaagtggcagaactttcaaatatcgctgttgatggtgacagagattctttgcaaaagtcacttggaaatgatggccattttggtatagtcatgccccagcaaggatctacagaccataacaatgacacacagcttgaagctgacaaggcgtctcactcgagaagttcgtctggagaaggcagcataaattcacgcacttcggaaggctcatgccagagaagtccagcgaaccagacatttgtttgcaagccaattgcttcaacattcgcagaacctcaacttaatccagaggagttcaataaagagcctttccaagaaccacaactaccactttccaggatgctcattgaagattctggtagctccaaagatttgaagaatctcttcacttcaacatctgaccaaccatttttggcccctcccaataatttggtgccaatgaagcattcagggtctgtaacgataaaggcgagttttaaagaagatattgtgaggttccgtttctcatgctcaggcagtgttattgtattgaaagaggaggtagcgaaaaggctaaggatggatgttggcacgtttgatatcaagtatctagatgatgaccatgaatgggtaaagttgacgtgtaattcagacttggaagaatgcatggagatctcacggctttcgggtagccatgtcatcaggttatctgttagcgatattgcgacacactttggcagttcttgtggaagctccggttgatatgcctgtcagccttttgctctgatcaatgggtactcgaaagtgcttgtaccatgagttcagttccacttgaagagttgtacttttgttgctagttagcattactgcattagcgggagcattagttgcttcattgtgtttgataaatgtatcattgtatttttccgcaaaatgcatgtaattgtgcagaatgcacttgtagtcaactttgtatatgttatgtgcaagaaattctatttcaagttataaactagataattgttgtctagagtttgcacagtatattgcattggaaatgaagc

SEQ ID NO: 38627 - DNA, 2830 bp, Zea Mays
cgagcccgtgcgaccttgatttgcttgctcgtgaatggtggcttaggattttgccaccttccatctcccgcttctagccaccgtctcggctccagaagatgtcgaaggatggggcggcgttgggcttggtcatgatggcggggggtgacgccagtgggagtgacccggaggtgcacgcgaatatgcagcgtgtcaaagtataccgtttaaccaatgacgggcagtgggatgatcagggaacgggccacataacaattgactatattgaggggtcaagagaaattgctctggctgtcgtggatgaggtggataatgacacactactacttcaccatcttacttcagataatatctacaagagacaagaacaaacacttatctcattgaaggatcctgaaaaagcactagatttactgctgagctttcaagaagctaaaggatgcttacatatatggcagagcttaacttccttacagcaaaagctacagtctggtgaccctggctactatattggagtgcggaaagaaggatgggacacgcgttgcaaagttaatatctcgaaatcagcatgaatttttccccaagctagtggaccttttcagaatgtgtgagaattcaagaaacatggatcatctccacatgatctttagactagtcaagggaatcatattgttgaacgatgctggcatatttgacaagattttctctgatgattttatccttgacataattggggcccttgagtatgatccagaggttcccagtgtgcagagtcatcgtgaattcgtgaagaatcaaaccctcaatgaggccatacacattgggaatgtttctgtggtctcaaagattcgtcaaacatacatagtaggttatataaaggatgttatattactgaatgcactggatggtcctactttgtcaagccttaactcaatcattgagaggaacaagccttttgttgtttctgtactaaaggatgatgcttcttttatccatgatctgattgcaaggataacatcttcgaatacctctgctgaatcaaaaagcaaactggtcttgtttttgcgtgagctttgcattatcagcaaaagtttggagccgaaagtacgatcacatatgtctaggtatctcattgatgtaggagcgctaaacataatttctgatgtgttacagagtcaggataaagaactcttttcagctggggcaaacatactcgggtattttgttgatctgcatcctgacttagttagaacatttattgccaatcatgaagagaacctggaaggcagttctcttcttgagtttctggttcaagggatggtagttgactccgccaatgaaatgctctatcagtcttgtctaaaggaactgttaggttcttctgatacaactgtgaatcatcatgatgttgttcttcggcttttctttgacaagcatcttcaaaaattgattgacgcaatagcgtcgtcctgcgctccaaagggcattgccagatcaacgtctggtttagctggtgttcgcacaacggttgaacagcattctgctaagcctgaaacattgttgaaaatttgtgaacttttatccttctgcgcacttcatcatacaaaccggatgaagatatttttctcaaccaatgcaatggagaaaattctgacattaactcataggagagagaaggttttggttctggcaggagtccaattcgtgcggattataattggtagaaaggatgactttcttgttgaccgtgttatcaagttcaacctgttaaagccagttattaaggcttttgatgaaaatgaaggtagagacaacatgctacaatctgtggtccttgaactgttggagtatataagaaaggaaaatatcaagcctcttattgaatatgttgctgagtcttgttggggccaacttgtgaagtttgaacgattgcagagtattatggccttcaaacttaagattgaggagagtgccgaaacaaagcaaagtaccagtgtggttgacatgagaatgaagaaagcagacgaaagaggtgctgataaacgacaggaaggttattttgaggacagtgacagagtagattcttctacacctacaatgcattcacaggagcaatctatcccagcaagaaagcctgaaaatgctgatggttgttcgaaagataaggagggccccccctcgccttctagaagcacgaaaaattctgatggcagtggcgaaggggatggaagccgaggctcttagaatcaacaacgtgccccggaaacttcaggtcctgtgccccggaaacttctagaagcacgaaaaaacttctagaagcacgaaagataaggactgcaacgaagctgcaggggatttgtctcccaagatggtccatacttcctagatacaatgaaacctattgacgtagagcctcggtgaggtgatactattgttttttcaagttacacttcaacatgccgttgcttatgatgaaatcgagagtacacatctcaacttggaacccgagaaatgattggatgtgagacagttttggccacagttgtgttcatctcagacatcaattttggctgagttgtgaacatgtacagataaatccccgagaaaagaattggaagtttctcttcggcatctaacgtggacctacctgtcaatgttgttgacaatgatgctgctctaaagaaggcgggagaacctgagcgagagccaagagtgttccgatgtgtgagcaatctaaattccagagtaatgagttgtgattaggtcatgtaacgacctagccttgtaatagaattacttaagtctcgtaaaggaggcgaggaacgtgaag

SEQ ID NO: 38628 - DNA, 1497 bp, Zea Mays
ggttcatagggatccaaaccaaatagttctcaagagtcaagagtcctatggtggtgcggccaagcagatgtctgttgtctcctcccctgtcccctctcttcctgccactcctgtttcatcctagtgaagcagagatccatccatcctgaccttgattggctgattcttctgctgaatggtagaattagttctatggattttcacagcaaggctaccaactatcttgtgacagctagcgacgatgaatcaatccgcctatacgacactcaaaatgcagtatgtttgaagactattaatagcaaaaaatatggggtcgaactagtgtgcttcactgataacccaaatattgtcttatattcatcaaaaaatggctgggatgaatctctgcgtctactctcactgaatgataatcggtttcttagatattttaaaggtcaccttgacagggttgtctgcatctcattttgctctgagaaagaaaattttctctctggttcacttgaccgtactgttctcttatgggatcaacgggctgaaaaatcacagggcttactgcgtgtgcaagggaggcctgcagtttcatatgacgatcagggcatggtatttgcagttgcctatggtggtcacataaggatgtttgatgctcgaaaatttgaaaaggggccttttgagatcttctctgttggtaataacgattcagaggcccatgtcataaagttcagcagtgatggcaggcggattctgttaaccactaaagctggacgtgtccatgtgctagattcattccatggcaatagcattgcgtcgtgcaatgtgaagccagtggtaaccaactcaacactggaggcgtcgttcagccctgatggaaaccatatcatatctggctccggtgacggtagtgtttatgcttggaatgttaggagtggaaaggtcgcgcgctggggaagcacagacgacgaaccgccgctggtaaggtgggctccaggatccttgatgttcgtgacaggatcatcagaactgtcatgctgggttccggacctgtctaagctgggatcctttaccattagcaagtaggtgaaaatgatgagaggtggactgcccttgcaaaccctgttcgtccctgtatggtatgtcgtgtggctggttgaagcgactcatcctttagccaggtggccgtggtaaacttgcaacctgttacaattgaatgacttgtatagagcatcggctgtggcgatctggcttctgaagccagcggctagacaatgaagatggatccatgctttagttctgtaaaccggagattgtagctgagtattgctgtatctctttgtttctggaaggcgtcttggctcgtaaagattctgcaactcagagcagatggctaatatatagagagagcaaagaaacaatggatagctgggctggttgttctgttttcagttggattccttgtactgacgtgtgattccgttgtgcatgcaccgattcatatttcag

SEQ ID NO: 38629 - DNA, 2136 bp, Zea Mays
gcccaaaattacggcccctctctttctctctctgactacctccgtatgaggcagcttgtgctcgttcgagactgagacaccccaacacgcctccctcagcgcagatctcgccgccgccgagatgctccgccgcggcgtgcttcttctcgcggccatcctcatcgccgtcgcacactcgcccctcgcgtacgcctcggaggccgagcacaagtataaaacagaagaacctgttaagctatgggtaaacaaggttgggccttacaataaccctcaagaaacttacaactattacagtctcccgttttgtcaaccatctgaaaaccctgcacataaatggggtggtctcggagaggtccttggtggaaatgagctgattgatagtcagatcgatataaagttcataaaaaatgtggacaagggggccatttgcacaattgaacttgatgttcaaaaggttcagcaatttgctaatgccattgaaaactcatattggtttgagcttttcatagatgatctgccattgtggggttttgttggggagactgacaaaaacaatgagaaaaagcactacctttacactcacaagaacattgttgttaaatacaatggtaacaggataattcatgtgaatctaacacaagagtcacctaagcttcttgaagctggcaaaaagttggatatgacttattcagtgaagtgggtgcaaacaaatgtggcatttgcacggcgctttgaggtttacttagactacccgttctttgaacaccaggagcgagatgttaatgaagaatccgggtggaagcttgtccatggtgatgtgttccggcctcctcgtggccaggtgtttctttctgccctagttggtattggcactcagctggcggctcttatcctgcttgtgattgtgttggccattgttgtcatgttatatgttgggcgaggagctatcatcacaaccttcattgtgtgctacgctcttacatctttcatctctggatatgttagtggtggtctctattcaaggaatggtggaaaaaactggataaaggctatgatccttacagcatcactttttccattcttgtgtttctcgattggattgttgttaaacactattgctatcttctaccgatcattagcagctataccatttggcacaatggttgtcatgtttattctttgggctttcatctccttcccgttggttctattggggactgtagttggtagaaattggagtggtgctcccaacaacccgtgtcgtgtgaaaacgatcccgcgcccaattcctgaaaagaagtggtaccttacaccttctgttatttcactgatgggtggacttctccccttcggcagcatcttcattgagatgtacttcgtattcacttccttctggaactacaaggtgtactacgtctatggtttcatgttgctggtgtttgtcatcctcataatagtcaccatatgtgtcactattgtgggtacttatttcttgttgaatgctgagaactatcattggcaatggacatcattcttctctgctgcttctaccgccttgtatgtgtatctatactctatatactattatcatgtgaagacaaagatgtcaggatttttccagacaagcttctactttggttacaccttgatgttctgtcttggattgggaatactttgcggtgctgttggatatttgggctccaccctatttgtgaggaggatctacagaaatatcaaatgcgactaaacttggtctaggctgctagcatgtcttgtcacaatatggtgcagagtaataccttgagcttctgattgacttcggaaattacacaggaggttgctctccctttcgttactcttttcatcttttttggcctatcttcctggacgtgtggaactgcccatgataaatgtatacctagttggagaattagtcagagtactggaaagtacatgtaggtttttttggtgcggcctctctcggtcaattgtaggagtacattgatgaatattactgcagtgcagattccagtgggctagattcgcccctcttatgactgtttctaactacgtaccctctccgtcccaaattagaattcgttttagggaattaatgaattcatacaatagttgatc

SEQ ID NO: 38630 - DNA, 5006 bp, Zea Mays
aaacaacaccattgctcttctctcttctcgtttctctcctgtatccagttgtggctcaccactgctattctctctaccagcaagcagctcctgccttttgtttttcagctcctgctgcagcctttcccctcccaccacccaccacacccccaaacccgtgcaagaaaccaggagcagcaaagcaaccggcgctgcaacttgctccggtggcttaaagttggacagagtgggctcttggatcaccgttcaccggtccccgacccaccggcgtgccactgttcttggacagagggggcaatcattcgcgccgcggcagtagccaacctcctccgttcttggattggctcacagcgtgcgaccgtgcgggcccctcgaaccgagcaacaagccaagcaagaacacccactcccctctctccggactccgcatgcgattgctggctcggtgacgcgctgctggcctatctcaaatcctcaacttacttgcctcctcggttctttcttgtgcttcatgtggctcctgcaactcgctgcagcaccacttgcgctgtgtcgccacgcgctgtttcttgagcctctttggtagctttagtggttgaagcgaggtctgctcacccgatggttccgaacggagcaggggaatgcggcggcggctgccggcgagggaaagcagcgcacgccggtgtcggcgctgtggctggtttcttcttatgtctcttgatggtctgggcagttggtgggtctgaaagatcaggttgtggccgggtggctgagcaccacggggtggtacgggtggggcagttcaacctcagcaggagccagctgcaggcgttggtgttcctcctctcatcgacacataaagaatgtatggtaaattctggaatggtccatgatgggaatcaagtcaatggtgcgtcttttatcccagatattcgttgcattcgagataggatatatgatggaaaacagaattggttgaaggatgcaattcttcaagaatcttgcacagcacaagataaatatggcctaaatagtcatgcacctgcagtattggaagataagttattgcaaaatgttatacaagaagacattaattctaccacgcagtgcaatccggacgaatgtgacttatgtgctggaatcagtggcgtgaatgtggtccagaatattgggtcaagttctaatcgcacaataatattatgtctatctgcttttttggggagcattgtgatatcaatagttaaaactacgcacaaaagagggattcaaacccacaagctttatgcagatgagaaagttctccaggcaccaagtactaaaataagtcgaaagtggtcaaagagagccctgcttattggtgtcttatttgggctctgtagctctgtatgcatattttcatgcatgtatgccgatgttgttgctcggagaattgagaatcttgctaatatgtgtgatgagagagcaaggatgttacaggatcagtttaatgtaagcatgaaccatgtgcatgcgttggctatactggtctcatcatttcaccatgggaaggatccttctgctattgatcagaaaacatttgaggacttcacagcaaggacaacatttgaaaggccattgatgagtggtgtcgcctatgcattgaaggtattacacaatgaaagacaacagtttgaggaacaacatggatggaagattaagaagatggaagatggagatcagtcccttgttcatgactacaaccttgaaaagcttgaaccatcaccagttcaagatgagtatgcgcctgttattttctctcaggaaactgtgaagcacattatatctgtagatatgatgtctgggaaggaagatcatgacaatatattacgttcctggtcaacaggtaaaggggccctaacatccccttttaagcttctgaagtccaaccatctcggtgtggtgcttacattcactgtatataaatatgatctgcctccaaatgcaacaccacaggagcgtattcatgctacattgggctatcttggtgcctcatttgatgtcccttctctggttgataaactcctagaacaactcgctagcaaacgaaagatagtagttaatttatatgacaccacaaatcatacctctcctattgaaatgtatggttctgattttactccatctggtgatctgcatattagtagcattgattttggagacccaacacgcaaacatgagatgcattgcagatttaaacatgaaccttcactgccatggtctgcaataataatatcaacagctgtagctataattgttttgcttgttggacatattatttatgcaactctgaactcccttgaaaaggctgaacatgattatagagtaatgagagaacttaaaggacaagctgaagctgcagatatagcaaaatctcagtttctagcaactgtttcccatgagattcggactccaatgaatggtgttttaggtatgctgcagatgctaatggacactgaacttgatacaactcagcaggattttgtagtcaccgctcaagaaagtggaaaggtattaataaacttaataaatgaagtccttgatctggctaagatagagtcaggaaggattgagctggaagcagtgccttttgatgtccgtgatattcttgacaatgtgatatctcttttctacgataaatcacaagctaaaggcatagagttggccgtgcttgtatctgaccaagttcctgatgtcctaattggggatccatggcggttccggcagatcattacgaaccttgtggggaattctatgaagtttactgaacagggccacatctttgttcaagtccatttggtcaaggaactaaacaggaaaggaaacaatttttgtgatgtttctgctcataacagagaaattctgtatgattctgacaactcgatgctatggaacacactaagcggacttgaagtagcagatagctggaggtccttggagaattttacgatgttcaagaattcaaatggtgaaacagatacaattaggttagctgtcagagttgaagacaccggcataggaataacaaaagatgctcaaatgcgtatttttacacctttcatgcaagctgacagttccacctcacgaacatatggtggaactggaattggcttgagtattacaaaacgtttagttgaattgatgggtggagaaatagggtttactagtaaatcaggagttggtagtacattttcttttactgccattttcaaggagaacagaggatgtcctggagatatgaaaagatactattctgaacctactccgttggattttcaaggaatgagggctcttattattgatggaaggagtgcacgtgcagaggttactatgtaccatcttcgtagacttggaatacagtgcagtcttgttgccacatctgaatctgaatctgcatcttcagctttgatgaaagcctgcacctcaagcaaaaacaatccggacatggtccttgttgatacagaagcttggggtaaaggttcaggtttggcattctatcatcgttttgtagattgtcaactaaagggcgcacacaagttttctcagcccatgccaaagactattcttttgggaagctcaataagccctgttgaatctgattatttaagattgacaggatttggtgattgcataaggaaacccctccgtcttagtactattgttgcctgtcttcgcaaaaccttaggggttggggttacaaggcagcagagtagagaccaatctttggttcttcaaagtgtactaactggaaaacagattctggttgtggatgataatgcagtcaaccgtaaagttgcagctggttctttgaagaaatatggatctaaagttacatgtgttgatagtgggagtgatgcaattgatatgctcaagccacctcacacatttgatgcttgcttcatggatgttcagatgcccgagatggacgggtttgaagctacaagattaatccggtccatagagaaaaaaataaacgatatgatcatgatgggtgaaatatccgctaataattatggaaataaggcccattggcatgtaccaatattagctatgacggcagatgtaatccaagcgacttttgaaaaatgtatgcagtgtggaatggatggatatgtgtcaaagccatttgaagaacagcagctctactttgctgttgctcatttcttagagactgatgaaacagaataacaaatccaacttcgtaggagattgatttgccgcaacactgtttcaacatctgccaaaagaccatctgttcaacaggttctgaaaaacagcgatcggcagcatatttgaaattgctgatttggtaattttatctttgttttggagcaatggaattgaggtcccagttcttatatatagaacttgctccaggaaacaaaatacattggactcccactgaccagaagaaagaagataagatagtagggggtacaaaatgtttggtctggtttccgcagcaattttttttctggccgtgttttctggaaccaatacaacatgaccttgcaacagtggtgtcagttgcttctgtaatgccttatgacaccacgatatttccaaatgctgtgttgtaagtgctttacagacaaaccgaggtccagctttctaaaacattgagttcaatgacatcacttcatccattatttaagaaagcgagggtcttcaaatcaggaggatacaattgtatcaccaagtcaggcacacagtttcaaggtgactttgttctgatctgattgttaatgcaatctgtaaagaggcaactatgagttagggattgtttgatgccttgaatgtcgtatattcatattccatcatttttgtgggcacttgtatatacattgatgattaattgtattgttagataattgtgcattttaagattaaatgaattcctaaagcaaatcgttacataaacaatgtataaagcacacataacaaataaaggcatgtcttagtagattaaac

SEQ ID NO: 38631 - DNA, 2129 bp, Zea Mays
tttttaggtctaaacgtgattttacttctgtttaagggctaaaatacaaaaaaaaattcggccgagcagacccgtggcctcactcccccgcgcgttagggttccgctctcatccttcgtgcctgctcaccgccgccacttccagctaggccgtcgtcgccgcgccccaccagcttcttaactacactacctgtcatccagtagccctgttcgtcgtcgacactccagttcgaataaggctctgagagcacctcaccttcacatgaagccccaccacgtagcctaggactgcgccaagaggaatgccgatcaggtagtacgacgtgacgttgacgtacgcgactacgccttgccaaccggcaccaacagcgacacctgacagcacgggctggacgctgttgagcagtatggagaaggccagcaggggcgagaggtcggcgacggctgcggccaccgcctggctctcggtgaatatgtaggcgaggctcccgcggaagaagaggaagagcacgaacagcacgagcccgatggcgaaggaggtgacgaccacgttgtagatcgcgaacttggccctcctcgcgctcccagctcccagctcgttcgccactcgcactctgaaaaagatagccaggaagcctatggagatcatcatctcccaaccattgatgttaaggctgcacatttagtaaagcagctagcaagtgatgaaagtgtagagtgatctgtggacattatcattagggttcctttaatattaccatatcgaaagggcgtcaagtgcgatctccgcattcttcatgtatcctgtgaggagcaccagtatggtgttgtaccacaattccaagctgaaagaaaaaaagactacgatgcggatggataccatccacacccacagaccacagtggcttgctttgcttaccagagcatgacaccagaagagagcgagagcctgacgatggcgccgaggtcggcgaaggcggcggacgagaatccggtccaggtgagagggcatccgccgaagaagacgaaggcgagctggccgaacacggggatccacatggcgacgaccatggagcccatgacgccggcgaggccgaggcggaggtggacggcggcgagccaggacagggcgaggtggaggccgaggttgagcatggcgaggtacgtgatgatcatgttcttgatctgcgcctgcaggtagatgcccagcatgtggtactgcttcgccccgtacgactgcccgcacagcgtctccagcgcgctcgccatgcccagctgcatgcagatgcatatcgcgcccggccggacgccgacgacgcggacttgttggaacagagccgtcgtcgaccagtcgacgcctgggtgcctggccattttcttcgccgaagaagggaaaaagaagccgccgccaagaccaagagggaagaagaggaagcagcagccaagagagcaattggaacatgactgttgggatcggcacgagatgtcgtcgaggcggcggcaagctttattgattccaatgttttttttttctatctagcttgtccggcacgagttggtggctgactttattcgggctctgaaccgagagcacggatcgatcttttgaatcgaatgctgctggcgggggcgggccgcctggagctcgacgaacgaagggcaagacgacatcgactacaaaatggtccccgatcgtgttgtgcagcgtgttgctcgtgatcactatacttgcatgcatctttgaatttgaatcatgcatgcgtgcatgtccgtatatagatccacaacatgggctgtactttttttgaaaaaaattgtttcgtctttctcttttttgcgaacgataattgtcggcacgtttttttttcgttcggaggccggtgttagagagtacacatgtgaactgtctgtccacttctctctccgttagcttaatcttgtgttctaacgagagagagagtacgtgtgtgtgcgtgtatggagggagttatgcgaacaagaatcaagaacgaatggattgatagaaagacacgtacgtaccaggatgccgttgctgaacctcatgaggacggtggagacgagcgcgtaggcggcgagctcggtggcgccgatgtggccgatgaaggcctg

SEQ ID NO: 38632 - DNA, 4462 bp, Zea Mays
ttgccctcatcgctgactctgaaccacgttgccacagccacatctactagctctccccaatccgaaccgaagccacacacccacaccatatctgcaccagccatcctcgtgatctctctgtctcccatcgccagccgccaccgcgccctcctcccaccggatttagaggcgattcatgggagtggtgcgcaggctgctactgcggtatcaatggaggctgactgccatggaggatctgagcatcgaggcgaaggaggccgcgaggacatgttgatggtctccatgatggaaggaccacgccgcacggagaagcccaccggtgtcatcttccgcaaggtttgcttttactcttggatcaagactcacctggctagccgagtagtcgtccatcgcgttttgaaggcagacaggaagttatggttagctgcaggttaaagcgaatgaaatgaaccatcatctgtaacaaggtgctatatcaatgacaagcagcaacaaagcgtaacacactaaagccgtggaattatgtttaatggagtggtcaaaatttatgccgccatgtcagtccactagatcagaagcatctgtgtcctgcggcagcatgatgggctcacctataaacaaatggataagccttccctgacccagaacagaagaggttcaatggttcggcatataacattagaagtcgattgttttttcctttattttttggagggcagattcatatttgggcgtttggcacaggctttggctcaagtctacgacatcttaaaccattttgtttgcagtcatgcacggagaagacagaggaattgcacccaacaagcccttgatatccaaggaccacgagcgtacctaatttgattctacagactgggtcgatctctctatgattaacaaacacaataaaaaaactatatgtactaatcgatttataatgtttgtatgtactaatcgatttataaggcttgtatatactaatcgattttataatgtagctgctaggaaaaattcagaactgaaataaaggacacaacaatttttgccacttcagcaacttcatagcatgttttccaacaaggatacaactccaagaagaacgatgttggtctgttatgaccggtcgccactacaggcgccgggcaacagcataggcatgcagataaggattataagatgataatgattagaagattaaggagataagatttgttagagagaaaagagggaatttatctcattagataaggacaagaagggagtataaataattgtaagcaccactctatagggattaagcagaaacaagattgttctggcttcctagagggagccgggagattactgtgacctagccgcccctttcctcgcgtctctcatctcgcgcgcggtgaacacggcgccccgccgttgtgcatcgcgcctcaaaccccggccaccaatcacccaccactacaacctgagatcgatcagggaatccgccccgattcctatcatggtcattgtggatgagatggactatttaataacaagagattgtgttgtgctacatgatcttttaatgcttacaatttgttctatctctagatgcatattcataggtgaagtttattttctgtactgtttaatttctaaaaactagatgaactatcttgttcggttaattttctgtactattaaatttctgaaaactggagtttttgcatgtactaatttctatgtgatggtttctatgtgtgctatctgcatgtctctttaattatctctatatatctggttagacgacaaccttctatctatgaattatatgtcatgtctctttaattatctctatatcaatgtctacctatgtgatataagataccgtagcaacgcgcgtgcacctaattagtgaatttggaagtgtgactttataaaaacaaatgagttatatgttcaagataatgttaatagtcatactatttaaagtccttttactttcttatttggatgagtcttttttcacatatcttccttcttaatgtaccattcatggttctattgatagctcaaggtcgtgtgaatgttgccgctgagtactacaaacaacaggtagagatgttagagggttttagtgagatgggcgcatttacagatcatgctttcctacctgtaatgtccaaggaagaacacgaaaaagttatcaggagtgaaccattagccatatggttgtctaatattgcaaatatggttctctttgctgcaaaagtgtatgctttagtaaggagtggttcacttgctattatcgcatcaactttggattctcttctagactttttgtcacgatatatcttgtggtttactgccttttcaatgcaaacgccaaatccctatagaaacccaattggaaaaagcgtatgcagccgctggtgagttcttttttgccataacctgtacttccaaaaatgatggttgatgttgacatctagatctattgtccagaatgttttgtactcttttctgcgaaaatgatttacttatcttttacgtaatctgaattattgtctctgcattttgaatagaatgagcattgctttccatgtttctttctgaggcaaacaataaagatctgaattgacaggaaatcaataaacttactcaacactgtgtgctcactactcagtaattcttacttactggaatataaattacctgtctataaatactaattgttgagttcatgattgaagtcatagaaccatggaccctttttatccagtcacctctgtttgaattttctttaagttaatgatgaacttgttatgacttccaatttgacatttgcttttgagatgcgttgtcacttgttggggcaacttccatgtgtcaaacttttgtttgtcatgcctttttttcatattcttttttctttcaactttactgggattttctaatagatcgcctcttagttatattgttgatttgtgatccttccaaaaccatactatcacctaaaaatgatcagttcatccagcaatgttttgtttgtctatttcttgtcatggtgcacttattagaattgttgcccacttttactttttacatctgataatatgtttaagaaactatttttacttgattcttgacttgtagatacctttttatttctgtattgtatcccacaaactttcctgctagatattcagttgatgttttgtacttgtatataccttgtccacataaaacttgtgtgatatacttttatgaaattgatacatatgataggttgtttaatgttttagagaaatgctcttgataaccatagttggtcatatattatagttcatctacttaaacatattgtagcttaaccagaacactaaagttcaaattccttacctttcaatgctcaaggtttttatgtcttgtacagtaaatgcggccatttttgtttggtttgagaaaaaaagatttttttgttttgtttgaggcaaattctcaactgtgctgcagtgtagtactgtagtggcaacattttacttctgtcacgttgcagcaggtggccccaaagatctgagcagcaattgtgatttagtgaattaatggtaaccctgcaataataatatctgttttatgacaacaactattgctaaagaattagatattgatgaatatcgtattgatatactatcaaattttagaaatatatttcgtttttcagaattattgttgaatgcaaacaaaacaatgagatatctatatatgtaacacaatttttcgtcatacttatttggttcagttgtgctctacgtttcaaagcagggctgtgatgattggttgttaaatgatgtaggttaagaccatataaacagttgtaattaaattctttgctatatagaaatcatagcaacgcacgggcacttaagaaacggagagggggaggccgttgtggctttgtgaagcgcttcgtcccgagcgggcgtgggcgggtatggcaccacacgtatcagccggctctgttgtggtattttaaaaaatattttaatttaatcaataacattcttaatttcttacgtacccattttaacctatatatctatactatattaaagcatcagtttcaacggtcgttctgcgtcatatttttacagataatccctcacatctatttcaaattaatacgctgcacgtctgtctgctctgcgcaaccaacctccacgttacaaaacacaactccatatatagatggctaaacagcggttcggcacggtcctgacgcccacgggccacaactctggcctaggcatggcgtgccggcctgctgactgtatcaggtcatttggttaaatcagtgtaaaatgttaaaaaagtagtgaggaggtggggttcgaacccacacattgatggaagaagggcggaagacactgagtgaagctatctaagcattagaacatcatgctcagatgtttttattattaaatat

SEQ ID NO: 38633 - DNA, 2266 bp, Zea Mays
tgaacttctcgaggatgttttaaaggacccactaatatcaaatgttcaggctgataacattggcagtgatcagcatttgctgcagctaaggtttttgacattgaaaaatcttgcatctgttttccttcaacaaggttttgagttctacgataatgctcttcactgttacctacaagctgtagagcttgattcaaatgattcagttgtctggaatcatctgggaacactttcttgttcaatgggtttgctgagcgtatcaagatgggcatttgagcaagggcttgtatgcagcccaaacaactggaactgcatggagaaattgttggaggtgcttatatcaattcgtgatgaagtcgcatgcctttctgtagcaaatttaatacttaatagttggccatcacatcatcgtgctttacatgtgaagaagaccattgaatgtgctgaaccggtaccttttgcacctcgtggtattgacatacttgaacccaagcatgcaaaactcatcttttcgaataaaagaaaatccgttgatgatgaaatctgtcaagaaatagggacaaagaagagtaaacacagtgctacattgcaattgaatgaagcaaaatggttggcccttttagatggtatcctaagcttaataagtgcaaacaccgagaaggctggtgaatataattgctcaaatactgttgataggtgttcaatcagtgagggtagtgccaaggggcttgcttataacattatagacgttgtcatatctacagatacattgaaaagtgtggaaactgctggtggaaatggaaatgattctcaccatggtgagattctgccatatgattgcaaagctacagttaaagagaaagatggtaattcagatagggaacatccccatgaaagacggagcacacgccttgagaggctgcgaagtcgcaaatctggaaaagatgaaaatggatctgatggtaaagatatatcccatgctatgacccagtttctagaatcatttattctaaaaggaccaagccctgtagaaaaggcttattgttctggaaatgccgatgcttcaaatcctgatactcataactatacatccaacgaggaggcaaatgatcttaagcaatttctatgcaagatatccaagaattttggccctcatcacattggttatatgttacttgaggagatggctcatctcaaagtgccattccaagattattttgtcaagttaattgaactggacaaacttactagaggctgggctgaagacagatctgcatcgtgcaatttatttctagctgaactgtactatgatcgggctttgtgttctggaagtccaccaacatcttctgagctgtctgattcatcttaccatctttgtaagatcattgaatcagtagctctggaactgccattcaacatatctgttagagaaatacattccaccaacttggatacggaaagtagcaggacaggtgaatcttcaagtgaattaatcgagagaagtcatgaaaatggtcacatcaacatgcttaatgaccaaaagtccaaacatgattcttcttcaaacatgaattgtgcattctggattcgcttcttctggctgagtggttgcctgtccctttcatcagactgcaaagagaaagcttataaggagttcaatattgccctgtcaatactaaaaaatagcaacaaaactaaaagctatggagaggtcattcttctacctcacaccaaacttgtaaaatcacttacaactgacaggattcttcgtgaaatcaacttgatcaggcttgaatctctactttggaataatgatgagaatatcaacaaaataactcatacagagttcatgcagttgctacctccacttttgctttccaccaaagatgcctacgttggaaatgcatatggtccacaaagagaaagcgagaatgttatttcacttgagttgtctgccttggatgtcttaatatctgcatgtgaaaaagcaaaaccaatgaacatccaggtatatcttgactcccatcgaagaaaaattcaagttctaactgtggcagccggcatggttggatctgtcacacccctgaaagcgaaaggttcaagcaatgtggaatttgtggaagcaatgaacaggaaccggctagaaaatgttgtggaagcagtcaaagatgtgtctcgaaatgccagtaaagcaaaagacataatcgatcaatgcgataattccaggctcttgaggacatagcttgggttagggacatcaggtcgccac

SEQ ID NO: 38634 - DNA, 2048 bp, Zea Mays
tgtagccctgtcgtgacctcgtcaaaaccaggtgaggacccgtttctccttgtgttcattcctcgccagtattaatacccaaaatcaagttattagatgctaatgttatctatatatgtgtgtgtaatgtgcgagatgtgaggaattccatatttgtgtggcgaggcaagccgtgcgacaagtgccagatgtacgatgaaatgattgaatcggagagcgtcaccgtttgtgtggattatcaagtcaggcaaataacggtcacttggtcgtggaagggcttcttattgcagtcatagtgttccagctctccaggaagagttacaaaccaccaaagaagccactcactgaaaaggagattgatgagctatgtgatgagtgggagccattgtggttgttgttgcatgagtaatcctacatatcatttcatatatggattaaccggatggtctcactcttgaaactgtgggagtgttggtgcaattcttatactagtttcacttaacttaatagtgccatgtgtggggacctattaatcttgaacatttactcgctagattatatgacatttaaaccatgtactcgtgaataagcagcaagggacaccttgaaccacatagaatatcatttacccttgctacccaaatgcttacatggctacatgcttcttggattgtattctctcttctctgatatcagtatgatcatcaaagcacctaaaatgtgctgctgtatgtatatagctagtgtaatgttgtttcttaggatgcattgcactaacaaaacaacaatttcatcaatggtatgctctcctagtctgtagttataggaatagctcttgaacttcccttgtgatagcagtgctctatttgaagacactactatatatgtaatattctttttgttgaatatcccctgaaatctgcttcagttatatgtgtatattatttaattcaccagaatttttcttcacgcatttctggttgtgttacaaatattcatgcagtatggattacaattgtttaccatgttaagtagttatgattgcatcatatatgatcttctgaggatcagaattaacccttctatttttcttttatacagtgccgctggaccacatacgattgttgatggtaaagaagttgtgaactttgcatcagcaaactacctcagtttaattggcaacgaaaagattattgattcttgcatcagttcattggagaaatatggtgttggttcttgtggtccatgtggcttttatggaacaactgatgtccatcttgactgtgagtcaaagatagctaaatttttggggactccagactccattctttattcatatgggatttctacaatattcaatgtgatacctgccttctgtaagaaaggagatatcatagtcgctgatgagggtgttcactgggcagtgaaaatggtctccatctatcaagaagcactgtggtgtacttcaagcacaatgatatggcttcacttgcaagcactttggaaaaacttactcgtggaaataaacgtgctgaaaagattagacgctacattgttgtagaatccatttaccagaattctggccaaattgcccccttggatgagattgtcaggttgaaggagaaatatcgattccgtgttattctggaggagagtcattcttttggggtgcttggcaagtctgggcgtggccttgctgaacattatggagttcctctcccaaacgaggcctaactgtttggtgaaatgcttgggacaaagtggccatcaagaatggagtcatggaacatcagcaggacactacaagaaactgataaatgagcctttcctagcgggcgatatctccccctctcgtctcagcacctcacgccgccggtgatcgccggtgaccacgggagcattacagcatcgccgagctcctccccggcgccacgttcagacgtccgtcgagcggtcggtgccgccgcgccgaggccgagtgttggatcctgggcggcgagcttctgggcgcggtcaccatggtggagcgagcgccgccagagaaaaac

SEQ ID NO: 38635 - DNA, 2353 bp, Zea Mays
atggcgagcgggggaggggggattcgggcgacgacttcggggaggatgaagtcgcgagggtggggagattcaagcgacgactttgggacaccggctattgcgctgaggcgtgggggcgactgtagtggcacggcgagttcagactccagcgccgtcttcttcgcggtcgccttttgcgctccatcccctgggctttccgtcacggcggccgcagccatggtggagatgcggcagcggaggaagccgctggtgctcgcctccacgcaggcgctcctcgactcgcttccgggggatcgcccgccgccaccgccgcagaagccggtgcgccttaaggccggcgtcctccgattcccctccggaggtggtggcgccgagttcggggagctcgcgtctttcgtcggcatccctgcccctgctctccgacggctcgcggtcgtcacgggtactcctgtgcttgtcaagaatactgacaataatgttgggaggattgtcaaagcagtattgtttggtaacccgtcccttgacaagtcctgctcagaacatactgaccaagtggtctctgcctctctctctggtcatgcaatgggcttcttaccttgtcgcacgttccctgctattggttttacatccatggatgaagatgttggttatgttagcccacttttggcattcaacttgggattgcatgtttcttgccttaaacttcttattcaaagagaagggcagcctttcaagttctgttctcgagctgaagagattgatgcaactgccagttctggaagtgatctttctcttcacttagaccttcttccatgccctcaagtgcctaaatatgcattgcatttacgagtttctgttgtgaggattcctgattgtggtgtgcttgcttctttaaagatatattcatcctttggaggaagtgagtaccaagacatggtagatcaagctttgaacgagtactttaagtttgataggttcctagcaagaggagatgtttttggtatacaaaacagttggaagtgtggctcaagctgctgcctggcatgcaataagcaggataataaactgaatccccgtaatatgatctactttaaggtgactggcatggaaccatcagatgaacctatacttcgtgttaattgcaatgaaacagcccttgtacttggtggagctgcttctgctgcaatccccccttattccttttttgcttcttctggtaattcagtaccattgcacagtgaagtagtggagcatttagcatctgtcattgcaccagcattgtgcccttcggatattttaccaaaaataaagttttccacttttttatatggcccgccaggatgtggaaagcgcacagtggttaggcatgttgctaaccatcttggtctgcatgtggtcgagtgtagctgtcatgatctgatgacatcatcagaaagtggggcacctgctgcacttgcaactgcctttaaagaagctcagaagtattctccttgtataatacttcttcgccactttgatgcaattgggaatgcatcctcaaacgaaggtccacagtctgagcaatctgggattgcatcgaacattgaatctgtcattaagcagtacattggacaacgttgggttgctaaggattcactgccaggaaaagatgtaaatgggagctcatacctcgtggagcctgaatgtgtaagctctcttcaaatcatactagttgcaactgcggacagttctgaaggaatgcaacagtcaattagaagatgcttccgctatgagatcgacatgaagactatgaatgaagaacagagaaacgaactgatatctgagacacttcaaggcattcctaaagttgctgatgagagtatttgtgacaagttcataaaagatttagcagcgcaaacgtcaggtttcatgcccagggacatacttgcattggtcgcagatgctggtgtgtcttttgcgcataaaattgcagcagggaaagatagcaaagcaatcagtaagcatacggaggtccttccagaaagctcttctgccactcaaaatgaggaacaccatttcagcaaagaagatattatgtcttccttggaacgagccaagaaacggaatcgtgctgcactgggcacacccaaagttcctaatgtcaaatgggaagatgttggtgggctagaggatgtgaaaaaggttattctagatactattcagttgcctctgatgtacaagcacctgttttcttctaaattgcgcaagcgatcaggtgtcctgctatatggacctccaggaacagggaagggttgtttcccaggtatcattagcttcgtccctgaggcggtgtcacaacttctcacaagtcttc

SEQ ID NO: 38636 - DNA, 989 bp, Zea Mays
gcttgggtcttaggtacccaactcatgttgggtcctacaaggttagtacaaatagctttagggacccaaatgcaagttttatctcccttgcattttgcccctaattttctagcaactaccttcttatcctttctacaaatagcaaaggaagcatttaaagcatgataaattgtagaaggttcactatttgctttcctaggcatatgaacaacatttcttctaggcatgtgattaatagtatttctcctagctacatttctatcattcataatagaagaactagaagcaaccatagcatgagaatcaagagcatcgtaacttctataaacatttctagaatgtctcctatcatgatacatgaaggcatggttcttttgagcattactaaccataggggccttccctttctccttggcggagatggaagccttatggcttgttaagttcttgacttccctcttgaagccaagaccatccttaattgaggggtgtctaccaatcgtgtaggcatcccttgcaaattttagcttgttaaattcactcttgctagtcttaagttgagcattaagactagccacttcatcatttaatttagaaatgcaagctaggtgttcactacaagcatcaacattaaaatctttgcacctattgcaaattataacatgttctacacaagagttagatttatttgctgctactagtttagcatttaaatcatcattaacaccttttagagtagaaatggtttcatggcaagtagatagttcacacgaaagcatttcattccttttaacttctagagcaagaaaattttgtgcactaacaaatttatcatgctcttcatacaaaagatcctctcttgcttttctaataacctattcttatcattcaaggcatcaattaattcattaattttatcaaccttggttctttctaggcctttgaataaacatgaataatctatttcatcattatcactagactcatcc

SEQ ID NO: 38637 - DNA, 2291 bp, Zea Mays
actgacactgactgacagagtcaatggcgacgggcgtgcttgataggcgcgccccaactaacacgacgtcggtcctcgatgactgactgggtatatatgccatgggtcaccccttccgccaatccagtcaggttcgtcgtccggtcgccgccacctagttgctgccagtccaggctgggaaatcgtatcgtcagggagagcagcatgaaggggcggctgctgctgctgctgtgggcgtgggcggccgccacatgggtgtccgtcagcgccgtgactcgcctcggcagaggcgtcgccggagagcagccgctgtccaggatcgccgtcgagagggtggtcctcgccgtcaacgacgcggcgtacgtcaaggcgtcccctctggttctcgggcacaagggcgagaacagtgagtgggcggacgtggagttcttccacccgaacccgtccgacgacgactggatcggcgtcttctctcccgcaaatttcagtgatgcgatctgtgaggctgagaatacgggtaccccagtgctgtgcactgcacctatcaagtaccagtttgcaaacttcgaaaacgatggctataacaagactggaaagggctacctcaagcttcagttgatcaaccagagggaagatttctcattcgcgcttttctcaggtggtctctcaaagcctttgctaatccaaaggcaccagtgtacccgcgtttggcgcaagggaagtcttggaatgaaatgacagtcacctggacaagcggctacgatattacagaagcagttccttttgttgagtggggtgagaaaggaggtcgacgacttcttgctccagctggaacattaacatttgaccgaaatagcatgtgtggctcaccggcacgaactgttggttggcgccatcctggttacatccatactagcttcctgaaggatctgtggccagactcgccgtatacttacaggcttggccataggctgatgaatgggacccgcgtctggagcaagtcatacagcttcaaagcgtcgccttaccctgggcaagattctttgcagcgagttgtcgtatttggggacatgggaaaggcagaggctgatggttcgaacgagttcagcgacttccagcccggttcgttgaatactacttaccagatcatcagggacctcgaagacatcgacatggtggtccacattggggacatctgctacgcggatggctacttgtctcagtgggatcagttcactgcacagatcgaaccgattgcttcaagggtgccatacatgattggcctcggtaaccatgagagggattggcctggcactggttcattctacgggaaccttgactccggtggagagtgcggcgtccctgcccaaactgtgttctacactccagctgagaaccgtgcaaaattctggtacgcgacggactacggcatgttcaggttctgcatcgcaaacacggaagaggactggaggccggggaccgagcagtacaagttcatcgagcaatgcctgtcgtcggtcgacaggcagaagcagccgtggctcatcttcctcgcgcaccgcgttctcggctactcctcctgcacctactacgaatcggagggcacgttcgaggagcccatggggcgggaagcgctgcaggagctctggcagaagtacaaggtggacatcgccttctatggccacgtccacagctacgaaaggacatgcccggtctaccagtctcagtgcgtcgtcgatggatccgaccactacagcggcccgttccaggcgacgacgcacgtcgttgtcggcggcgcaggagccagcattctcgattctgagttcaccacctcgaagatccagtggagccacttcaccgacttcgaccacgggttcgtcaagctcacggccctcaaccattcctccctgctgttcgagtacaagaagagccgcgacggcaacgtgtatgaccatttcacaatctcacgcgactaccgggacatcctcgcttgctccatcgacaactgcccccggagcacactggcttcctgaagtcccacagtagttgcagaccagaaattttagttcgtagcttttctgtactgcaccgaccaataaatgaggccttttcttttttaataatatataattatatgcatgcactattttcttgtacctatagtcataaatgttagaagccaatttcgatagcaatttaatctaggaaaaaattaagcatgggagatcaagagatagaaaacttatcgtcatcatatgcataactctagaagttatgatggaaaactttcg

SEQ ID NO: 38638 - DNA, 979 bp, Zea Mays
ggaagtgttagcccagaaaaggcccatctacctgtgaacatggatcgcggtgaacgcccgcgacgccttccccggccgcggcggcctccccgcccgcacagccactggccgtgacggagcggcccctcccgttcctcatggattcgcgcgcgttcttcctttctgggcgagggcgaccaccggaaggcagcagccggcaaccgcgactgttgacatttgcgttagagcatggaggaggaagaggaagaagaagctgtttgctctctctggtggggttgatctttcctcgtcttcttgttccccgaggaatagtggcaaagctctacgtgcaaaagtccaacttcgctgtacgaaggcttagctgttatccttctctgggtcgtcatcaaacttcggaagttgccacagaatatctttttccagagcccagatctggggggaaaaaggcgaaagcaacagccgatcaggcgcccaagattcgcgtttccagtgggcacttgtggagggagtggcaggtgcatcgaagagcactacacactcatcttggcagcgcggtctgtggctgattgagcaagcagcaagtggatggaggaggccggcaggataatggcgcggccgggggtggtgtggcccacggctgtgcccggccggggccgtttacttttggcccccttggtgcgtcgggtgatgtgtacgtctgcggaaggaaagcgtctctgtttgccttggccctacggcgcagcgtctctgttcaaggaaaaaaaaagagtggaattttatatctggtcagatttaaaactatcgtagtttaactaaaactttttaaaaactaatatggcatcaaactagtacgctataaaaacaatataatagtacttatttgttatggtaataaatattagtaactgtatttatttatttatttaccttacgagtcttgactttgggaagatgacctatgggctattattgatggatg

SEQ ID NO: 38639 - DNA, 2143 bp, Zea Mays
tgtggacccctctcccactcccctccggccctcccctcccacctcacatcccttcttgcttctcgcctccccacccttcatccacccgccgctcctcaagccccaagctccggcgatatgtcacgcttcggtcgatccggtccgccgccgccgatccgcgacacatattcactcctcgtcctcaacatcaccttccgcacgactgctgatgacctcttcccgctcttcgacaagtacggcgagattgtcgacatctacatcccaagggaccgcaggactggcgactcgcgcggattcgcgttcgtgaggtacaagtacgaggacgaggcacagaaggcagttgataggctcgatgggagattggtagacgggagggagatcatggtgcagtttgccaagtacggtccaaatgctgaacggattaataaagggagaataatggagccagttccaaggcccaggggccgttccagaagccgcagtccaagacggaggtaccgtgatgattatcgagatgactaccaggatagagattatagaaggcgaagccgtagccagagtagagatagatacgcccgtgacaggtacagagatagggattaccgccatcgtagcctgagtcgcagtttgtctcctgcacgaagaagccctagtcatagccgcagccgcagttacactcctgatgattacaagaggcgtggcaaagacagcagcgcatcacctgcaagtaggagccctagtcgctcccctcctcgcaagacgccaccttctcctaagagatctcctgtcaggcacaatgatgaccggtctccacgctcacggagcccttcaacataagcacaattcacttgcaaagcatcttgaacagctcaggatgaatggacttgctctgatcctatgtgtgtgtggctatgcttgtgctcaatggtgggcacttttcagttaaagttttgtagtgctgtctgtcagttgctgcctcaaacttggaatactacttctgtttggcacctgaactgcttatcaaaaactttatttacatggagtgaagatatgctggctgatatgcggtcaacatgcacgtagcttactgttgaagttgatataatctgtgctgtttgcgttgttgatgatgatggctgatgagatgatggaactgcagctgactgcacaatttgctgctgtctgcacctattatgctgacaagtaagattccaatgatttagctgaattcagtgttcccatttttcgtgtcataaaatgcatgacaccacgaatcttgaatctacatgcttaggtgttaacacccttttaatattttggtttagaagtgtctgcactgatttatcatagatctgttttggggttgttggatcataagcctacatgtgcattattaattgttgcatgcactggttgtgctgtcaatgcatttctgccatttgccagacatgtcttgtaaagaaaagcataagctcagtcttacttttggaaactgttccattgtcttgagtagaggtgagtgttgtactgttgtttaagctgtatacacactcgtgtcataatgccgttgtagtgcaatccaagttcattgacatgatcacgagtcataaaagggtatcttttaccccaagtgttcattaatctcacctacttatgcttgcaagttaatgatttgcatgaaataaggaagttctctgcattaatgtatcgagagtaggaaaggtatgatggcatgtgagtatttggatttgttggtgctctttacccttcttcagcaatagaaggcgtggggagaagtttcagcgacagaaatgcctgactagttgattgatcttctggatctgaatgctgatgatttgcttcaaagacttagtctcatgtagtcatgtcatttgtggagtctgctgacccatcaggctctggattttgtaacacgaactttgatatgcttctgtgaaaaaaaatgggtaaccttacataagtgtttagacggtttagtggtgttctgctcttttctttacggtactgaaaaacattgactgttagttgggttgttaacctggttgaatgttatacacacttagttcagctgaattaaattgtttatttgattgttcgttgcgatatgagcgtattccctcct

SEQ ID NO: 38640 - DNA, 1329 bp, Zea Mays
ctcttgcagatacagagcctacggcgtcgagaaccaccggagcccatgtttgctcgttcatgtgattctggtgtgatcagtttggtgtatgtatgtgaaggctcgtttaattccagagctcatgggctaagaaatctctcttccgtaaacaaatacaatacaaccagacagtggcctcgtatcatgtaaggcgtatgagataaatgacaggtttctggcaagaaagaagacctctttgaagaaagccaatgtcgtgaaagggcagtggacaccagaggaagataggaagctggtaaaattagtggaacagtttggactgaggaagtggtcgtacatagcacaactgctgccagcaagagtgggaaagcaatgcagagaaagatggcacaaccatttgaggccaaacatcaagaaagacatttggagtgacgaggaagacatggttctgatagaagcccacaaggaggtgggcaacaaatgggcagagatagccaagcggctacccggcaggaccgagaactccataaagaaccactggaacgcaacgaagcggaggcagttcgcgcggaggcggagccgcaccagctccaaggcgcccaagccaggcacccttctgcagagctacatcgaaggcctcggcattgttggcccgagcgacaagagtgctgcgccactttctgaacctacactgtcgcctgaagctcccggagcaaagtcggcaaagaccggtggaacaacgctaccggaagaacacagcccgccgtccaacatgctggattcccaaggcgttcttcttcccagcgaagagcttcttgccccaatctgcgacgaacttctagatggaatgtgtggcggtcttttcgactgcacgaacgaggacgccttcttccgtgtgtgcgctgtggacgatgacatcgacgtgagctacatcttcgaccatgcgatcaaggtcgatcctgagatagacatggagatgatgatgatgtgggatgacgacgccctcgcgtgtactgctggacctgctgctggaacagctcatgtcgagaccgtgcatgtgaaggaggagatggacctgatggagatggtggcagccacgcagaactgtggcgaagcagaaaatcactagagaagcaattatatagatgtgatcgcacgacctacagatgtaaccacatgcagtactatagggtatccatatagaacagcacgaccttttggatcgatgtgtccttcctgtcctggtgagtggtctccacaatcagtaacaaaaaaataaagcttcaaatgaagcatacttggttcacatgtgtgtatatattactgtatttg

SEQ ID NO: 38641 - DNA, 3989 bp, Zea Mays
cgcagaaaagatagctgtagacatccccggaagaaatggtcccgtgcgtgcgctcactcctttgctgtttttcttctctccgttcaccttgcgtgcgcgacatctagggcgaccgccgccgccgccgccgccctacgcccagcagcccaggtcttcgtcgcgccctttgccggctacgagcacccaccacaccagatcactgtaatccaggctgaattgtggctgcattcatgcaaattcgtggatattaattcagaacctggtggcatattaatcttggatacttggtcaactgcaaacttgaagattcattttcatgcaatcaatggagagcctagcgcaattagaggtgttgtgtgaaaagctttataattctagagactcggctgagcgagcgcatgcagaaagcaccctcaagtgcttctcagagaacagcgagtacatttcgcagtgccaatacatattggacaatgcctcaactccatatgccctgatgctggcgagttcaagcttgctgaagcaagtttctgaccgcagtctttctttgatgctccgtctcgatatacggaattatgtcataaactatcttggcacaagggggcctaaattgcagaactttgtcattgtgtccttaattcagctggtctgtcgaattacaaaatttggatggtttgatgatgacagattcagagagactgtcaaggaagcgactgattttttaggtcttgcttcccaggatcattatttcataggcttgaagatactaaacaatctcgttacagaaatgaatcagccaaaccccgcgatgcctttgacgcttcataggaaaattgcgggttcattcaaggatcagtttcttctgcagatcttccaaatttcgttaacctcactaaaccaactgaagagtgaagctccggatgactttggacatattcctcttgaccttgccttgaagtgcttatcttttgactttgttggttctccggtggacgaaagctctgaagaatttggaacagtgcagcttcctgcatcttggaggcctcttcttcaagatccttccacactccaaatcttttttgattactacaaagtcaatgacatacgggtttcaaaagaggccttggagtgtctggttcgacttgcttctgtcaggcgcagtatttttgtggaggatcctgcaaggtcccagtttctttctcatctgatgctaggcaccaaggagatacttctaactggccaaggacttgctgatcatgacaattaccatgagttctgccgtcttttgggacgtttcaaagtgaattaccagctggcagagcttttgaatgttgagttttatggtgagtggattggtctagtagctgaatttacaactagatccttgttgtcatggcagtgggccagcaacagtgtctactaccttctaagtctttggtcaaggctggtgacatccgtgccttacttgaaaggtgaaacaccaagtcttcttgatgaaactgttcccaagatcacagaaggttttatcacttccagaattaattctgttcaggccatccttgctgacaactcactggaaaatcctttggatagtgtggaagttctccaggaccagctggagtttcttcctttcctttgcagattccagtaccaaagtagtagtctgtacatcataaacatcatggaacctcttctgcaagcttatacggaaaggtccagattacccgctcctggtgatgctgatgagctgtctgtcattgaaggccaaattgcatggatggttcacataattgcggccattgtcaaagttaggcaggtaacaggtgttagtcaagaaacacaagagttgattgacgcagaactctctgcccgtgtactacagttgataagtgtgactgatacaggagcgcacacacagagatatcaagaattaagtaagcaaaggcttgaccgagctattctcatttttgtacaaagtttcagaaggtcatatgtaggagaccaagctatgcattcttcaaagcagttgtatggaagattgtctgagcttctaggacttaatgaccatttaattctactcaatgtgattgttggcaaaattgctacaaatatgaagtgctatgctgagagtgaggatgttattgatcatactctgtccctgttccttgacttggcaactggctatatgactggaaagctgctgcttaagctggagagtgtaaaattcatcattgcaaatcattctccagagaatttcccatttcttgcagaatacaaatgttcacgtagtagaactacgttctattacatccttggctccttagtcttcatggaagatagccctgtgaaattcaggactttcatggaaccacttcaacaggttgcattaaacctggaggcaactcctgatgctgcttttcggactgatgtcgctaagcgtgcatttgttggttggatgagagatctacgtggcatagctatggcaaccaacagccgcaagacatatggcctcctatttgactggttgtatccatctcgcatgccacttctgctgagagccatctcactttgcactgatgaaccagaggtcaccacacccttgctcaagttcacgtatgaatttgttttgaacaaagctcaaagactgacatttgattcatcatcaccaaatgggatccttttattccgagaggttagcaagataatcgtggcttacgggtcacgaattctattgcttcctaatggcacagacatttatggaagtaaatacaaaggcatatggatctcactgactgttctttcaagggctttgtgtgggaattatgtcaattttggcgtatttgagctctatggtgacagagcacttgctgatgcccttgatatatctctgaagatgaccctctcagttccattatctgatatattggcattcaaaaagctgtcgaaagcgtactttgggtatatggaagttctgttcaacaaccatatcaagtttgttctcaatttggacacaaacacattcatacatattgtcagctcactcgaatctggcttaaaaggtctagatgcagggatatcatcacagtgcgcttctgccatcgacaacctggcagccttttactttaataacattacatctggtgactcacctccatcaccagcttcagtaaatctcgcacgacatattggagagtgtcccaatttgtttcctcagatactgaagactctttttgagatcatgctctttgaggatgctggtaatcagtggagtctgagtcgaccaatactgagcctgataatgaccagtgaacagatgttcagtgaactcagagcgcacatattagcatcacagactgtggaccagcaacaacgcctttcacagtgcttcgataagctgatgacggatgtcaataggaacttggaacctaagaatcgtgacagattcactcaaaacctgacagcatttagacgtgattttcgactgaagtaacagctccttggtaccagctatcagtttgaaggtgttcctgcatgatgtaaatactccagttaccttcttttttggaaccacctttctgtgggttgagaaaagaagagcttgtccttaggtttgccttggattggctgaagatggtcttgttgatgcatgtggtagtgaaagcagctgtaaatttcatagcatgtcattttaatcagaatggtgaaaggtggagattgtttcttttgttttttattttatattgcatccctttagcatgtacagcaaaattggtgctagaacaggggtggctgtttgcccaatttgttaagtgggaggcagtcatctcagatataattcatttgttaagaagtcaacgaggtaaaggatgtaaatgattccgttggctttgctgaatatgaaagttgaacagtaagaaggatggctcagttgcatccgctgtgcagattgaactgttaatgataacaatttcttttttttttgtctctgtttg

SEQ ID NO: 38642 - DNA, 1155 bp, Zea Mays
cccgctctcggactcaccaagcccaacgccgtcgagccgcctcaggcaagtggacaaagactgtgaattactggaggcagagaggatcatggattacagtcttttggtcggtattcacttcaaggacagatgcaaagataagttaaaacgatgcatgcttctcacacatgcttggagctgcaagatgcatttggagttaggagactgaaaaatctatttggttgttacagcatcaatggtgacaatggttgttacagactgcatttggagcatcaaatttctattgtggggttcaggatacttacctgtttcataagggcttcacatcttatctaatgtggtggtcaaacaaccttcctgatatttattcctaactatgcagaatactgctaatggctatccagactcggaggagaaaaatggttctcagaaatatgatgtcttctttcatttttatgttttattacatttgggtactactactcatctcatataagaggaagtgttggaaaatagagagaaggataagagttagagaacttagaagcaaaatggttctcagaaagatatcatctaggaggcttcactgtgcaaaatccaccacgaagcacagaagaatattttaacttgtgccatgctagagctagaaatattattgagagagcctttggaaggctaaagggtcgctgggctattttaaggtctccgtcattttttccggtcatcgcgtggaagaggaaaaagtaaaagggtgtggacttattttgaggatgaagcattggtgaaggcactctatgagctatcccttgatccaaagtggaaaagtgagggtagtttcaagaatggttatctatctgtcctagaagttacacttgctgaaaaaattccaggttgtggcctcacttcaattccacatattgagtctagggtcagacactttagaacaaagtatggtgcaattgaggttatgctagcaaatagtgggttttcttgggatgagaacaggaagatggtacaatgtgagaagcaacaatatgaggaccattgtaagagatatcctgatgcaaagagatgaccatgctttttgcacttccagagactctaaggagggagttcatactacatatgatccagattccggctctcatcaagtga

SEQ ID NO: 38643 - DNA, 5073 bp, Zea Mays
gtttagcttgggtgcctactgcctacaagtaaaacgaggcgaacctgcaaaacccgtagctgacgcatagggaggggaggaacattagcctggaccctggaaagagcaagcaagtcggcgacgggcaacccgtttcggcggcggcgctagggcgcggacccccagcaagtagccaccgcaggcaagctcctcctcccgcccgcccattggaatgcggagagatccacccgggagtgggtggattggtttcttcctctgttggtaagtgattcctggccgggctttgcttggacggattccgtcctaggagcttttgtttctttgtcgccaggcgaactgaatcttgcttcttccccacacgttgtgctgtggataagcctgctgcttggtgtctatccgttcaggacctggtgaggttcttcttcctctcctccggtgcgcaagaatgaaattaggttccacaatggcacattggtgtctcattcgtccccaatctgaagttcattttctaacaatttttccgggttcagtttttttactcaattctcgagggtttatagtcagaaatcttaggggacgttattggcgtttgagttttgctattgcggtagattaatattggatcctagagtgtggttgagtgaagtgtgtaattctttctttttccctttttaagggtttcttgaattgtgaggttagtagttcatttagatcatctcactgtttgatccaccagatgcggctaatggtgtttgtgtattgcgaaatgatgagcttgaatgtgagcttttccagtggtgtggtgttggtctggtttgttttcccgacacattttttggagacatgcctctgggttgctgttttctcttgatggggtggaacttttcgtccagaatgtgatgaattgggctttggagtgcaacaattatacgatacacttcaagttttgagggtcctttcgggggcctttttttatgttcatcctgtctgtttgctttctaggaaggtagtacctatgtcagcatgaggtattgggtaattttgtgtggtggtgagatcgcttggttactttgggcaatgcatggttcacaacttaagagttcttttattactttccatttcttgccctctgttcgctgtgtcagcaactctcttcgtatatttgacaaggatatgtgtcgaatgccttttgaattttggagcattttatgtttgtgttctttaatctttactaacaaaagcctatttgcagatacttcaaatggactattatggactcagcttggtatctgaaaaagaaccagcatagctacactccctttgcaagactaatagactctaaagatgcctccctcaccatcacctaggagatctctgaaagaagtttgccacgcaagggggcatagttttgtcagtattctgcctgctaaatcgaaggatgatgaactcacgttgttcaaggatatgcagaaatatgagagggataacttcttactggaagcaacagaggattttgatgaatccatctttgagatattttcgagattcaaagattggtgtcaacattgctgcacgcggagaaaatcgtgatttacttaatactgatggtgaaagaaatgactatgattggctgttgactccaccagagaccccactttttcgttcattggatgatgaagatcaacacattggtatggctcataggggcagggcgcaggttaagccaatatcaatttcgaggtcttccacaatggaaaatactcaaagttttaacagaagaagtgcaagcccaagtaggcttagcccagcaccacgctcatgtagcagcactatgttgacaaggataagatcatcaaattcttcttcacgatgcagccctgcacttcatttgcaaccagcggcaccatcacgaaggtcttcgactcctccagcttctaggacatcaacacctccacaaaggtcaccaagtcctgcttcaaggaggttgagtactggctcaagtgacccaattttaaacagaaaaggaggaacttcgcctgttaaaaccagtaacaggccatcgtcaccaaaacttcaaggttggcaatcaagtgaccctggtttctcttttgacgcacctccgaatctacgcacatctctgtcagatcgtctagtatcccattcaaggggtggatctccttcatctttcagtggattggacatgaattggagaggtagaaggcaatctgtgtctcccactccatcaagaagagccagttcatcgcatagcaatgatcgattcagctcatacagcaaagcatctgcaacatcttctgctgaagacgacctagagtctatgcagtctgtgctgattagttactccagtagcccagctctaagaaagaacatgccagtaataaaatccagaactattgcatcacctaagaagccgtccaagagtttctcccctagttctggtccaaagaggtcctttgattctgcagtttggttaatggatcgtcgcaaagctcctcaagataagttcaggccacttctatcaagtgttccttgcaccacatttggtgttggcaaaggggataatgtacactcatctatgttgtctcataattcctcactcacaacaagcagtaatttaagctctgaccatggtgtcacttttagcccttgtatgggtaatgaacaaggaccaagtgatatagccggtgactgtgaagcaacacctacttacagtttgtctgctactcaaagtagcccaaaatctccaagcacagaaaaaaatgcggaaagtaacatggaagacctcaatatggaaagaagtagaatagtcgagacttcaggtaatgttgcaagtggttccaaggctgggctaactaaaatggcaacatgcactaggtgtgaaaagttatttaatgcgataaaagatgatggagaaattgatttgtgtgaagaatgtggtttagtagatgaggttctttttgtgaaccccaagatagagactttggaagaacatcaaaaagaccacaaaactagaatttctaaaccttgtgttgccttggaagctcctcacattactcccgatcatggtgaagataccaagaagtcatttcttgatagtcagctgttgaatgatgaacctccagctgattgtctgcaaaagtgtcctcagtctcagtcaacaatatatacaaccgacagaatgcttttaatgctgcatggagagaatgttaatgaaaatttaaggccagatgatgttggcaactcttcccaaggaagtagcctcgatatttcatcccatcaatgtaacataaataattatcaacaatcggaactagcatctgtagttgagtgtgataatttaagagatcaaactgccaaccaccagaatgaggtgttccaacgcctgccagggtcagtgtatcaaagcattgaatttgcctctaatacacttacctatgacagttgttgtaaacagggatcggctgggcattcaaatctaaaggttgaaaatacggagggtgctgggatttcagtactgctgcagaagtcaagcagtaacaaatggcctgttatagaagggcgacccttagctggtacaaatattatctgttcagaaccctactatacaagagatggtgttactatgctaaagcgtaccattggatgggatagttcatcagcgtcttccattgatcaagggtctacaaggcaatctggacatttggaacaccttaaaagtagtaatcgtcatgactttgagaagtctcaaataagtagtaccatgagttgtaaaagcattgcatccatgtcagacatgtcaagtagcaattgttcagtttcagtttgtcctcgggatgatgcaattgcagatactggcttcctaaccgacaattcagaaagcagtgctcctcgatccataatttgtactgaagaacttaatgagtcgtgtaagtacacactctcaagtgctatagagtgctggtctgctgcacaggctattgttaatgttggcattggttcaactgaagatgtagtgattcagaaactatgtacaggtaggatggttcacaaagattacacaagtgataactcatgttcatcagatactgaaacatgtagcaatatctcactctctctggctcctgaggaacgatgcatacagaaaattgaagaaggtacctcagttggcactccagaacacccagatggtgattgtggcatcagtaattatcaaatgcagcatgaaacaattcctgaggcagataggttggatgatggttgtgcgtctgttatctctgaggaggccaacataatggggcttcctggtaatgttgagggaccaagagaacaaactcaaagatgcttcaccttagaagaggctacggatacaattctcttctgcagctccattgcccatgacattgcatacagggctgcaacaattggactggagcatgaacagcattcagaacttgcttctgctcgtcgcccagcagttcccatggcaggacaatccattcccaggggtgatggttcacggaaaccaccccacagactagtgccaagacataggaaaagatcagaaggtgaaacagttacagaacctgacaagatggaagtggtcgctgaagatcctatacctgttcggccagttcctgaattttcaaggacatcaggcagcttcaagtctccaaaggtcgattcaaagtgcaactgtgcaattatgtagagttatgcatcaactcaagttggcaactatacttattatgatcactaaaatccatggttgcttgttattatttcagcgcatgtgagttaacaaatgaatctgcacccacctggttcagtaagcagcagcgacctacaattttttttggttgtggtgcatttgccctttatttctgggtcatagagtgctcaacgagccattcttttgtaaattcttgcttctccagtcagttctatggtttgtctatttttttttcctgagagtcaacatctcaagcttaagcatatttatataataaaataataacatttatgataccaaataagcatcattagatttttcgttaa

SEQ ID NO: 38644 - DNA, 1213 bp, Zea Mays
tgttcgttcctctggagaaaggacaaggcagagccgaggaggccatcatcaacttgtgcaatggtggcgatccccagctagcggatgcagatgctggtatgctaaatttgttggaaattgtgaaggttttcaacagaaccagcacggatttgaatactaaggatttggaaaccaacgtcattgttcttgttcatggtggtggattcggcgcttggtgttggtacaagactatatcacttctcgaagatagtgggttcaaagttaacgccattgacttaacaggctcagggattcaccattacgacacaaacaagattagcagtctttcagagtatgctgaaccacttacgtcttaccttaaaggcttaggcgatgctgaaaaggtaattttggtcgctcatgatcttggcggtgcctgtgtatcctacgcaatggagatgttcccatccagagttgccaaggcggttttcctttgtgcagcgatgctggcaaacgggaacagtgccctcgacatgttccaaaagcagatggacacgaacggtactctccaaaaggcgcaggaatttgtctactccaacggcaaggaccggcctcccaccgccatcaacatcgacagggcatcgcttagggacctgttgttcaaccagagcccttccaaggacgtgtcgctggcctcggtgtccatgaggcccatccccttcgcccctgtgctggagaagcttgtgctcacggccgagaactacggctcggtgcggcggttctacgtggagaccacggaggacaacacgattcctctgcccctccagcagagcatgtgtggtgccaacccaccggagaaggtgctgcggctgaagggggcagaccacgcgcccttcttctccaagccgcaggcgctgcacaagacgctggtcgagatcgccaccatgccgcatgtccgggcttcgtgagaacgtgtttgttcagcttcaggtttttgccggccggtgagcttacatggctgttgtacatgctgaggatgatggtatggcttgtggcggtgtggcagcgacagcgagtaggggatctagaatttcggcgtcgccttgacgaaggcatacccctccattatacactcacatctggcatcactttttttagaaaaaaaaaacaaaatcttattccagcctctatggctctagagttttagaatcaaccatttcattatatggttcag

SEQ ID NO: 38645 - DNA, 1165 bp, Zea Mays
ttttattccctgttgtttttcaggtcatagttttgtgctgctgatggtggtgttaagtgccggtgggctcgaccttcttataagtttaagtaacccttctatacttcttaatgaggatggtcccttgagctagcatatatttcaaacttatacttttgcaatcactccgataaaataatgtaaaatttttgtaacttgtaaaatttggtaacaagatttccgctgcaaaaatattggtgtgtgtgatttgtgttacttaatcccgcggttctggttgtaagtggtttatccggtgtccttggggcaatcggacggatcctgttaagttatctggtgcacatgcatagcagtctgaggtctttgagacaaggacgggtgcatgtgggcccaataacttgggaggttctgccacagaggcgatcctgagggcccaattgaatggatcagtagcgaagccgatgccttcgaggaaattttaaatggccgtggagacgtctgcgccttctctggcgcgaggggagttgcagctatcttggagaagatagggtgcgaacatgtaaaatctttggcgcaaaacgaagctgccttatctattgaagatacaaaagacccctcggcgcaagcttagttggtggaaagtttttcaccgacatctgggaaaatggcggccaagggatggcccacgaaattataaagaaaagtgaaaaagatactcacgatgctagagaagcaacaaagacagctgaaaagactgcagaacttgaaaggcggatatgtattgcctaattgcttttgactttatgttttatttttgtgacttcggacttatttatgttttatatcgcagccgaactatcttctccctcggatcccttcgagtcactggccgaccccgaagcaaaaaaggaagatgaaattactaagatggccgaagctattatggacgaagctgttactcgactactaaacgaggctgcagaagcagttttaaaagaagaatggctattattgtaaaaacatttggaatattaatgtaatatttgctgaacaaagtgtgtaatattttgtagttttgaatgtaatatataaactgtttgtaatttaattctttacgatgcatgaaactttacgtacatatcgtttttgagccttcggcgaaaaaaca

SEQ ID NO: 38646 - DNA, 1683 bp, Zea Mays
cctactttcccactgagtttccaacagttggctagctttgtggtttgttggagctgtataagttgcaacaaccaaggagggagcgggagagcatgaagcaacgatttccaagcagcagcacgcgttccaagtctgaggcagctgtgcaaacgcgggcatcaagagcaccatcgcccaaagtcaatcctgctactccaggtccaggcccaggggtgaaggccagaccaagatcggctgccgccgccgccgccgccaccaccatggcagcgacgaggaggcagcctgccgtgcctatgcccgtgtggaagtcggagacggcagaggaggaggtggtgcggctgcgcggggaggttgatgccttgcagaaagaggtgcagcgtctgctccgcctcaacgcagagctccggaccaaccatgacgctgcagccagcaacagatcacaacctcccagcaagatttcggcttccggagtagtcgttgcaccgccgccgccgccgcccccgccgccaccgccaccgccaccgcacctaaagcagcgaggagtccgtttcccttcagctccgagcacaagcccggcgagcaaggccactgcgctggtcgacatgtacaactcgctgcaggccagcaacaagccgtcaaagcgcacagacaaaagtagcagccatagcagcatcgttgacgagctgcagaaccgctccaggcacttgctagcgatcaaagcagacgtggaaacaaaagccgagttcatcaactatctcatcgacagaatccacactagtacctacaccggcgtggaacaagtactcacctttgtggactggctggaccaacaactctcgactctgactgatgagtcagccgtcttgaagcacttcaactggcctgagaggaaagccgatgcgcttcgtgaagcggcatctgaataccgacacatcaactgtcttctaacagagatctcttcctccttaagaagagacgaagacgatggtggtagcagtagcactctcaggaagatttcaagcttgctagataaattggagaagagcatgagcagactggtggatctaaggagatcggcgatgccgtcctacaaagagttgaggattccaacgaactggatgcttgattcagggatggcctcaaagatgagattggcatcggtgagtcttgcgaaactgtataccaagacagtcctcaaggaactggatgcaagtgggacgacggggaacaaggctgctctggttgctcagagcgtgcgcttcacctacagagtccaccagtttgctgggggccttgactgcgaagcaatgcatgcctttgaagagctaagaaggcgggttcagttgctctctcaataaccctattcatctctgtcttcttcttattataacagtatatgtcagatcaagtcttgtcggaaatggagagggggaaaatcatgctgtggtttctcatcgtgtatggaaaatctggttatccactgattttatttctctgatccatgtcaagtacatttggagtcggtactggtttctacagtgttttgtctctatagactgcagctgtagcagtccgaacagctgactttaagctgaaacgaacagcctaccagttctctagtagtagtattacaatttacaacaatattttggactgtcaagtgtcaagtacatttgcaggata

SEQ ID NO: 38647 - DNA, 2744 bp, Zea Mays
cagagcacgggcacggccgtccgcaacgcaaggtatccttcggtcggttctcatccccatccccggccacccctatccaccgctgcaccgccacccccaccccgcccacgccagatttcgccagatctcaggccacatgtggacgggctccgccgagagctgaagcaaagagcttggcattatccgtctcgctctccgaggtccaccacgctcgctctccgcttccccagccccaccgccatttttatcccacttgctcggcgctgcccccatttttattcctccccgcgcctcgaaccccaccacggtacccacagctctcgccgctatagctccgccgccgctttgcttgcctcctcagttttcaccctcgcagtcacggacatctggctgtttttacattgggactctgctttttcctgcctgcaacagcgactcctctttccccgcctcttcctcctcccgcttcggattcccaacccccccgctcaggcctcttcccttcacagcaccaacccaaaaccctagccgcaacgcctacgcatggcttcccccgcgcgccccgccgccacctccgtctccggcgccttcggccttccccccgacgcgcgctgctcctacgaccagccccgccgccgcgaggacgagaggatggtgcagacgttcgtggccgcctacgcgcagccgccgccgcatcaggacggcttctacccaaaggaagccgtgatggcggccgtggaggagtgcatgcggaagcaggccgacgcgctgctgcactcgctcgacggcatcgggggcaggctttcgcagctcgagctctactgctacaagctcgagaggtccatcggggaactgcgcagcgacgtcatggactaccacagcgagagcaccaccaacttcagatgcatcgacaagaacctcggacaggtgcgtccgcgcgtgccttctccgtgcatcttggatcccggtgtgcaccacctggcttctggagtactactggtgtgctagtgttctggtaatgtcgccgagtaatggcagacaatgacagtgcgagatttccaatttctcactaatatttggtgtaaaatgacttaactgattatttatttccctgaaagctagtacattcagtggagtcaacttatggttcccggagatgagatttgtatcacttggctctgagactaacagctactagcatctttggtaactagatctacattttggatgccaggtccacaaatccttgcaggttcttcaggataggcaggacttggctgaaactccaaaagaactcagcaaacttcaaatagcacatgaggcaccctctcatcagaagggtccaaaccagcggtggctttgttctgcagcacctggtgcctgtctctttgagcacgcagcatgatcagcagcaattgaaccaggctcctgtgtactatgtgcaaagccaggatcatgctaaatccacagagagcaaggcgttggaacctttggttcaaggtgtgcagccacttgtccacaaccctgaagtcatggctcaagttgagctacctcagaaacctaatcaagcaactgaattgtaccctcaacctcagaatcacagactacagatgcctacccagcaggttgattcgcatacatggcatccccaacagcccatggtgcaacagcaccaatacattatccaacaagtttcacgacacatggctcaacagcagtcctcgtctcctcattctcagagtgctcaagccacacccttgtttcctccattcagctccccgaagcctgctagttctaacactgatccaattacaagaagtatggctgggcaacctccatactcttcatcgcagcagcagcatgaagtcgcccattcattttatggccaaggcaatacaatattggttcctgtagctgatcataatgctcagcatcagcaatcgcaatcagtgcagctacacagccagggcacctgtctacctcaaccaagcaagcccagtcactgcagtgttgcatcctatgctgttcaaggaaatggtcagacctacagctccacatacaagaacccttctaactgccctgcaactgtcgtagctcttctgcctcagcctccagctactgcttctatggcgtatcatcccttgggaccacaggtcgtgcacaatcatccatttggaaatatggttgaaacggctagtgtggtagggtattcacgggaccaaggtgagatactcccagtggtgactgcagtacaacccgtgatggttgataagcttaatgctggcagcaacgtaacatcccctcgtgaatggtcagcatagtggacgatgtgccatcgtacacttcactgcttccacaacttactactgcacatattgcagttggaagctcatcaggtctattttatctggctcctttttttccatcagccagcagattagaatagatccttctacctttttcagctgaaggtcagtatgaaataagaaaagtaggttagctgagtgatcactgttggcatatgtcctcacttttaatgggcatatcttcttgtaaccggttgcgaacttatatgccttatatgaatacatgatgggtttacatcagcttgccagatgtttgctaggtaacattagttttaagcggtagctgctgctttctcacagaatctgtcacgcatgatctagttggttatgttactgtgtatgtcatgaagacattagctatacttgaaaattttgttg

SEQ ID NO: 38648 - DNA, 1274 bp, Zea Mays
acctgcaagttgtcttactccttataggttgccatgtatcaagatcctcgggatgcctgctcagcaatcgctgctgagtcatacaaactatggcttgagcatgaaaacaggacagatgatataacaataatcattgtgcatattcgagacatggaaaatgcaggtcctgcagggagtgacaaagcggactatggtagcatcggagcatcaatagctgggcagacaatacagtcagagatacctgtatttgtacaaccagaagcaagtaacatgaacagatctgctgctaccggaatgcgatcaccgtcttttggctctccaactgaacggagcctctcatgtgttgctccttctcctacggatcctttgttgatacatggcagagtatcagatgcttccaagcctgggcaaagtgagcagcgagctgcatcacaaccaccggtacaaacttggcatcaaatagacggggttactactgagctggagcggtctatgcagcaaagcatccttccaacctcctgctgaaagtagagaatgcgagttgaatgacaaaaagaggcctcgagataacccaccgccatcttggagctactaaccgtaccatggatgcgatgtttgccagcagcaaatctcgtgctgttgctcgtgttttggtagagcacctgctgctgccgacgatgcgaggttcctgatcctgtgtgggatcatctaaccatgggctgagtggaattgagttattctccgtttcatttgtactttgtttacttttcacaagatatagattaattctaagttgatgcctgtcgaggtatcagtatcatttgagacgcaactgtgcattgtcgtccttccacagaattaggatctggaattgaaatgcgagtgccgtacagaacagatcagctgggtggcttttcagatgcaaagaagaatattggatttagcctgtaagctgacctgagagctctgtcaaccctttaaaagtgtgctacgcatatacgataccgtcagcgagctctgccaagaaacaaaggggcctgtttggttcagcttttttctaaccagtttttctgaaaatctggttgtggggagaatctggctgtggggagaatctgagtatcattactattacgtgtgaagtaagataaatttgtttatagtgctcatgatctagaaagtgacgaattcctactattacaacgactctaccgattatgtgtttatgttgattttggatgattttttgtcccaacgaattttatagaagctggctg

SEQ ID NO: 38649 - DNA, 3748 bp, Zea Mays
ccgaaagatcaaacgccccacctaaaacaccattaaagaaacgcgcacagacacaaaaaaaaaactctctccgttcctcttcacaccaaagcacgggaggcgaagaagaggacaaggggcggaaggctgcaaaccctagcgctgggtcgaagcaacgtcgtgcgccagccacaggcgccagacccgcgcgcacctgcattcgcgattcctttaccttcacgccgcggcaactccgcattgtgttgtgccgtgctttgtgccaggacggggatccatggcgttgtcggcgcgacgaggctcgtggtggtagggccgcgcgggtgccggatccgggagacgcggcatggcgctcttccgcaagttcttctaccgcaagccgcccgatgggctccttgagatcaccgaacgcgtctatgtgttcgattcttgcttcacaactgatgtcttcgatgatgataaataccgggattatattggtgacattgttgcacaacttcagagccacttcgctgatgcttcatttatggtcttcaactttcgggatggagacagtcaaagtttactggcgaatatattatcaagttatgatatggtagttatggactaccccagacaatacgagggatgccctctccttacaatagaaatgattcatcattacttgaggtcaggggagagttggctctctctgggccagcaaaatgtcctaataatgcattgtgagcgtggtggctgggctgtacttgcattcatgttagcaggactgctgttgtatagaaagcagttcattggtgagcagaggacactggaaatgatttacaggcaagctcctcatgaactggttcagttgtggtcaccattgaatcctatgccttctcagataagatacttacattacatatctcggaggaacgtgagttcagagtggccacctcaggaccgggcccttactttagactgtgttatactaagaaacattccaggcttcaatgaagagggaggatgtagaccaatattccgtatttatggacaggatcctttacctgctacaaataacacacctaaggtgctgtttgcaacaccaaaaaggagcaaatatgttaggctttacaagaaggcagactgtgaactgattaagattgacatccattgccatattcaaggtgatgttgtccttgaatgcattagcattgatgttgatcaagaacgagaagagatgatgttccgagtcatgttcaatacagcctttatcagatctaacattctgatgttaaaccgtgatgaaatcgatatattgtgggatgccaaagatcgattcccgaaggaattcagagctgaggttcttctttcagaaatggacactgccaatcagttaggtcccatggaggtggcaggtataggagagaaggggggtttaccagttgaagcatttgcaaaggttcaagagatgttcagcaatgtggactggctagatccaactggggatgctgcagtccagcttttccagcgacttacttcatcagaaaatattcagctgaggcaaggattcttgtccccaagtaagaaagaagcagaatcgttagagcttggttcaatctctccaatagacaagcattttgacaatgttcaacaagaaccaagcaaagttgaacaccccacagtctatgtgaacaaactggaaaatgttggccaagagagattggtcttgttggagcaaaccactaattctgaagttaaaactggaatttctgttgtccaagaaaatcctggctctctagttcacaaggttgacagtaacgcaaaacagtcaatttcactggaaaaggctgttccctctaccatgaaatctattgatccagttcttaaggatcaaaatgctaaacttgatgagcaacatggttcaggccaacactcttttcccactataattatgtcacagcgatttccaatttctagttcatgccctgctctttctggctactccagtcctagattactttcagcttgtccaagatttaatagtgcaccttcagcccttggaattacagctctgttggaagaccatgctggaagtgctgagaatcgttgtggttcaactactttgacctttgacacaacaggtactcctgttgtaacaaagggtatgccactgctacgccctccaccatcgccactagatttgctggtatcagattctactatgatgtcagaagcaaaaggctcatcccaacctaccctcaacaattcagagagacaattgacatttcagtcacttggaactactactccggccacaaatcatcagaaatcctcaactactgtcacaattgaattgttgccaacttctgctccacccccacccccactgcccccaccatcatcagttttcagttctaggatttatcatctgcctccatctccaacttctttcagatctccagcgccagctgcaccacaacctccacctgtgccacccccacctccacctatgcctaggccttttcctgtaaggtctcatgcaccacaaccgctgaccccccaaccacctgctttgagttcatctcttatactgtcagggacacctcaatccccaccttccccaccgccttctaggtgctctctcagtaaacctcctgcaccaccaccaccaccaccaccacctccactacttgcttctacttcatctaccattagacctgctgcatcacatctgcctctatttgcatctacttcatctcctgttaggcctgctgcaccccctccaccgcctgccccaacatcatcacctattagagcttcagcattgcctccacctccaccacctggaacgagctccagtccacgtccaccccctccaccatgctattcatcaaaacaatcatccagccccatgggcaaatcgatgccatcacctcctgttccgccaccaccctcccatggaggacgcaatggagcttctggtaacattgtacccccgccagcaccccctggcagtaatgctaaactgtttggtcctcaggggcgtggacctgcacctccttcaggtccaatgtcaaagagctttcaatctggccaggctgtgttgagaaggtctaatttgaagccacttcattgggtgaaagtaacaagagcaatgcatggtagtctgtgggcggagtcacagaagcctgacgaaactttaaaagctcctgtgtttgatatgtcagaattagaaaatcttttctcagctgcactgccaagttcagattcaaggcgttcagataagtcaggcagtcgtgcatctgggtcgaaaccagagaaaattcatcttattgatcttcgccgggctaacaattgtggaatcatgcttaccaaagtcaaaatgccactgcctgacctaatgagtgcaattctggctctggatgatactgttctggatgctgaccaggtggagaaccttattaagttcactccaactaaagatgaaattgaacttctaaagggttacaaaggagacaagcaagttcttggagaatgtgagcagttctttatggagcttatgaaattaccacgtgtagaatctaagctgagagttttctcatttaagattcaattccgttcccaggtttctgaccttaagcggaacctgaacattgttaattcttcagcagaagagatacgaggttcagtcaagttgaaaaggattatgcagacaattctttctctcggaaatgcattgaaccaaggcactgctagaggagttccataa

SEQ ID NO: 38650 - DNA, 1341 bp, Zea Mays
tccgaacagctaatgccaccgctttccttatcttgggcgttggacggacggggcgagcgagcgactcgagcgtaccgccgccgccatggtggcgctcgcctcactctcatctctctgtccctgcggcatcgcccgccgccgcgctgcgtcagccacttcatccaccgccttttccatctcgtgctgcgccgtcgcgaccccgtccttctcagggaaaggaccccaggaatctagaacaccccgaagaaggctgaggaaaactgagggtgctaccaagagcctggaagattcggtcaagcgaaagatggagcagttctatgaaggggccgatggtccacctctgcgagtgctccctattggcggtcttggggaaatcggcatgaattgcatgcttgtggggaattatgatcgatatatcttgattgatgctggggttatgttcccagattatgatgagtttggtgtgcaaaagattataccagacaccacgttcatcaagaaatggagccacaaaattgaagctgttatcatcacgcatggccatgaagatcacatcggtgcgttgccttgggtcattccagcactcgattcaacaacaccgatttttgcatcatctttcaccatggagctaataaagaagcgtttgaaggagtttgggatcttcctctcatccaggcttaaggttttaagaattaaaaagagatttcaggctggaccttttgaagttgaacccatccgtgtaactcattcaattcctgactgttgtggcttagtgcttcgctgtggtgatgggataattttccatactggtgactggaaaattgatgaatcaccagtggatggaaaaaaatttgaccgacaagcattggaggagctctccaaagaaggtgttactcttatgatgagtgactcaacaaatgttctttcccctggaagatcaatcagcgaatctgttgttgctggttcattgctgcgacatatttcggaagcaaaaggaagagtaattacgacacaatttgcttcaaacatacatcgaattgggagcatcaaagctgctgcagatttaactggtcgaaaaatggtgtttgttggaatgtcactcaggacataccttgaagctgctttcaaggatggaaaggcaccactggatccatcaaccttggtgaccaagatgaccaaagtattgaaaccttttctcagatctttgtcgagagatgcagcagcctgactccaccatgaacggaacctgctagaagggcagggtggcttgactttgtccagcctgagctccctcaaaatccatgtccaaacctccctggaaagcacacaggtggagaggag

SEQ ID NO: 38651 - DNA, 2046 bp, Zea Mays
ttggtatgcaacgggcagtcatcagagcaacggatagaagacagagctttgcaggaagattagcggctaaggctacccactgttagctcggaaccagctggattcgcatttttctttccagtttctgccgtgtcagcctcgtccgcccctatctatcccctatatagccgtgcaggtcgtcttcttcctcctctccactcctctcgtctccgtctccatctccgtctccgtctccacaccgtgccgtagctgctgctgtccgtgtccctcgcctcgaagaagacaactccaacactgttgctgcgtgactgctgaattcgctccacacacgcgcgaacccagcaaggcaagaacacgaacgagagagagagagagacagggagggatcatccatccatcagaccatcacccatggacaaccttaaggagcggggccacgatgccgcgggcgccaacagcggcgtctggatgacggtgccggcgttcggggactgggacacgaagaacggcgcgctgccggactactccatggacttctccaagatccgcgagacgcgcaagcagaacaagaaggagctctcccgcgccagcctcggcggcgacgacgacctcttcgcccacgcccacgcccacgcccagaagccgcaggccaacagcgcccagcccaagctcggccgcccctgccccgccgccgaccgccgaccgctccacgcccgcgaccactccccaacggtaaatctccgtgtcccggcccgtttcgttccagagtcactaaaatgaacttgacccatcttttctttcttcatttcttttgcgtggaaattcgggatattacatctcaaattcgtctcgtcttagttggattttacaagcgcggggggtaataattagtgtcggggattgaacttgctaattgcgagtgaccgcaagtacaaaagtgttaccttagtccggacaagccagattagcaaagctgacagcggagtaaaaaaaaactgtaactggcgaaaccagtttttttttagtgtagcattacaacacgcagtaaaatcgcctcgccgcttcagtaggcagcatcacatactgctgtccttctgaagcagattcttgagatggcataatggttctggaggtttagtttagaaaactagcgcatatgggttttccagtaaatggacgcatcaagccaagaaccacccattccaactccaccattgcattattatattttgtcgtaactgataggcaaggacgaatcttcctgtttttttcttaatcatactgtccatgtctacacgccttcagaaagctgcgcggatgtattgacgtggcactgtccgtaggaggatcttagggaaactgatgatgaggtttagccagttgaggggataagcaactgtccaggctgttgctgtgatatatcacaaatagcagaatggctgaagaagcatacttttaactgccaacaactacagaacactttgcatcagttcattgggttctccagaatgccttttcttacaccgttgcttgtgagttgtgatgatggagaatcagaacctgatttcggtcatagacccacgatccatgtacgtggttactaatcagaaatttgttggtgcagggagggaagaagttcctgagctacttccagtgctgtatcaaggcctgaagaggagctgccgcaatgctatgtctgtgtgcctgtgctttgtcgcagcagaacactcgtgagcaattaggtcccggctttgttaagtatccaaaaaatgtgcaatgtatttgccctgatggtcactcgtttgacctgttagcctgtatgaagaacaagtcaggttatggggccaggcagccgtctatctgtacatggcaccatcgatttgtttgcgactggtggtataatgttgccctgtaatcattgtattggatgggaatttgcaccgcctccgtatttttgaacgatcacaaggggcatggttcgtttggattggttttgtgattacttatgatgggaaaatacggaaacaacaaatggcccctggaaca

SEQ ID NO: 38652 - DNA, 3304 bp, Zea Mays
gacaggttggtcagggtcagcccgcaggagagtgcgcgctgcgactctatccacttcccccggagaccggaggcaaaaatctcccctcccccaaaatcctaggcgtggtgaaatcctaaacccgctccgcgggcggcgatggcgctcgtgtccaccgccaccgtcgcgtcgtcgtcctaccactgcgacccccacctcttcccaggggccaggaggagctggcgcgagccgaggtggagccgcggcggcgcgggcgcgaggctagcggtgctgcagcagcgggcggggggcgccgcggcggccgcggcgaggagggaggagctggtgccctcggggaatgcgaggaactcgtacgaggtggagtcactgatcgaccggctgagcaacctgccgccgcggggctccatcgcgcgctgccttgagacagcgcggcaccggctgacgctgcaggacttcgcggcggtgtaccgcgagttctcccgccgcggggactggcagcgctcgctccggctcttcaagtacatgcagcgccagtcgtggtgccgccccgacgagcacatacacgccatcgtcatcggcgtgctcgggcgccagggccccgcgctgctcgacaagtgcctcgaggtgttccacgacctccccgccgagtcgcgcactgcgctctcctatacctccctcatcgccgcctacgcgcgcaacgcgctgcacgaggaggcccgcgcgctgctcgaccagatgaaggccacgggggtcgcgcccaccgccgccacctacaacaccgtgctcgccgcctgcgcccgcgccaccgacccacccgtccccttcgacatgctcctcggcctgttcgctgagatgcggcacgacgcgtccccctccgtgcgccccgaccttaccacctacaacaccctccttgccgccgccgccgtgcgctctctggctgatcagtctgaaatgctgctgcacactatgcttgaggccggcgtctccccggacactgtttcttatcgtcacattgtggatgcctttgccagtgccggcaacctctcccgtgcagccgagctattctccgaaatggcagccacggggcacacggcggatgcctctgcttatttgggactcatggaagcacacacgcgtgttggcgccactgctgatgcggtggctgtgctgcgacagatgcaggctgatggatgtgcgccaacagctgccacttaccgtgtcctgctcgatctttatggaaggcaggggcggtttgatggagtgcgccaactcttccgtgagatgagaactgctgtaccgccagacacggccacatataatgtgcttttccgtgtattcggagatggtggcttcttcaaggaggtggtggagctcttccatgatatgcttaaaactggggtacagcctgatatggtgacctgcgaaaatgtcatggctgcctgtggtcacggtggcctccatggggatgcaagagaagttcttgaatatatgaccagagaaggaatggtgcctactgcagatgcctacactggcctggttgaggcccttggccacgcagctatgtatgaggaagcctatgttgctttcaacatgatgactgaaatcggtagcttgccaactcttgagacctacaatgctcttgcatttgcatatgctaggggtgggctcttccaggaggctgaggccatcttttctcggatgagtaacaatgctggcattcagaaaagcaaagactcatttgacgccctcatcgaagcatattgccagggctcccgattggatgatgcagtgaaggcgtacatggagatgcgtaaatccaggtttaatccagatgagcggtcccttgagggagtacttaatgcctactgcatagcaggggtcatagatgagagtaaagaacagtttgaagaacttcaatctagtgtgactatgcccagcgttattgcctattgcatgatgctgtcactatatgccaggaatgacaggtggactgacgcgtacgatctgctggaagaaatgaaaacaaatcgtgctagtagtacacatcaagtaattgcttccctaatcaaaggggaatatgatgatagctccaactggcaaatggttgaatatgtcctcgaaaacagtaccatggaaggctgtgactatagtttccgattctttaatgctctccttggtgtgctttggtggtttggtcagaagggccgagctgctagagttctggatcaagcagtaaaatttgggctgttccctgagttatatcgtgacaccaaactggtttggtcactagatgtacataggatgtcgatgggtggagcactggtggctgtgtcagtatggctcaataagctttatgacagactagtagaagatgaagatcttccacagttagcatctgttgttttttttttttcgatatccaggagaggagaaatggagaaaagcacagttacaagaggactgccaatcgccaaagtcgtctactcctttctaaacgatacactatcagcgtccttccattttccaaaatggaacaagggacgaatcatatgcttgaagtcccaactaaaaaggctgcagtcggccgtagactcctcaaatgggtctcttgcagctggttttgtcgacatgacaaactcccgtctgccggctcccggttccaagatatacacaagcgaggaccaattggataatggttcacgccatttgcctgacgaaccgttggcggaggaaaaggagtcggagcttctcgcactgtgagctgctgcccttcgcatctacagttgtgatgccattggtctgaacaaggggagacgagatgcaggataccaagcgtattttcggagttcgtccattcagatctccgtctcggtctcagttatccagggtgggtgctacatactgcagattcacatcttgcctggaatttatttggctggggcttgacagtcaatgctgaacttgagttgcatttcaggcaggattttagctcgttgtagggagaacgagcttatggatgttgttgactgtgtatggcatccttgaggctccgccggggacccgaaacattcatcaaattcagctcggagccccgcctgcctcacccggtcgcccccgacctggcgaccaaagccgtgcctactgcctaccgagcccctcatctcggcgaccgtctctctcttcctcgctctcgccgacggcagccccgaccaataacaacgtttttgcatttgtttttattggccacttcggtcgaaccaatatctttttgcttgatagttctattatattgacaggaaatggt

SEQ ID NO: 38653 - DNA, 739 bp, Zea Mays
ggtcaccgccaacaagccaccgcatgttcttgtagaagaaatctgagagccatcaacattgctatgcgggtgagagaaaggaggaagtcacctcgtgtctacgccatcgacaagcattggagtttggtctggacagcatccgggaaaccaggaattcgtcgccggagtacatcaccgccgcggtgctcctttgtttcgtggacaaggactgctactactcatgggccgattgacaagtcgcagaagcgttgaaaactcaaggtgggcaacttattatccctgtcactctgcttcatgttgctgcatttgctcttgggtactggttatcgagattatctacctttggggaatcaacctctaggaccatctcaattgaatgtgggatgcagagttctgcacttggatttttacttgctcaaaagcagtttacaaatgcactcgttgttgttacttcagctgtcagcgttgtgcgcatgcatggctcttggaaggagtgtccttgcagtttactggagaaacaaatggcttccagcgaatgacaaaaatgatttcaaggagtaaagaaactcaacacatgagctcctagttttccatgttccaatactttaggcgtagataggaaggcctgcactattgttgattatcattaggggttccgctttgcctacatttattgtgtactatagtatttcatacccggtacgttcataaataaatcaatttctgcagttgtcctagg

SEQ ID NO: 38654 - DNA, 340 bp, Zea Mays
ttttgcattaaggcctagctcaggggttatcctgggaaagatggcttttacctgcaagaatattttcattgagagcgtggtggaatcttactgtaaagttctctttgatgctcttttcatcctaaggaatataaacaatcctaagggtggaagtacttaaatcgggacttgggctaggaacaggtgatgttctacccaggttgattaaggattgaatgcgtatgtaggcttgctgatcaaggactatcttaactagccacatgccctggatatgggacagggtaagctttgccttgggcagactaataccagaataagataacacgcaatgggagtggag

SEQ ID NO: 38655 - DNA, 689 bp, Zea Mays
atgaaatgttgtattcatgtataaagatgtcaagtttgtatctatatcagattagttgtgatatatatgtgagtggtaaatttagatatgaaagtttgttggtgtgttgctgcctctgatcacgagctatgaataactctatatgtacatggctcactttcgtgaagttagagaaatgtcttccgcctagattactgttttagacttcaaagagtttgattgaacttaaaccttgtttaatgtcctatagttctagccaacacgacatggcgtggattgaacttgaatcgacgagctatgtgccagttatcgctcttctaaacacatcaaccagtgcaccaaaactagcttctttcttccttgggagatagatggaaattgtggtcatcaacagctctagcacacaccgagagtgcattgaactgggcaaggattagttcctgtataatggcacattggcactactgtaatgcataaggatttgttctcacatttgaagtacaggtaatgtaaattttgtttgtaatttttatgtacgaataattgtgagttctttatcttttacatttgccttaatattattgtacatgtttgaaacatgtttgaacaactatatatctcaattaaatagagtttacctatgtgatatatagaatctgtagcaacgcatgggcacatgactagtttat

SEQ ID NO: 38656 - DNA, 982 bp, Zea Mays
ctcgtctcgggtggaaaaaaaaaagagcaaacataatgcttcaccgccattacccgaggaggccccgcaggcgcagcagatcggaggatgagcgttgttgctggtgcttctcctgtgactgcgattatatcgagaaacccgagcagaagtgcgggttctgggcagtctgcgtcttcgtctactccctcgtcgactacttcatcccaatcagcctggtctcggtcctcctctggctcgtcctccgccccagcaaccttcggccgcgggtggacgccgccgtcgccgtcagcttcagcctcgacaacgcgacctcgtcgctcgactacgacttcgccgtggacctgcgcttccgcaacctgcaccggcacctcgacgtccggtacctggacctggtagcgctggcgtcgtacggcggggaacggctcggccccagcgccgacgtgctgcccgtcttcgtccagcgccccatggcgtccaacgctgttcgcgccagcttccagggcagcgccgctccgctgtccccggcagcagccgagctgttcgccatggaggccgccaacggctccttcggcgtcctcgtgaaggtcgcctcgacgttcatgtacaagttcccgttccagaagacggtctactacctcgaccatgagtgctacatccgtttcccggcgcccaacggcggggtggtgacgccggggacgctttgcagcgccacagcgcggaaataattgagagtttcaaccaaacagcaaaatccacaaggaatctatcacttaaccacacggcgatgatggattactcgccgccgcccgtcgtcgaggacgacgacagccccaagctaggccccaacttcacgatgcgccagtttaatcatcatccttgtactgtttgcatccaactcttgtttgagtatatgttcatgtactctatcgatcgatctgtaagactgtaatccttaataataataaagtgaaatggaagttct

SEQ ID NO: 38657 - DNA, 3157 bp, Zea Mays
gcacgatttaacacggcataatagagggcactattaatctgataaaaggatcgcgccactatatgagtagagagaatccaacgatagaaaaaaagtatcgaaccgcatttatgaatccagttctaggtggtgtcactcatacccatgctgacagtgtacaccgaatatatggcctagacacaaacacggtatggaacatgccagaccagaccagacccgtgccggtccagcatcggtggtgttcgagtgcgatgcgagacccctgccgcactccaaatttggtcacgccgaccgtcgtcctctccgctctacctgttcattctctcttctgttccctcctccctcccagtcccagctggcagcagcacagcagacagagagagtgagctttgccgacaccacactgcatcccattccctcggctgtcgctgatggatgatagatagagctgcggaggagcagggtgagggggaggtgctgccgcccacggtgatcatctctatggccgtgtagaggagcactgcagccggaagagattattcagagagagagagagagagagagagagagagagagagagagagagagagaagggaagcatgaagccaagaaccgcgacactggccgccggcctcctccagctcgtcgcgcttgcggcggtggcggaagccgacaccgacgccggcgacgttgccgccctggggaacctctacagctcctggaacagcccggcgcgcctcgccggctggtccgccagcggcggcgacccctgcggcgccgcgtggacgggcgtctcctgctcgggctccgccgtcacctcaatcaagctttctggtatggagctgaacggcactcttggctatcagttgtcaagcctgcaggctctgaaaacgatggacttgagcaacaactacttgcacgattcaattccttaccagctgccatcaaaccttacctatctgaacctggcgaaaaacaacttctctggtaatcttccgtactctatatccaacctggtctcgcttgagtacctcaacctcagccacaactcgttgtttcaggaaatcggagaactgtttggaagcctcagttcactctcagaactagacatatctttcaacaacctcacggggaatcttcctttctcaatgggctccctgtcaaaactttctagcctttatatgcaaaacaatcagctgtcgggcacagttgatgtcatcagcaacataagccttgcgacactagatattgcaagcaacaatttcagcggcatgataccccaagagttcagctcgatcccaaacctaatagttgcaggaaactcatttgtcaatatgcctgcctccccgccacaagctctgacgccacctccgaatccacgtggccggccagacgatcgtcggggaccaaccagcgctccaactgtcccggagactcccattgacccggacgacaagaagatgcaaacgggacctcttgtagggatagctgttggctcaatagctgctgcctcgtgcgttcttttcgcgctggtgttgtgcctccacaacgcacggaaaaaacccgatgatgggagcagtgaagcgaaagcgtctagcagggaagtcatggacagtagccatgacaacgctgctgtggcaacttcagacctccaactgatccagcctgctggaaagatgactccggacgacagagcgcatggtccaaacggttgtaccgccaaaaggccaaagcagcaggttactgtgacgacagtgagttcctacacagttgctgctctccaagtcgctacgaacagcttctgccaagactctctcctaggcgagggctcgcttgggcgtgtttacaaggctgtttttcctaacgggaaggtacttgctgtgaagaagatagacagcgcttcgctgtctctgtacgaagaagacaactttctcgcggttgtgtcgaacgtgtcccggctcaggcatccaaacatcgtgccccttgcaggctactgcgtggagcacgggcagaggctccttgcgtacgagtacgtcgggaacggaacgctgcatgacatgctgcacttctctgacgacgacgggatgacgatgccgggcaagactactaggctcgcatggaacacccgcgcgaggatagcgctaggcaccgcgcgcgctctagagtacctgcatgaggtgtgcctgcccccggtggtgcacagggccttcaagtcatcaaacatcctgctcgacgacgagtacagcccgcgtctgtccgactgtgggctcgctgctctgtcgccgaaccctgagactgagagggaggctttcgctggagtggttggctccttcggatacagcgcccctgagttcgccatgtcagggacgtacactgccaagagtgacgtgtacagtttcggggtagtgatgctggagctgttgaccggccgcaagccgctagacagctccagggagaggtcggaacagtctcttgtgagatgggcgaccccgcagctccacgacatcgatctgctcgccaagatggtcgatcctgcactggatgggctgtaccctgccaagtccctctcccgtttcgccgacataatcgccatctgcgtccagtcggagccggagttccggccgccgatgtccgaagtcgtgcagcagctggtgcgcctgatgcagcgggcgagcatcgtgaggcgacaatcggacgaccagctgggctactcgtacagggttcccgagcgcgacggcggcgaccaaagctggcgtacactcctactcctacacaaagcgctgcacagtttatatatattcataaacaaaagagcgagcaaaagaaaagaaaagcagttggatatggatggatccttcacgttttgttaaaaagtcacccgtaaacgacatatatgtatagggtttgcagcgtactgggacgtttcttcgtgagctgcgagtgtcatgtatagtgtgcgctcttgccagtggtagatatataggataggagaaaaaaaaacgtgtcttcttttgttggtgtgttcagttcttcgaccatacacgccagccgcagacggtgacctctgcagccttgctttgcggcgagaggcaaggcagttttctccggtttgcgatgcggcaattcagcgggcgccttgtggcttatcgcatggaac

SEQ ID NO: 38658 - DNA, 3203 bp, Zea Mays
ccgaaatccgaaacctcccgcggtctcgcccccacccctcacaccaccgcaccaccggccaccccctgccccgatgcagcccgacggcggcggcgcgattcgcgtgctgaacgtggcggagaagccgtcggtggcgaaggcagtggctgagatcctgtcgcgccgctcggcgcagtcgcgtgcgggccggtcccagtacaaccgcattttcgagttcaactacgccatcaatggccgcgcctgccacatgctcgtcacctccgtcacgggccacctcatggaactcgaattcgatgaccgcttccgccgctggcactcctgcgaccccgccgaacttttccacgccccagtccgcaagtccgtgccccaggacaagcaggccataaaacaaactttggaagaagaagctaggagatgccagtggctggtgctatggcttgattgtgatagagagggtgagaacatagcatatgaagtgatcgatgtttgtacacgtgccaacagtcatcttaacatttggagggctcgcttctcagctttgattgatagggagatacatgaatctgtgcaacatcttggcaggcccaacaagctctttgcagatgctgtggatgcaagacaggaaattgaccttcgcattggtgcctccttcacaaggtttcaaaccatgctgttaaaggatgcatttgtaattgatgtgactggggatgagagaagtttggttctgagctatggtccttgtcagtttccaaccctaggattcattgttgagcgtttctgggagattcaagctcatgaacctgaagagttctggacaataaattgtactcatacttcagatgaaggcactgcatcttttggttggatacgtggtcatttgtttgattattcatgtgctattagtatctatgaaatgtgtgtttcagaaccaatggcaacagtacaaaatgttaggaatcaagagaagctaaaataccccccatatccactaagtacagtggagcttcagaaacgtgcttctaggtactttagaatgagttcagagcacacaatgaaggtctaagaatatcttgtcttatagttttaatttcccttccagttccactatctaataatggacatacctcagtagcttcgttgtttgcttgttttttctttggtggtctcttccctttcaacaccaggtggctgaagaactttatcaagctggattcattagttatccgaggacagaaactgataacttctccccaaacactgacctgcatgcaatcgtacgtgaacaagtgaatcatccagtttggggagcatatgctcagcgacttctaaatcctgaagcaagactttggaggaatcccagtaatggtggtcatgatgacaaggcacatcctcctattcatccaaccaaattttcagaagagattgtatgagtttgttgtccgacatttccttgcatgttgctctcaaccggccgttggagctgaaacaactgtggaaattgacatagctggtgaacagtttaatgcatcagggcgtgtcatacttgcttttgttccgacaactttaacacttgattctggagtgactcggccaccgcctcttctggctgaagccgaccttcttagctgcaggaattggcactgatgcaaccatgcatgatcacataaaaaagttgcttgaccgttgttatgcaaccaaagatgaaaacacacgtttctccccgacaaatcttggtgaggcattggtgatgggttatgatgaaatggggtgagttgactcttaaagttgctgcacttactgaatatataaaggatgatctggttgctttgctcaaacactactttttaggtatgagctttggaagccttatttaagatcaatgatggaagctgatatgaaatcagttagcgtgggtactaagagtaaatcagaagtacttgagagttgtttgcagcagatgaaggcctgttttcttgacgcaagggtgaagaaagcaaaactccttgatgcaatggggacattctttgcaaggtctaataggcctataaatgaaactcaaaatccagtagaggttgtgaggccttgtggtgcatgcaatggatctgaaatgttgcttaagcgaagggcgagtggtgaatttatggttgggtgccgaagttatccacaatgtagaaacgtggtatggctcccaggatctctttcagaagcggctgtaactaatcaagtttgtcctatctgcgcaccaggccctgtttataagattcaattcaagttccgtcggagggatattccaccaaatttcgatgttgatcacctaggttgtgttggtggttgtgatgatatcctcaaagaccttatggagataagtaggtttggaagtcgcagccaggctgcaacaccagcaagaggaccaacaccaaatggtgtgggtcaggggactccaagacaggatttacatactatttttcgtccggcaagccagcttaataatgataacccatcggttatgcattctcaaggtttccgttcaacccatacccaaaatccaagtaatgcatcagatgcaggtcaagtgctgtgcacctcatgtggagcgctttgcatatcacgaattgctaatacagaggctaacagggggaggaggttctacaaatgtcaagatcctggctgtggcttcttcaaatgggaagacgaagtggacaatggtacggggagaggccgccgtgggcgcggcagcagcaggcaggcgtctgcgtctgcatctgcaggacggagaggcggaggccggagaggcagaggccgtaacgctgacggcgggatgttcgtttcagcgacgggcgacaccgtgctcggctgctgctttaactgcggcgatccttcccacttcgcaaacgcctgcccgaaccggagatagttatcagggagctgctcgctatgcgtgtacagagactggcagcgtccgccaaacgatgaagccttcggatggttttcgtgtactgaggtgcatataagtgcacctgacaagctcattttctagacaattactaatatttttaaacaaaatgcagctattaggctgatgctagttcagcaaatctgacggcacttatttacaaaagttagggcgcgaaaaactgacaaaggaagagatgcaaacacgagctgatctactaaggtttcgataacaagtttctactcatcgt

SEQ ID NO: 38659 - DNA, 1996 bp, Zea Mays
cggcagccagccagccagccagcttctgctggaacaagaacagtacaggtacagcctcctccctccacagcagcgacaccaatggcatcgtggtcgtggacctctgttcactgcagcagctaccccctaccggggccgtcggcacgcttcacgccttctctggtctccgcaacaacaccggcgctcaggcggacgagggcgagggggcagctgcagcgatgcctctgttcccagtacgccggcgaacgccagccgccgccgccgccaccgccacagccggagccggactcgccgcagcagctggagcgcctcttctccaacctcaaccagaccaccatgaagcacgagccagggagcgtcaccagcgccgtcttccttgtggctggcacaacggttggagcaggcatccttgcaatccctgcagtcacacaagaagctgggttcttggcctcggcagtcatatgcatcctctgctggtcatacatggtaatagaatgtcactgactgggtaaattatcaaacccggcgtgttaaaaggacggtttgatgattgacccaagtgcctgtttcgttgagtcgtttacagtgagacagcttatgattgttggcgtcgcatttccaggtcgtcacggggctgttggttgctgaagtaaacgtcaataccatgtgtgagctaggatctggtggcgtctcactggtctcgatggctatgcgcactcttgggacatttggagtgagaacatcttgcttatcctatttatttatacattatgcacttcttgtcgcatacgtggcacgctcttcaaatatcataacaaactcattgggcattccaatatgggagagtgctaccctgttttctctagctttcggaggggtatgttactttggaagccagcgattgattggtgcagtaaatggagttctggtagtcggcatcctagcatccttcacttctcttgttgtagtggcaagtggaaacctacagtggagttctcttcttgaagcgaattttgctgctgctccacaaagtataccaataattgctctttcatttgtataccagaatgtggttcctgttctctgtacaaatttggagggagacctgtcaaaaaacagctattgtggcgggtactgccatacccctggctctgttcctagtatgggatggagtaatcttggggacacttccagaccttgcagggagcagcactgtttctgaccccttggaactacttagatcgagtaatgggatagtggggcctattgttgaggcgttctcatttctcgctatagccacatcatacattggatttgttctaggaatctcggacttccttgcagacttgcttaaactaccaagtggccagaacaaaccgctgccatacgtattgactctgtttcctccacttgttctgtcactgcttgacccggagatatttttcaaggcattggactttgcaggaacttatggagttctagtgctgtttggagtttttcctgccgctatgtcttggtcagagagatattcggatgagttggaagctccagtaccccctatagtccccggagggaaatttactctctcggctgtcatgggaggtgcattgcttgtgattgttccagagttaatcaaggatgtaatgcaactacaaggactacactgacaatcggtgcaagtgaaaggacatataacagttacagtaaaacggtccttgagatttttgttgcagtaacaagtacatgtagcaaaagcaaaggcaaaactcgaaagcaatcaagtgcagagattgcagtttcatcgagcatcgacgttggagttgaattgttttttatgagattagcacggggttcagaacttcggttaaatttctgcaaccgaaagaaaaatctaaaattccgtattacactaatatatgtgctttgttgtgaatatataactttgtaattatattttctattgtttatgtcacataaaattcttcttttcattaga

SEQ ID NO: 38660 - DNA, 868 bp, Zea Mays
atgatgcggcacaggaactcgctgtggaacctctcccgcctggttgcaacagtacaaaatagtggagatgaagcttctagcacaacaacgagaccttcaggcaaagattcctgatatagagaagtgtttggatattgtttcaacattacaagctaaaaatgatttgggcacttatagctgattttgaattatccgaggggatatactcctgtgcgaaaatcgaggatactgactcagtgtgcctgtggttgggtgcaaatgtgatgctggagtactcttgcgatgaggccaatgccctcttgaagaaaaacttggaaaatgctaaggccagcttagaagtccttgttgctgatcttcagttcttgcgagaccagcaaaccatcactcaggttacaattgctcgggtattcaactgggatgtacaccaccggagaagcaaacaggctgtaaaggaaccttaatcagttagatcacgaggtcaaccaatgtgattgggacaaattttttcgtaccttttggtacctctggcagattagtccatcatagcgagctctttgtttgttgatggtttctttgctgtgtaacaatgtatcggtttattctctttaatggtgtgggaacattagtagaagatggaacattttactgcctttttccccactggatgtccactggatcacgtcgcaaaatattttttttttcatgattcatgcataattcctgctttccaaagggcttcctttatgtttactgcattacagtccaggagatagacggtccattgtcatgttgagcaaagatagaagaaaatcgacaacaggtgaggtgactcgtttttacatatgtagggctttactgcttgacactt

SEQ ID NO: 38661 - DNA, 723 bp, Zea Mays
actggatccagtgtaggcgagaacatagaacagcgaactgcgagccaataaaacaatgtcacgtgaccatgagtgggagagagaaagacaatttccttctccaggaaacacacacacacgggatgggagtcatgggcggttccttctttttctaatctcacgcatgtgctgtaacaggaccacacatgcagccaacgaaatgtggacacatggccaagatggaagagacacaaatgcagatttcttcctctctattgcatgccggcaaaagcggatcgtgcaacatcacatatggcggggcggggcttcgccgacgggggaggtagggcggtggtgtcggaactcgccggagcggcatggccggactgcgcgggcggcttgctggggctggcagagatcactgaccgagaatggagcagcaaggcggcgtgcaggggagagtagagctcagccaatgcccagccatgacatgctgcgcacgacgaaaatgaagagggggggggggggtagacacagaccttggggcgagctcgaacgaaggtggctcggcggggctctgggcgcgagagttcgacagcatgcgacgaatgacggcgtgcgcggcggggactcctccgcacggcgcagcagcgtgcttagcgcatgccggacggggtggctccgagcgctggctgcgcgggcgtcgagggcagggggcgcaagtgcggtggttgttttggagag

SEQ ID NO: 38662 - DNA, 1378 bp, Zea Mays
gtacacgtttgttttgctgggagcctaggtctgcctgactgccccctactagtgctgtgcgaatagccgcttgtcgactatcgtcgtcccgactgccgtcgcccttcggccatcgcctagggcccaggcacccagctgcgagccactggccgcccggcgcggcgatgccccgttccggggccccgccgatcgccgtgggcccttggcggcttggcgccctctgctgctccatcgtgtggcttgtgcagcactgtagtagagccacgctggcggttgccgccgtgcagttagcgcctgtcgcggtgtcaccccgtccgccatcaaggtcgaggctcatcccaggaggcagccgtccgccgatttgtgaagttgaagttgagatttgaaaatgaagaggaagatcaatgctaccactgatttgagagcttttttagcaagagctgctgcaaaaaagaaagatagtgctgctccatcttctaatgaaagagagatgcaattggtgatattccaaggacagactgaaactaataatgcaacgcccgcagaacgagagagttgagcctgaacctccaataatagaagatgttgaagacaatgatgattttgaatcagtgcacttgaatgggacaacatcgagtgaggataatgatagtgatgataatgatatttatggcattgagcatgatcctggattcaggactccattctcaagctattttattaataaccaagatgcggttagaagggcttatattgcattggggccatgtcaaccaaatataaagaaggatgattttccccaacatgaatgtggaggcataagtcgcttcctaccaaagtggttttccgagtttaattggcttgagtatagtatggataaagatgttgtattgttttgtttgctatctgttcaaagataacaacaaattctctggtggagatgctttcgttaatgaaggtttagaaattggaatgttaaagctagattgcttaagcatgttggtgttgttgatagtgctcattgtgaagctgaggagaaatataatttatttttgacacctaaagcatcaatttgtgagtcagttgcctcaaatacttcattgtataaggatcaatacctagctcgtttgacaggcaattcttcttgcaagtcaaggatgaggacattatcactcaatttcaaagcttaaaggatcgaaaggttgtcttgcaatatgttgttggacaaatatggtgggcggtttcctgaggaggaggagggggaggaggagtaggacggcggacgatgcagagcaggcagcgcagcagcaggaggcagagcaggcagcgcagcagcagccggcgcctcaggacgacgacgaccagcaggacgacgacg

SEQ ID NO: 38663 - DNA, 2427 bp, Zea Mays
aactcctcctccgcttccgtctcattcgtccccataatcaaggagtctgctctttctaatatgacccaccgcaaacatcgcgagcacaaactcgattggtgctatctcaacgacgattcgtacacagacatttttcacaacgaggttaaacagcttgtggataaaatcttctcctctgatggccacaaccacgcatgtgtagtcacttgcggttccactagcaaaacccaccttgttatagggtccgatcatcaaccgggcttgctcactatggccatggagcgaatatttgactatgccaaacctattagggcaactgtcagtgtttcctcttatcatgtgcttcaagacagccatgtctttgatcttttggatcctaagaacaacgaggtccttgtgcgagaggatgctgatggaaggactcatctgaagggcctctctatggttgaaatcaattcaattcaggagtttcagaatttgtgttatgatagtgacaaacaccaaaatcgcaccaaagtttccaaagctaaaggacacaatggttttattatttttatttctaaatctgatcagaatggcaaagaatcctctgtatcaaaaatgcattttcttgagttggcagaccatatcaatgataagcaaaagagccatggtgaaagatttgttcaacaaaattccaagaagtccttatatgccgtgatggatgttgtgcaagctctaaacagccaccagagcttcataccctatagaaaaagcaaaataacccatattttgcaagactctttatccaagacaggtggtgctttattaatagcatgtttggatgaagtctcatgccaagatgcaatctctactctaagcttggcttcacgctcaagccaagtggtcaatgaacaacggtacaacttatccttaatcacaaaaggttgttcaaagtcaaatgtaaagctttcagtgaacaataagaatttgtcaagatcgttattgtcttctatccaacaacaaagtcccgtgctggagaagccatacaaaacccaagttaataacattgcagtaaaagcaacaagatctctcaatgccaataagagatctgaaacaagcacacattcagcaaaaaagactgtaaacttagtctctgcttcgattaatttgaaacactctggtgctaagtctattctaagggaaaggaacttctttattccaactactaattcatcaaaggaagataagaaaacttttgtgacaactgcggtaaggaaacatgaggtttgtatacttagcatcttatatctacacttgccattgaccattagtgaacatatttatattagagttttctatatcatttcataggcggtagatacatcaatttgcatggaaatttgagccctcccaccaattgagacactaactttttttattgccactgcaagcatatgctagtattacaactaactattgcaatatattagagcgatatgcaggagaatcacaatggcacaaaaaatattgtagtatcatctgaaatgcaagtagtaccttgcagcatgaaagagatagtatcaagtgacatgaaagaagaggatcattcctctccaggttttcttgcagagaacttatttgctgacttgggctttacatgttcatctaatgcagctgataaaacaactgaggaaaatccagccaccgttctccaatcttctccgaagataagcgaccaattgagaaagatatcaaattcactgaagcttcttaattctatggcacctagtatagtaaaacagaaaacagatatagttcgtccacaatcctttgacttagttgaagcagaaccaaaaactcctgaggtcaacttaaaactttggcatgctcaagatgcacaagaatcacttaaggctcgtagcacagggattaagaaatctctagctaaggagtgtttgttgtttctaaacagcgctaataaggagcagttaaaaagtttaaagggtattggagagaaaagggcaaactatatacttgagcttcgagaggagtcaccattgaaagagattgatgatcttaaaagcataattgggatgagcaaaagagagatcgacaagatgatgtcaaagttgatttcggactcggagatgaacgagtaagggttgtattgatctcttcccacttaggaaaggaggagaaggaatgtcttctctacgtataggttttatacaggaatgtcttgtctacgtaacgtataagttttgtttttaaaaaaagaatataatcgggtggaaggctttcaggtttgctgtattagacaaaaacctatcagttaccctgtcatattgtgagtgtgcatattgtcatattgttagaactgtgagaacaagatatgtttatttggctccgccaatattgcttagcggcaaagtatctgtatcgtca

SEQ ID NO: 38664 - DNA, 3211 bp, Zea Mays
tcacagttcagtccaacagagccgtggctccttctcgctcgctctctttctctcgcgactcccaccgccgcctggcgccgccacactcggccgcactgctcgcctgcccgttcggttgcgccgctcacccgcccgctcagctgcgtcgtcgctgaccgccccgctcggacactccacgtccatcccccgtcggtccgtcgcggcgccgccacaactgctttgcgaatcggcgacctgttgccggcgacaggacgcgggaaggcagccagccatccagcctcttcctacgtctgaatctgagagacgttggctgagatccatctatcttgccgtttcctggcggtgagcaacgctagcgcgcatgtcgtcgcggctgtgcgtgaagaacctgcccaagggcgccgacgagaggcggctgcgggatgtgttctcgcggaagggcgaggtcaccgacgccaaggtcatccgaacaaaggatggcaagagtcggcagtttgcattcattggttacagaaccaatgaagaggcagatgaggcactcaagtatttcaacaatacatacatcgacacttgtaagatcacctgcgaggttgcccgaaaaattggtgaccctgatgctcctcgcccttggagccgccattctttaaagaagtctgaatatggtagtaaagacaagaataatgctggagctgttgatgcaccacctaaaggttccaacgcacaaggaacatcggctcatgctagtggttctaaaggcagtgtagctaatgatcccaagtttctagagttccttgaagctatgcagccccgttctaaagccaagatgtgggcaaatgatacagctgctactcttgacactgctgcaaaagatagtgtagtagccgctaaagaatctaagggacctctaaaaaatgttctgacctctgagaacgattcatcttctgaagacacttctgatgagaaagtggcaaatgatttgtcttccgaaaatgcttcggagcagctaaagacagagaataaacaagacaagaatatgactgatgcagatttcttcaagagtaaagtcaagaaaaattggtcagattctgaatctgatgacgaaggttctgctcaccagtcaaataccaccactgatgatgaagactcgtcagatgaatcacaagattcagataaccagttggcagatactaagggcgatcctgacaagagaaacattgtggacaaggacactcttgtggagaatactgacttgcaagagccggaggatcttgacaacaaagagagtgaagatcttgatggcagaccaagaggaactgaaattcatgaagatcaagaaagggcagatgaaaacggtgctccaattactgatgaaaagaagttggccctggagactggtcgtctatatatctgcaaccttccatatgcaaccagcgaagatgatttagtggagctgtgccgccaatatggtgatgtggaacaggcacatattgttgtcaataaagccacaaagatctcaactggtagaggctatgtgctttttagccttccggactcagcagtcagggcacttgatgaactagataactcaagctttcagggacgagtgttacgtgttaaggctgctaaaccgctaaataagttggagtcttttcatgaaactgctgtggagaaagtaagtctcaagcagaaaaggttggaacaaaagaaagcttctgagatcagtggggatacaagagcatggaacagcttttatatgcgtcaagatactgttgttgaaaacattgcaaggaagaatggtatcagtaagagtgagttactcgatagagaagcagatgatcttgctgttcgtattgctcttggtgagacacacgtcattgcagagactaagaaatttctatcaaggtctggagttaatgttgctgcattggaagaacatgcttctaaacgaaatgagaagttcaaaagaagcaattatgtgatattagtaaagaacttgccatttaattctactgaggaagaactcgcgacactgtttcagaaacatggtagtttggataaaatcattctacctccaacgagagtgtttgccttgtctttgttgaagcaactgaagcccaatacgcattcaaaaaactactatatacacgatataaggatactcctctgtatttggagtgggcacctgaaaacatattgtctcctacctcagcaccggtggatgaggaagtaaaaaacgaagttggcgagcgtattcttactaaagctaatatagatcaaactgtagaaggagtaagcgctgaagagattgatccagatagagtggagtcacgatctgtgtttgtcaagaacttaaatttcaagacaacagatgaatcattgaagcagcatttcagtacaaagctaaagagtggcagtcttaaaagtgcaacggtgaagaagcatgttaagaagggcaagaatgtttcaatgggatttggttttgttgagtttgactctgttgaaactgctaccggtgtgtgcaaggatctacagggaacggttctggatggacatgctttgatcttgcaactgtgtcatgtgaagaaagatggtcaagcggcaaagaagaatggcaaggataaaagttcaacaaaactgctcgtgcgaaatgtagcatttgaagcaactgagaaggacttgaggcagttatttagtccgtttggccagatcaaaagcctcaggttgcctatgaagtttggtagccacagaggttttgcgtttgtggaatacgtcacaaaacaagaggcccagaacgctctacaagccctcgcaagcactcatctctatggtcgacacctggtgattgagcgagcaaaggaaggagagactctcgaagaactgcgggagagaactgccgcacagtttgtggacgaaagcagcggtttccagagcttgtccagtaagaggaaacggagcattctcgtggacgaaggctccgttaaagtttcaagaatagcagagtgattatcttgagcgagcacctgaaatttttgaccaatgttatgcaatagtaccagttcgttagggggggaaatgggttatcttaggttgtttaatgtttgtgtgctgttttagagctgaggaaaagaaatgctgaaaagaatctcacatcttaatgcaagagctgtctaaatgcaagcatatttctacagcctaagacaccaaaaagaaa

SEQ ID NO: 38665 - DNA, 337 bp, Zea Mays
ataggttggcagaggggtggccacgacgttgagcggatgcatgacggagctcacacttggacgagcaatcccagtgcccccgctgctctttagcgcccaatcccggtacgtgcacatgcggtgtaccactgagatcatcttcgaccgatacgggcaggctcgacaacgatgaaggcgtggtccaacggaggcggctcggtctccttccttctcggttttgcccgacgttgttcctcaggtgcatggctaggtgatggctttgaattggtgtaggaagggaaggggtatggctccagttctatacgctcggcaagggaaccccatgccaacgatcgcg

SEQ ID NO: 38666 - DNA, 1836 bp, Zea Mays
ttttctttgcttcagtcgctgagaaatccccagaaggaaaatgtgctcagtgcatgatgaacatcgctgtttcacaccaacctcccttttattgagaacatggagaagaggatccaaggtgctacaaaactgctggatggtagtttggagcgctgctttgtggatggtctggaacaccgtgatgctaaagttatatacaactgtttgcgtgcttatgctgcaattgacaatacatcatcagccgaagagctttttcgtacaacagtggtgtctccattgatccagaaaatagttcctcaaaactatgcaagagctgttgctggggcatcatctgatgagctagaagaggattatcaacagataaaggcatgcgtagaaaaagattgcaaatttatattggaaatatcttcgtcagaaaactctggattgcatgtttttgattttctgggtaattcaatactcaaagaagtcctttctgcaatccagaaaggcaagcctggggccttttctcctggaaagcctaaagaattcttgaggaactacaaagtgagcttaggatttcttgattttcttgaaggctactgcttctccaagtctgctgtaacgaagttacgctatgagcctgcttacacagatttcatgcgacagtggaatgttggtgtctacttttcgttgcggaaattgcgggtggccttgattctactcttacaaatacctttagtcctactggattgaatgaggctcaacagaaaccgttgctcttgaaacaaagtattaagctcttagaaagtttggattcatgttggagtgatgaggttcttgtattctctcactgcgataaattcctccgtctgtccttgcagcttatttcaagatgctgaatgggcactgtctattcctatagaagatttcatatatataatgcatgatgtgcatgctgtaattggtgagctttcagaatcaggcagctttattggacatgtgaatcagtcactagggtcatgccccattgaagtatttaatcttgtgaaaggaagtatattgcaagctgctgaacctttaaaggagctgttgcctgcaataatggatgtcatgattggaatcatagttaagaagtctaatgaggacctgaagcacctgaaaggaataacagcgacatataggatgacgagtaaacttccagtcaggcattctccatatgtatcagggattttacatccactgaaggtgtttcttgaaggggaccgtatgcactatctatcagaagatgataaaactaagttgtgtcgtgggtctgcaaataagattactgcaacctactatgacttggtctctgaagttgtcactgtggcaaggaaaaccgagtcttcattgcagagactgcgccaaggtgcacaaaggcgagtaggagctagtacagatgcctcagatagcatcatatctgatacagacaagatctgtatgcagctatttcttgatattcaggagtacgcacggaaccttcgtgcgataggaatagacgcgagagagattgattcctacagagctctatggcagtgtgttgccccaaaggacaggcacgagaacatccagttttgatgtaaagaacgctgtcagtatatataaaataaaattgtcaacccgtagatatctcagtatgtgaaaatgatacggttggcactggttcatccagtcttcaacgacatgacaccctgtcagtttgtgaaacaaggacgtgtttggtttgatgaatgaggtggtacatttctctcttacttcttatttttatatttggtttttagaatagtacgagttgattcatcaccatttcattcc

SEQ ID NO: 38667 - DNA, 2532 bp, Zea Mays
gtcgtggcacgtactagatagatagggcgtaagcgctcaaaagaaacgcgcgcacgcggacgaggagaggaccataaaaggtcgaggagtgagtggagatctcgccatccatttccatccgactatccgaggaggatcggtgacggtgggcggcgcgtcagcttcccccgacgcgtgcgtgcgtgcggccgtgcgcccgcgcgttcgccgtctgcccgtctccggccgtcgtcgtccggcggaagattcgcacgcacgccatgccgttcggttgaatttctcgggaaggagaagctgcccgttcgatgtcgacgtcggcgtcgacgccggggagagggcatcggatatggattcgggcgcacgcgcatcccgacgtgtggtggcttcgttcgtctccaagcccgagtcagcgggagattccatcttcaaacattgcattgcacagcgcgcactacgctaggaaccttcaaaagtgcgaacattgcggaaatatagttccgaggaagcttgtggatcaacactacgatgaaaaccatgctccgatgatttgctcactctgcaaacacacagtagaatgtgggtttgggatcttcatacaggcgtacaatgcccccaaaggatgctcgagtgccaatactgtcagtttgaactgcctgaagtcgatctttttgaacatcaggatgtgtggaaatcgaacagaatattgtcaaagttgcaggaagtatatcagacttcgtgaatggattggacatgaactccagttccatacgattttaaatgctgcatcacaactaagatgctagcaagggggtggagaacctggtgatcatcggctctggaccagccggttacaccgctgccatctacgccgcccgggcgaacctgaagcctgtcgtgtttgaagggtgccagatggggggtgtccccggcgggcagctgatgaccaccaccgaggtggagaatttccctggcttcccggacggtataaccgggcctgatctcatggacagaatgcgcaagcaagcggaacgctggggcgcagagctttaccaagaggatgttgagtttgtgaatgtaaagagcagcccgtttgttattcgtagcagcgaccgtgaggtgaaatgtcatagtctaattattgcaactggagctacggctaagcgcctccgtctgcctcgtgaagatgaattttggagtagaggcatcagcgcatgtgcaatatgtgatggagcttcaccacttttcaagggccaggttcttgcagttgttgggggtggtgatgtagctacagaggaagcagtatatttgacaaaatatgctcgacatgttcatttactagttagaaaggatcagctacgggcttccaaagctatgcaggacaggttgattatggcgaatgtttcagagtactcaacaaccccaacataacagtacatttcaatacagaagccatggatgttgttagcaatgacaaagggcagatgtctggcgttcatctgaagagaagagatacaggagaagaatcagttcttactgtgaaaggtttattttatggcataggacatactccaaacagtcagctgttgcagggccaaatcgaacttgatagtgctggctatattttagttaaagagggctcagccaaaacttcagttgatggtgtattcgctgctggtgatgttcaggatcatgaatggagacaagctattactgcagctggatctggatgcatagctgctttgtcagttgaaagatacttagttgccaatgatcttcttgtcgaatttcaccagcctgttcaagaagaaacaaagaaggatattacagataaagatgttcaaatgggctttgacatttctcacagaaaacacaagggacagtatgcactccgcaaactgtaccatgagagtccacgactcatttgtgttctatacacttctcccacatgtggtccttgcagaaccttaaaaccaattttgagcaaggtcatagacgagtacggcgagtttgttcatcttgttgaaattgacatcgaggaggatcctgaaatagcagaagctgcaggcatcatgggaacaccttgtgttcaattttttaagaacaaagaaatgctcaggactgtatcgggtgtgaaaaggaagaaggaatatcgggagtttatcgaggcgaacaaatgagttgagcacgcagtggaccccctcaaggttttttgaagtcagtagttcttttggcgctattttgacgccaccccgtcccccggtggccaatttttcatcagattttaagacgagcctggtctagtgccatgccaaaggaaactagccgatccctcatattggattatacagctcaaaatatattctttgctgtgtgtgtacaacatacatggagttgaccccccaccccctgctgatcaatcatcattgcggcattgccttgacactgccaatgtgcaaactatttccacggattagcatacattaatctgaagtatatatatactcggcaatgctgaatccattttgatcaagg

SEQ ID NO: 38668 - DNA, 2508 bp, Zea Mays
ctaaccctaaactcccaaccttcgcctctcctcccgttgtcagccgccgtgcctgttctctctgcctttctaaaagtgcggcgactggttgggctgccgccgactgccggggccttcgccgacctcttcgccggcgaagaggtcccatcaggagaaggagtagatcgtcgacccagaaccctcgctgatggcgactttcgcgaaacctgagaacgcgctgaagagagccgaagaattaatccatgttggtcaaaagcagtcagccctgcaggctttacatgatctcattacctcgaaaaggtacaggtcatggcagaagcctctcgaaaagatcatgatgaagtatgtagaactctgtgttgacctgaggaaaggcagatttgcaaaagatggtcttattcagtataggattgtctgccagcaagtaaacgtgtcatccttggaggatgtcataaagcacttcatgcagctttcaaatgagaaagctgaacaagctaagagtcaggtcgaagcactggaagatgctctggatgtcgaagatcttgaagcagacaagcgtcccgaggacctcatgctcagttttgtcagtggggagaaaggaaaggaccgatcagataaagaggttgtaactccatggtttaagttcctctgggagacatacaggactgttctagagatactaaggaacaattcaaagcttgaagcgttatatgctatgactgctcatagggcttttcaattctgtaaacagtataagagaacaactgaattccgtaggttgtgtgagatcatcagaaatcatcttgctaatctcaacaaatatcgcgatcaaagagatcgtcctgatctgactgcacctgaaagtttacaactgtatcttgatacacgtgttgagcagcttaaagttgctacagaactctccctttggcaggaagccttccgatcggtggaagatatccatggtttgatgaccatggtgaagaaaatgccaaaaccatctatcttggtggtctattatgcaaagttgactgagatcttctggatatcggacagccacttatatcatgcgtatgcgtggctcaagcttttcaacttgcagaagagctacaataaaaacttgtctcagaaggatctacagttaatagcatcttctgttttacttgctgcactatccgtgtcaccttatgacaaaaaatatggtgcatttgagacagagaatgagaaagagcgcaacatgcgtctgtccaaccttgttaacttttcgcttgataacaagcgtgaaaacagggaaatgccttcaagaccatatcttctatcagagttggcctccaaaggagtcctttcatgtgcttcccaagaagtgcgagatttgtacaaccttttggaacatgagtttctacctctggatcttgcatcaaaagtgcagccacttcttttgaagatttcaaagattggagggaagctttcatcagcttcttctgttcctgaggtcaagttatctcagtacatttcagcattggagaagctgacaacattgagagtgctacaacaggcctcttgtatttttaaatccataaagattgatatgctctcaagaatgcatgaaagggagacagtaaggaagttgatgttttatctgaacctggaggaacagcggattgaaatgcttcgtgaggaagaggaagctagaaaacgtgaagcggaagagaggaggaagagagaggaggctgaaaggaaagctaaacttgatgccatcgctgaaaagcagcgattgagagagatagagctggaggagaaggcaaaggcaacaagggagaagctcttaaagggatccgaggctgtgcgcgctccagattctgcacctgttgcacagccacctcgagagtcagcagcagcgcctgcagctgctgcggcggcggctgctcctgctcctgctcctagtaaatatattcccaagtttaaacgcggtggtgatagcagcagcatcccttctggcagccgcgatgaagatcgctggggttcacgtggtccgctcaggcaagatggtcctcctgcacgactggatgcaccctcatcacggcaagatactgatcgctggcgtggatcaagatttccctctaactcaacgtcctcttcatcaacctggagccgttcacggaactgatcctatgctgcaggacttttttctagcccatgtgtcgacctccgtgcacaatgtctaatcgtacctttccaggcactgcactccatgcatattgtcgctgttttgtacttttgtagtaatactctacaatccatgattattgtccctgtttgttagtaatgctgttttatctgtgcatgaaacactctatacctacatatagccaagaattgcaggactgtatgcatgtaaaacttgcaagattatcaatttttatgagctataaaattaatatctgtgggcaccaagagttgtaaatttaaatgtctatgaaccataaaataaatcttttaatgatattgcag

SEQ ID NO: 38669 - DNA, 4233 bp, Zea Mays
gaaaaagagggaaacaaggagcgtttcgttttaactcccgaggcaacgcaccaactagccagcccacgcagctcagcaccacccctctctctctctctctctctctctctctctgcgggaagacggcccttggtcttcgtgagctgctgctcgcgttgtcggggaggcgccgccacgccgctcgcctcgcctagcgccgcgtccggattccggagcaacaactcctaggcaggtagtagtagtagcctagtaggttgtgaacgacccggccggccggcggcgcggtgcagcgtccccgctgctccatgcccgagggccaccagtgaagctcccgcgtggccacgcgacgcgaccatgaagcagtccccggccagctctggtgtcacggccgcgcccgtcgtccctgcccccgcgcccgcggccgcctccaccggcgcggcgccgccatgcgaaggggagcggaaggcgccggcgatcaacgccgacctgtggtacgcctgcgcgggcccgctcgtgtctctgccgccggtgggcagcctcgtcgtctacttcccgcagggccacagcgagcaggttgcagcttctatgcaaaaggacatcgatgcacatgtgccaagctacccaaatcttccctcaaagctgatatgtcttcttcacagtgttactttgcacgctgacccggatactgacgaggtgtacgcgcagatgactcttcagccagtgaacacgtatgggaaagaggctttacagctatcggagcttgcactgaaacatgcaaggccacagatggagttcttctgcaagacgcttactgcaagtgatacgagtacacatggaggcttctctgtgcctcgtcgtgctgcggagaagatattacctccactggacttcggtatgcagcctccggctcaagaacttcaagccagggacatacatgacaatgtgtggacatttcgccatatatttcgaggtcagccgaaaagacacttactaaccactgggtggagtctttttgtgggcggcaagagactatttgctggtgattctgtcatttttgttagggacgaaaggcagcaacttctactgggaatcagacgggctagccggcaacccactaatatatcttcttcagtactttcaagtgacagtatgcacataggggtgcttgctgcagcagcccatgctgctgccaacaatagcccatttaccatattttacaatcctagggctagccctactgagtttgttatcccatttgccaaattccagaaggcactgtatagtaaccaaatatctttaggaatgcgattccggatgatgtttgagaccgaggaattagggatgagaaggtacatgggtacaataactgggataactgatctagatcctgtaagatggaaaaactcccagtggcgcaacttacaggttggttgggatgaatctgccgcaggggaaaggagaaacagagtttcaatgtgggagattgaaccaattgctgctcctttcttcatatgcccccagcctttctttggcgtaaagcgccctaggcaaatagatgacgagtcatcagagatggaaaaccttttcaagagggcaatgccttggcttggtgaggagatatgcataaaggacgctcagacccataacaccacaatgcctggtttgagcttggttcaatggatgaacatgaacaggccgcagagctccacattaaatacaggcatacagtcagagtatctgcgatctctaagtaaccctgccatgcaaaaccttggtgcggctgagctcgcaaggcagctatatgtccagaaccatctcctgcaacaaaacagtgtacagcttaatgcttccaagctccctcagcaagtgcaacctataaatgagcttgctaagggatcattgtcttgtaatcaacttgacgtcatcatcaatcaacaagaactgaagcaagaagttggcaatcagcagaggcaacagcagcccgttaaccaagcaattcctttaagtcaggctcaaaccaatcttgtccaggcccaggtaattatccagaatcagatgcaacagcagcagcaacaacagcagcagtctccaactaggtgccagaagggaaccagtgtgcaacagctgcttctttcacagcaacagcaggaccagaattttcagctgcagcaacaacagcagcttttacttcagcaactgcagcagcagaatcagcagcagcagcaacaacagcagaatcagcagcagctaaacaagttgccagctcaacttgtgaatctggctggtcaacaggctcagttgtctgaccaggaacttcagctgcagctattacagaaactacagcagcagtcacttgtatcacagccaacagttacactctcgccgttacaggtaatacaggaacaacagaagttacttttggacatgcagcagctatcaagctctcattcacttgcccagcagcggatcctgcctcaacaagatagcgatgtttcgctgcaagcatcacaggcgccaccaccaatgaagcaagaacagcagaagccttcacagaaacaatttgtgcttgcagatgtgtcagatgttgtctatccacagatttcatcaaccaacgttttgtccaaagctggaacccaactgatgactccaggtgctacacaatctgtactaacggaggaaattccttcttgctcaacatcaccttctacagccaccggaaatcatttggcatacccaatcattggcaggaacgagcattgcaaggtcaccattgagaaagttcctcaatcgtcttctctgatgtcaattccaacagctggtgaagctgtaacaactccaataatggcgaaggaattgtcaaagttgaaccataatctgaaggagaatgtaaccacatcaaagtcacccattgttgggactggacatgagaatcttttgaacattgtaccgtcaacagacaacctggaaacagcttcatcagcaacttctttatggcctacccaaacagatggacttttgcatcaaggttttcctactaacttcaatcaacaacaaatgttcaaagatgcacttccagatgtggaaattcaagaagtggatccgactaacaatgccttctttgggatcaacagtgatggtccattgggctttcctatggaaaccgaaggcttgttggtaagtgcaattaatcctgtgaagtgtcagcctaatttgtcaactgacgttgagatcaattaccgaatacaaaaggatgcccaacaagagatctcaacctccatggtttcacagtcattcggtcagtctgatatagcttttaactcaattgattctgcaatcaacgatggtgtcatgttgaatagaaattcttgcccccctgcacctccgcagagaatgcggacattcacaaaggtctacaagcgtggagctgtaggccgatccattgacataggcaggttctccggatatgaagaattgaagcatgctgtggcccgcatgtttggtatagagggccaacttgaggaccgacagagaataggatggaagttagtctacacggatcatgaggatgacgtcctacttcttggtgacgacccatgggaggagtttgtgaattgtgtgaagtgcattaggatcctatccccccaagaagtgcagcagatgagcttagatggtgatttggggaacaatgtcctctccaaccaggcttgcagcagctcagatggtgggaatgcctggaagcctcgccgcgaccagaaccctggtaacccttccatcgggttctacgaccaatttgagtgacctgatcacggaaattcgagatgagaattatagctgcaaaaagcaaccagtgtccagccatctacagaattatcgccacggaaagggcaagaagaatgaaacttacctagagctgttgctgagtcgaaacatcagacagatggttaggcaaaacctgaacttcagacagagtaggcagatctgaagataaagtattttgattgagagtattttgtaattctgtattgaactgccgctggggtttgcttgagacccatgcggcactatatgagtctctctcagttcagaaaatactgaagcagatctaagaggtcctactgattattactatatgtttgatgtgaatggccccatttacaaatggacagtctgtccgtctccacttgtaggtgtaatatgttcaacaacaaccaggttttataacactggcattac

SEQ ID NO: 38670 - DNA, 2309 bp, Zea Mays
ttcccgccatcccccagcccaacacggtgccgcctccctcccgcaccccggccttctctgcctcccactcactcgacgcctccgccgccgccgccgccgggatgaagaaccccgacttcactgcagacaaagcgctcgccaaggacttcctgtccaacttcgtcggccctcacggcgaccccaagtacctgaacatcctgcaagatgtcgccaacaggaagatacgcgcggtccagatcgagctggacgacctgtttcatcacaaggacgtcgatgaggagttcctgcagcgtgtcactgagaacacgcggcgctacgtcggcatcttcgcggaggccatggacgagatcatgccggagcccactgaggcgtacaccgtcgacgaggaccgggacatcctgatgacgcagcgtgtggacgagggggtggacggcggcgcggacggcacggacccgctgcagagaatgccaccagatatcaaacggttctttgaggtttacatcaagacattctcaaaggcaactccactcaccattagacaagtaaaggcatccaacattgggcagcttgtgaaaatatctgggattgttactcgctgctcggatgtgaagcccttgatgcaggttgctgtttatacatgtgaagaatgtggctttgagatataccaggaagtgactgctagagtgtttatgcccctcattgaatgtccatctcaacgatgcaagctgaacaaagcaaaggggaatctaatccttcaattgcgtgcatcgaagtttttgaaatttcaggaggtgaagcttcaagagttagcagagcatgtacccaagggccacattcctcgttctctgactgttcatctaagaggagagctgactagaaaggattagttgctgatacttacttggaagcaatgtctgtcacacatttcaagaaaaaatatgaggagtatgatctcaaaggtgatgaacaagaacaaattgacagattggctgaggacggtgatatctacagtaagttggcaaggtccttggcacctgaaatatttggccatgaagacgtcaaaaaagcactgctgttactacttgttggtgcaccccataggaagctcgcagatggcatgaagatcagaggcgacctgcatatatgcatgatgggagatcctggtgttgcaaagagtcaacttctgaagcatattatcaatgttgcaccaagaggagtgtacaccactggacgtgggagcagtggtgttggtcttaccgctgccgtccaaaaggatccagtaacaaatgagtttgtcctcgagggtggagcactggtactggcagatatgggcatttgtgctatagatgagtttgacaagatggaagagtcagaccggacagcaatccatgaggtaatggagcagcaaacagttagcattgccaaggctggcatcaccacctctctcaatgcgagaactgcaattctggctgctgcaaatccagcatggggaaggtacgacatgaggaggactccagcagaaaatataaatctacctccggcactcctgtcccgtttcgacctgctttggttgatcctggatcgcgcggacatggaaaccgatctcgaaatggcgaggcacattgttcatgttcatcaaaaccttgaatcgccggcgctggggttcacaccactcgagccatctgtgctcagggcatacatatctgcagctagaagagtgattccttccgttcctagagagctcgaggaatacattgcgactgcatattccagcatccgccaagaggaggcgaagtcgaacgcgccaacctcctacacaaccatcaggacgcttctgagcatactccgtatctctatcgccttggcaaggcttaggttctcagaaaccgtggcccagagcgacgtcgacgaagcactgcggctgatgcagatgtccaagtactcgttgtactcggacgaccgccagcggtctggcctcgatgcgatatctgacatatattccatcctgagagacgaggccgcgaggacgagcagcatggacgtgagatatgctcatgctcttaacttgatctccagaaagggatacagcgaggctcaattgaaggagtgcttggaggaatacgcttccctgaatgtgtggcagatccatccgagcacctttgacatccacttcatcgatgcctgatgctgaagccggcaccgatcaccaaacaaatttcatcatgagtttgtggcttcatgatttgtgacgggagggatgaacaccgtcgactgaagcctaacaggatctaaaagttttagcccagttc

SEQ ID NO: 38671 - DNA, 625 bp, Zea Mays
ccacaatgtaaattttcttactttcttcattttggtcgctggtgccaaccttccgaatctgaaagtgttggtgacttggtgtattctattgcaagggagatgcaaccactctcagaatggttattggattaatgtacacaattgtgatgtttgtcggcatcaacaattgttcaaatgcgcagccaattgtttcaattgagaggatggtcttctacagagagagggctgctgctgggatgtactctgcaatgccatatgtcgttgctcaggccatttaagtacgcgtatttggtttgaaagctggtggaggcaagatcacataggctctgaaatccatctgttggaggagcaaggccattcaagtagaggaacacttgctctggtgctcttttattattttcagatgctaatttagactttaactcactaagctgcagctttagactctgtcctgaagcagttaattcctcgatttgcatgagccagtgttgtcactctatctgtctcaatttacatgagcaagtgttgtcactctatctgtcgtaagaagaattattgattacaattactgtatgtaacaattgaaaatgccctcaataagctaaatgtctataatatgtgtttg

SEQ ID NO: 38672 - DNA, 362 bp, Zea Mays
cacaaatttgattatcaatacaaaataattgaaggttgagataaacaaccactaccgttcatcgcgtgctccatggatgtagacaagtcgtcaatgcgggaaaacaagggagctgcaattggatctgattcaacgtcgacacaggacacatcctcccatttcagaacggagttctccttcacctcgcatttgcattccatcctccaggtctaggttgaggctgatcattgcggtgtggttgaggctgtagattcaaagcagccgtctgtctcgactgggtttcaaagctctagccatcgactctgccgccgcctcctacacttgtgatgcctctcgcgccgccactctccattccttcctcg

SEQ ID NO: 38673 - DNA, 2328 bp, Zea Mays
ctcattctttcgcagtctgatgatatatatggctagctgtcaggacggctcagctccagctttgcggccctccagctctccccagttcaagttcaatattggcgagcatgcgagtttgccctcttccgtcgtcgtcatcatcatcgtcctcgcgatcccggcgtccctgtttcggcctacgcctcccgtagacaacagttgcgccctgctctccggcaagctatggccaagctgagctgcttccccgctctgctccccggcaagaggaagaagaagacacgcaagatcaccgatgctatcaaggccagcggcaacgagtgccccaaggtgaagccggtcgaagtcgaactcatcgacccgacgcttggtgcaggcgtcgtccaggacgtcgtccccgccgagctctcggtccccgtggaggaccgcaacaataaggaagcggctgatcaactggtgttggtgaaggagagcgatctgtcagatttcgacttcagcttccacgcggccatgaagcccgtccggtccgacagtgacgtggcactggacacctcggccgacgctgcggtggcggacacatcgccgaagctgaagcggtcttgctccaacatcgagactaagcgaccaggctcgcgttccgcgcccgagatgccggcccggtcgcgctcctacggcgatctgggcaacctggtcgccggcctcgccctggacgcgacggcgaccccgcacggcgcgccggaggccagtccggcgtccgtgaagacgtcgcgcactgccgaccgcgtgatgctgaagaagcggtcgtccagccaggtgctgccctcgcgcagccggaagctctggtggcggctcttcctctggagccaccgcaacctgcacatgccgcggtcggcgcgcacggcccaccgatcgttctcgcctggccgccacgacgggtacacctcggacacgttcgaggagggcccggccgccgaccgcaagaacaagacggtcatggtcgacgagtcgccgccagcagcgtctgtgcccaaccagtgggtcgccttctgcgccgagagctccatccacgaccgcgtcagcgcgtgggtcagcagcatcgaaagcgagcctccgttcgatatcgccgaggaggatgacgacaactacgacggagaggacgatgaggagaatggcgagtgtgcggcgtcgcagccgcgccatctcgagctcggggagccatcgtccgggaagggcggaaacagcaaatccaagcgctgcgcaacgacggccgacgaggtcgtccaggccaacaccgtggtgcagtccctgaacgccttctcgtcggtggcgcacatctcagggatgggcctcaaggtggtgccgatgatcgcgcccttctcaaccctccgggccgtcaacctctccagcaacctcatcgttcatatctcccctggatcgctgcccaagggcctccactctcttgatctgtccaggaacaagattgccagcgtcgagggcctccgggagctcacaaagctacgcgtgctcaacctcagctacaacaggatttcgcggattgggcatggtctgtcgaactgcacggccatccgggagctgtacctggcgggcaacaagatcagcgacgtggagggtctgcaccggctgctgaagctggcggtgctggacctgagcttcaacaagattacgacggccaaggcgctggggcagctggtggccaactaccactccctcctggcgctcaacctcgtaggcaacccggtgcaggccaacatcggcgacgacgccctgcgccgggcggtcacgggcctcctcccgagccttgcctacctcaacaagcagcccgtgaagccgcagcgcatcgcgcgggaggtggccacggacagcatcgcgcgcgccgcgctcagcggctcggacagccggagcatccggaagaggacgtcgcggcggctcacgcagagcccccgctcgtcgtcgttgaccagggcccgtggcggcggcggcggcggttcacccacaccaagaaacacctctcgtcgtcgttgaccagaagaaccaactgcgtgattcgcgttgctctttggagacgggagacggtggcgtgactgcgtgcaggcagactcagacgacaccatgattcggcacggcgccagcatgatatgagacaaaccaagtatataaagcaagtatgatgtgagagaattgcgatgcaacacataatgtacatacttgttagggagatattgcttagattaatactacgaccgatgcatctttgtacctgaaaatatcaatttgagcctggttgaagatgaacatccatccaacatcgca

SEQ ID NO: 38674 - DNA, 1113 bp, Zea Mays
tcatgattgacttgctaatccgacgacgacgacgagcgagcgcattaacaacgggaatagattccctgcctccggatatgattatcgccgtgtccccagcggtcgacaacaagcgagcatagattattagtaatcgcgattaggaggagctaaaaactaaacaacttcccacaggcgcggcagacgcagagggcagagcacactcgccgtcgccgtcgccgtcgccatgcctgcccctatcagcgtctattcctcctcgtcctcctgctctttaactaccctggtacgacgggtcgggatgcggagcggataacgcgcgtcggccgtgcaggcaggcaggcagccaaggaggcgaagcggccgccgtgccgaggaaacagacgcccagccacccagacggccgcgccggttctgagatgctggagcgatgtcagattccaagggcggcgccggcggcatgggcatgaacatggtgaccacggtgatggccttctcggtcagcgccttcttcgtgctcttcgtcttcaccaggctgctctgcgcgcgcctccacctgtccagggccgccgccgccgcccagggctacaacgtggagcgcgggacccacggcctggagccgtccgtggtgacgaccttccccaccgtcaagctcggcgacggcggccagcaaccgccgccggtgcaggaggaatcgcagtgcaccgtgtgcctggaggagtacgaggccaaggacgtggtgcgcgtgctgcccgcctgcggccacgccttccacgcgacctgcatcgacgcctggctgaggcagcaccccacctgccccgtctgccgcgcctccctgcgcgccaggaacggctgccgcgccacgccggtcgactacagcctcctcgtcgccggcgccgacgccgcagccaccgtccagcatgttcccgcgtcctcgtccggcgcgtcaccgcaggcagtcggacgccagcgacagaccgacgacactgggcgggcggatggcttgctggagatcgtctccgaagagcccgcctcctcgcgagatccgagccctgctgttgctgctgctggttggtaaccattctcttctgcgcccgctgacgcggagaggcagag

SEQ ID NO: 38675 - DNA, 1498 bp, Zea Mays
gaaacgccaagttgccagccaaacgaaccagctaaaacaagggggggcagcaccgcggcgcggcgcggcgtggggacagagccctcgtgatcgatccgtccgtgggatctcgcgcacgccaggattggagagccgcggcctccccccgccccaaccagccatgggttcccgcgcggatcgcggctcttagacgcggaggaggagagagacagggggaggggaaggccgaggcctaggaggcgtggtgcagcgcgcgagcgcgttcgttcggcatggaacagaacgacggctcgttcctcgccgtgcgacgcctctccggcggcgccatccaccaccatcgccaccactcttcgccggctgaggtcgtgggcgtgtccacggcgtggatcgggaaggggcttacgtcgtgcgtgtgcgcgcaggggacggagagcgacgggcgcctctccttcgatttgagtcccattcaggaagagtgcttgcataggttgcagaaccggatagaggtgcagtatgatggttcaaatctagagcatcagaaagcactggtggccctttggcatgcttcttttcctggaactgaacttctaggattagtatcagaccagtggaaggagatgggatggcaagggaaagatccatctacagatttcaggggtggtggttttatatctttggagaatttactgtatttctctaagaaatatccatgaaccgctttctctgcagaaatccttccatgagctccttcgtaagcagaatggtgatagagcattgtgggaatacccctttgctgtagctggtgtaaatattacattcatgctaattcagatgcttgatcttcaagcagctaagccaacgtcattggttggagcagttttcctaaatctactcttagaaaatgatcgagcgtttgacattctttactgcataaccttcaaactgatggatcagaaatggcttgaaatgcacgccagttacatggatttcaatgtggttattaaatctacacggcgccagctcgagagggagctgttgctagaagacatccagaggatccaggacatgccatcatacatgcttctcacctgctagcaattgaacttggtcatacctaacattgcagcaaggtagtgcatctccatacactcgaagaagttgcgacgttggaaccacgtataccgagctcagtatggggggcgtgggcgatctaggttcatggactgtggatgtgctgctttaaattgtcgtgtttacctacttgacaacgaccttaacaccgaatgccttttcgtttggacgatgcgctgcatcttggagctaactttcgttgtaaacaggactacaggaggatcgtggaaacttgtctgaatatgatttgtagccatgtgtatgcataatcttgccgctttactgaaaaaaggcagattaaggctaattatagccttatagtcatttgagttgggctgggtaccttgtgtggggcccataacgaaca

SEQ ID NO: 38676 - DNA, 2154 bp, Zea Mays
aaaaaataaactaaaataaagggagagaaaaactgtcttttgctacagctgagctagaaaaggaacctttttccgcgcgttattcttcttcttgtattcgaaagcccaagcccaactgataaaaggcccatgctcaagcgataagacgagaataaacaaccaccgatcccccagggcccaggcccacgcgcacacattctgattccgaaggcaagggcgtgtacatggcggtgagacgaggagccaaaacccaacggcgacgagaaatccacggcggctagttcaccccatccggcgcgagcgactccctccgcctgcaccaaaaacgagggcgttttcgtgtcccctcctccaaactccggagcccacatcctccagtccccactcacctgcgccactccccaccacgctcctcaaaaccctaggtccttcgatctaatgccgtgagctctcgaattctcaattcccccagcctctccatggaagaccccgtggcggtaccctcctcgtccttgaccgaccctgccgctgccgccgcagctagggttccgggtgcggtggcagcagcccctggcgtcacctctgcgccgtccgctctcgctccgacgcagccgcctgccaccgcggccgcggtctctgaagccgcgacgccgtgccagaggcagctgttcacagtggagctgcggccaggggagaccacaatcgtgtcgtggaagaagcttctcaaggaggccgggcacaccgccgcggcaccgccagtggcggtggagccagcgttcgccgcacatgcgggcccatctggtccggcaaataacggaaagatccaagaacatgagctaatgaatcgcctcatgggcatagttggacaccttgttcagcgcaggacactgaagggatggcagcgggtcaggtattatccgcacatgagtatacctgtgatcctaatttttacccgtgcccgcgagcatacctgcgggctgcggagaaacatgaaagaaatggtagaatctggtatatctgctaaactggagaaggctgacaggtttcagcgtgtaaaattggagatcaatgagatgattaaagagcgtatggctacaaagtccaaggtcaatgaacaggatggttcagctgatgattttcaggttgctaatgatgaaagaagagctttaaaaacaaagtatacaatggatactgcattggaggacaagatgtgtgatctgtatgatatgtatgttgagggtatggatgaagacaagggccctcaaagcaggaagttatatgtagagcttgccgagttatggcctcatggttgcatggacaatgtcgggatcaaagatgccatttatagatcaaaggagcgaagaagattattgtacagccagcaaaaggttcgcagtgaagagagaatgaagaggaagaggctggctgcaacagcaaagctgccagatggcctcgcagttgcaatgcaaagtggagttgccccacaagttgcacagccacccataacaaatcccatcacataccatacggctgattatggacagaacccggggttaaaatattttgatagggctcgtgaaacgagctccagtgcaatccctgatgacggcaacagaattgctggtgaggtcaagaagaagaaaagaaaacctgaatatgaccctgtagatacacaagctaacctaccaagggctcccatgccgcacgggagcgagaagcaaaagccttctaagcctgctgacgaggccagtgctggtagcctgccctccatggcgacaactcaaactgtgcttggcctaccgtcggtgcttggtcataaccaacaacctagctgattctttcggcgtagtgttggacatttggttctccttataggcctttttcagctgctgtaacaaattatggcctttccatgtgttcagcatcgattgttgagactaacatgttcccgagtagagaggatatttgatcactctttacttttccagcattgcatggttggtacccttgcccagattatctgtgcagcgctgatagatatgatctgcaaccccttcaaataccagttgtaattatgaatattttctcgagacatgtactgctcatattgtgcgaagcgatgtgcagattttcttttacttttgttcaagtgtg

SEQ ID NO: 38677 - DNA, 2696 bp, Zea Mays
ggctcttccgatgattcagccatcacaatggcatcctcctcttccttggcctccgccaaagccctagcacgctcccacgcgtccctcctcgcgccccaaacccagagaacagtggtcgcgccagcgccgtcgcgctcgcgccgcgcctccgtcaggatgcgcgcctctgctgccgcgccggcggagccgaagaagaccgtctgggtgtggaccgagagccggcaggtgatgacggcggccgtggagagggggtggagcactttcctcttcggatccaaagacctcggcaaggactggtcatggattttcgatgaggagaaccagaaggttgctgtaatttcacaagtctcttcgcccggtgaacttgaccttgtacaaccggacaacgccgaagccgagaacattgtcatagactttcgaggtggctggcaggttatacgggcagaaaatatagttgctgcattccaaggatgtaaaggaaatgtattggctgtatcaacgaacacaactgaggcgcaagtttttcttgaggccttggagcaagggcttgatggagttgtacttaaagtagatgacatggatgatatcattaagctcaaggattattttgatcgaaggaacgaggcaaagagtcaattaccattgacaaaggctactgtaacaaaggtcgaggttgttggtatgggtgatcgtgtttgtgtggatctttgcagtatcatgcgacctggcgaaggccttctggtttgtgttggatcgtatgccagaggaatgtttcttgttcattctgaatgcttggagactaattacattgcaagcaggcctttcagagtcaatgcggggcctgtacatgcatatgtcaccgttcctggtggcaagacaagctacctctcagagttggggtcaggaaaggaagtcatcgtgatcaatcagagtgggctatggcgtactgcaattgtcggtcgtgtgaagatcgaatcaaggcctctgatccttgtagaagcgaaggataactctggagacgagacgtatagcatttttctacaaaacgcagaaacagttgcacttattacccctaacacaggatcaagtggaaggaccgccattcccgtgacttcgctgaaagtcggtgatgaagttctggtgaggaaacagggcgccgcccgtcacactgggatagagattcaggagtttattgttgagagatgaaaatggaaacgctgaatgcaccagtttcacgtcgttttgaacaaaaaaatgatgtatgattgcaacattcatctgttctgttggttaagattgtgagattccattgcagcatacaattgtgagattccattgcaacgtacaataatagatcaagacattgatgccaagtgagtgaatttcggaacagtcacgacacaggtcaataatgaaccaggcctgacaacttatcataaggttgacatggtcatattcccgtggcacacaccatcgccgaaacatcagtagaagcaaaagctacaacatgctcagtgctcacagcttgagcccacaaacacacagcctacaggggccttggccccgctaataagtccagttctagtgcacttgggcaaagttctagtgcacttgggcagtgcggtatcctgccaaaggtgctgctgctccaagcgagcgccgtggcgaaggccgtgctgccggttgagctctcatcggcgattttggggtgctgctcagcggcgattttggggtgctggtcataggcgatttgggggcagcgtgcgaggctttccggatgtcgactaatggcgatggtgcaccatatttggcatcttgtagctgttccagctcttccagcacctgcgacattggaggccgcagcttggcgtcaccgcaaatgcattgcgaggcaatgcttgcaatggcatttgcgccctttttggggtactgtcctcccaacttcgtgtccatgatacggtacagtctgcgcttgtcgcccaggtgaggtctggcccagtcaactaggttctgctcaaagcctggttttgatttatccagagcccttcttccagtgagcagttcaagcaacaccaccccgaagctatagacatctgcctttgcagagagacggcctgcaaagacgcaagcaacatgaaactaaacagatccagaaccgccactgtaaattacctaaatcgaagatttatattccacgtgttgccactgttatgaacaaagttgactggactaatcttgttgactggagcattcaaggactaatctgatgtatcatgctgtttaaggaattgaagcacaaaattgaacaagtacaattgactccaaaagaaatataaatacagttatttgatggcaggtccccacaatgatttcttttagcttaaacaaatagccctttgttataccctgtatcaccaaatatgctttaggtagaaaatgaaatgttcaggcatccttagttgttgcagtacgaggaagtattattgacatctccctttaaaagttgaagccacaaaccagagtaatgcacaacactactaccccaatatttcatcagtacgcacgcgaggaaaaaatatctaacctgttgcaatgtactctggagctgcatatccatgagtacccatgacttgtgtggatacatgggttttatccccagttggaccggcttttgccaagccaaaatctgaaagttt

SEQ ID NO: 38678 - DNA, 1007 bp, Zea Mays
cgagttagatttttgtccctgctctcttctatgccattgttgtagccctctttatctcaagcgccgacgtgtatctacgatcgagagagcaggtctccgaaatcagttgccttcgagattctgcaccaaaaggaggcaaattaaataaggtttttggaagcgccttcacacgactgctcgctttcttctcgatgaccctgttgtttcgatgttgtcgaccttattgcttccacctacatcgacaaccagtatgtctgatcagcacacgtcatctgatttaacctcatactttagttaatctcttatggtagaggtgtgctgcatttttatgattagtctgttagctaataacctatttgattacttgttaggtaacatttacctagattatttattgttggtcataatttatattcggaatttaacatggaatatgtctaattattcaacaattcaaaaatctaattgtaggaaatttcctgatttaactatggctggttttgccgacgcgctgaagccagaaaaactctctgatatgcacttcaagaggtggcaatccaaggtcacgctctgccttgctgctatgaatgtgttccatattagtaaatgcaaacctgaggacgtactgactcatgaagaggagaaaaaatacgacgataccaatactatatatatgggagcagttcttagggtccttgttaactgtttgcttgattcaaaattgtgaatatgcattatacaaacgagaaggagttgtgggatgtacttactactaagtatagtgcatcggatgctggtagtgaaatgtatatcatgaagagctttcatgattataagatggtcgataatcactctattgtggagtaaactcatgaaatacaatgtattgccaaggagctcgaccacattaagtttgtccttcctgactgatttgtggctagatgcattattgtaaagttgccttattcatggagaaacttcgtcgcttatcttacacataagagaca

SEQ ID NO: 38679 - DNA, 1587 bp, Zea Mays
gcgcccctcctccgtgcgtgccccgcccccgtccttcgctcacccgatgccctgccacctccgccgcgatagcctcccccacgaaatgcccccgtgatgttcgccccgctgcgaacccctccccctagatggaataagcagaggtccaatgcggatccgcggcccccgaccctccaccttggtgtgacagtcgcggctccgtggaggcaacttgctccctcgctcccacctcccacgccgccactgttgtcgccttcagcacgctgcccagcccacgccccccccccccccccgcctccaaatgtggatctgccaccccggccctccaccttggtgtgccttcagcacgccaccactgctgtttgattccttctcctttttgtttaggacgtcgccaaattccatccatctctcagcgccgtggtctcccgatgtggatgggggaagattttcctggagatcgaattgtccttttgtgatcctaggtttgatacagtgctgcaattttctgctctcccaccgtacataatgcgctcgaccacattaattttgtcgttaagagtcaaacgatggtttgtgttcacaactgaaaccattggattttgtttttgacatcctcaaggaggaattaaccgagagcttgctgccgcaaagaagatttctcacatctgagatcgggagaagaaagcattttcaaggagaatagccgatctgttgatgtgcttggccttaagactgcttttgcaaccttcatgggtaaggcaagtaaccttcctcctttgcctctctgatgctatgtgttatgtaataatggcctaaccccatcggtcgcttagtaagttgtcttgtctgttattaacttacattaaaattctgccacaaattcccatcaacaagaaaaacaagaaagatagctactaggagaagctttaatacgctcgatacctggcatgatgagttcctcaatcaatttcaggctggcccatcggatcctcaatgctttctgttcattttggtcgggaacaagattgatttagatggcgggagcaaacggatggttccagagaagaaagcgagggaatggtgcgcctccaagggcgatattccatacttcgagacctctgcgaaggaggaccacaacgtcgacactgctttcctatgcatcgctaggctcgctttggagcatgagcatgaccaagacatttacttcaagacagttgtggaacaagtcccggacactgaacagacaagcggatgtgcttgctaggagccagccatttcctggaaggctggaactacgtggatgttactgaaggactggcccccgatatgtttccctcccattttttcttttgagctccagtaactttattactattctgtgttgctctcactggattttagcacttctgtaagttgtcatcttttaaagttaagaatttttacataagtcttacacatcgaacaaatccaccatgtacattaagatgcaatgcttatcgaacactcaagtattatgctcttgtaacctaaattaatcaaaattgggcaatgatcagcaaccgacttgtgctaaggtagaaaaat

SEQ ID NO: 38680 - DNA, 968 bp, Zea Mays
gatcggcccatcatcgcatgcggtcgggtccaaattccattcgagtggcgcgtagagcggagccgcggaggagagataagatcgttgtcgtgactcgtgattcgtgaacggcggcgacaagaagccgggagagatgccgctggccacaactgctccgacgccggcgccgccctgtcctccgccgagtccagcagcggcaccagtccggacgcagctcctctcctccgtcgcgaagctcgcgctcacggccgcgctcgtgtgcggctctggcggtcccgctgccgtcgtcgtcgttccggccgccgctcaggccgtcccgttcgtccgtcctcctcctcctcccctgcaaggaaggcccttcgcctcctccactccttacgcgcagtcccagaagctgcagcttggcctcgacaagctcggaaagatcaggccatgcccgtccaccaacccggggtgcgtgtccaccaacccgctgggatcctccggctccttcgcctcgccactgctcatcccggaatcatccgcaggggagaagaccgtcgccaaaagaaattctagctcttcccctttccaaattaaacatagcgtcaatcgtgtgatgctttgcttttgcgtttctcaattgatctcttgctactttgtggtggccggcggcgtacgtacctgctgcaagtcgctgcggcaagccatcgagaagacgcagcgtaatgtggagtttaaggtcgacgaagacactccatatggacactacatcgaggcggagatggacggcggcgtcggccgggacgtgatggagttcctggtgaagaaagacgccggcgtggtggcgtaccggtgcatggccaccaaggtcaccttcgtctaccccttcaccaccgctgtcggcgactccaagggccagaagcagaggatcgcggccatctcgcaggagctcggatgcttgaaacgcggcgcaagttttcttccag

SEQ ID NO: 38681 - DNA, 1315 bp, Zea Mays
atccggcaacccgaggcccgggctggtgcttctcactagtcagtactcagtagtagtagtagtcactccattccccccacccggctagtagccctgctctgctctctgcctcggctatatatatacgccgcgggcgcaccggtccagcaagcaacaataaagggcggtgtcgaagaggagcttggagcttggaccgacccgagccccatcgagcgagagaggaaataatgggtgaagaggccagctgcaacgctgccagcgcgatggaggccgccaccaacgccaggccggccaaggagaacggacgcgcgccggctgtggcggaggtagtggcccaggaggcggccgctgacccccggctgcagggcatctccgacgccatccgcgtcgtgccgcacttccccaagcacgggattgaggccaggggcttcatatttggcccggcagtcgcattggctattggcgccaagttcatacctttgcgcaagcctaggaagctccccggcgaggtgatctccgagaaatacgttctcgagtacgggaccgattgcttagagatgcatgtcggagccatcgaacgacctggtgagcgcgtgctgatcaccgacgacttggtcgcgacgggagggacgctctgtgctgcaatcaggcttcttgaacgtgctgaagctgatgtggtcgagtgcgcatgcctcattggcctcccaaaattcaaggatttctacaagttgaatggaaagcccgtctacgtgctggttgagtcccgggaatcagataaataagaacttatgggtcagaggaaagctggcggttcattccttgctgttgtgattgagcagtggagggacatcgacaagccaaccatgggggtgctttagcgttactaaggctagctactaagatcgacttggtgagaggagaggttagaagtgctgggggggggggggggggggtgggggcgttagtcttgtaggctgagtagattttcagagtactgaagagcttgtagttctgccaggaacatgcttattagttgaagcaagtgtgttgatggtccattgcttgttggattttgtggttttgatttgaagggcgcaaaaacatggctggatcagcttgacggaagaacttggacatcaatacgcttagcatcaagtactagcgaagtaggaacttgctacttgtagcgtgttattcctatctttgaactcgttagcttattagtgacaaaattcacaaaaaattggcacgcgaaacggacacaagtcgtagcagaaaaaaacgtgaatatactatctaaaaataaaaataaaaa

SEQ ID NO: 38682 - DNA, 2094 bp, Zea Mays
cagcccgcgtccatccaccgcccgtgggaaggcagagcagtgagcgtcgcaggcatcggctccagctccggctccgcccgccgccgcaccggcccaccctcctcccccgatccgatcgccgatcaccggccctcgcttagcctcgccacgcctcgcgacaatatttggaacccctgttaccgatcgcctcatgccgtaccactgaacgatcccaccccaacaccgtacccccgccgcctcctccgccgtgcccacagtcgcctccgcctttcgcctgctaccccgtagaggctctatatcccgatcggactagggtgcggacgatggctagcaacgccgaccagcatgctgccgttgtctcggctgccccgtccgatagcccggttggggcgaagaaggctggggcggcggccgccgtctggaaactccccgcggccgcggcggttcccgtcgcggaggtggttgaaaaccccatcatggacgcacactcctggccggcgctgcccgggctgtcgtctccgccgccgccgccgccgccgcatgcggggccaacagccaaagcgtcaccgaaggccgcttctccagctcccactccatggtaacgatgctcgggtgcgcaatcctgtggcccggcgtgccctggtgatgcctgcggcggatgggctggagaagagtgcccctgcaccggaaccgtcccctgtttatgtgcctaatgcccggagcaatggtgcagatcctcatcagaatggacgtcctggctcgcatcaccatggccgaggtggtggctatggtgggggaaacaggaggggtaatggtggaggtggggggcgtcgcgggagtgagcaccacggtggttttgatgggcaacggcgcggaggtggccgcagagatggccatggaccggttcatcagctgcgtggccatcagccaacatacattaaggctcctgttgtagcaggagcacctccaccgcctccaccatttgttagccccgctactcctcagacaccaccttatggaccacctatgggcttccatgacatgtcagcgcatgtttactatttcccggcacccacctcggaaggcattcaaggcctgccttttgtgcctcttccagcaagcccccaagctgttctaattgacccttctcgaaagaaccttctggagcagatagaatactatttcagcgatgacaatttgtgcaaggacctttacttgcggcaacacatggatgggcaaggttgggtgccattatccctgatcgctggctttcgccaagtccagaaaattactaataatattcagtttatcttggaaacagtcatgctatctaacattgtggaagtgcagggagacaagctacggaggcgtggagcatgggagaattggttgcttccaaaactgaactattctgctgggagttcttctggttcgatgacccctgtgacatctaacattgatgctcttgcatctcagtttcgttctgttggacttgagggggcaacgtaccatccaagcatgcctgggatgtctggtgaagctctcctgacaagatcagcaacttcagttagtctaggttaccatgcatcaaccttcggtgggctacagagcaatgggagtgaacctctctttgggccgaagtctgcaagaaatctactcaggagcgataccttttgaggctatatattcaagagaagttaagtacaatggcaggccgagttttcacagtaacggcatgcacaccttatctcaggtgagatgtaaaaacagctgttaaataaaaccaaaaaaggcaaaagcataatacaaaaaaaaagcatacacaaagacaaaaaaatacaaaatgcaaaaacaaaaataaaaagagcataggcagcttttgtgctagtactcctgtcctttgtgttatgtggtatattacctagtaggtttgttttctaatgctaggagtttgatggctcttctgtgtgaaccgagttatttaagtgttatggatggtaccattgggaaactgttgagtggacgacgttatataaaagtacatgaaaacattgttaattatgctgctctctgctgatttgtgccgcatttctt

SEQ ID NO: 38683 - DNA, 3055 bp, Zea Mays
tgcagattctctcacgagtctaatcataggccaggggtaaaagcgcaaatgtttctgcgctctcttttctcccctcaccctttctctttctccctcgaccgccccggatctatctcgccgcgccggcgcgcagctgagccgccgaagcgaggaggcaatcgaggcggacgaagcgccgcaccaaattcgacgggggatcgagcaccagaggcgtagcgcaaaatgttcaagttcctcaaggaggtggtcgcgggatccggatcgggactcaaggacttcccctacaccatcggcgagccctacgcatcggcttggggctcatggaaacaccaccgcggtacctccaaggatgatgggtcgcctgtgtcaattttttctctgtcagggagcaaccctcaggacagacacatggttgctggtcgcaacggtgttaagagattacgaacagtgcggcatccaaatatcttatcctttttacacagtactgaagcagaagctgcggatggacctgccatgaaatacacaatttatattgtaacagagcctgttatgccactttctgaaaagctcaaggaactgaatcttggtggtacacagagagatgagtactttgcatgggggcttcatcagatatccaaagctgtgagctttctcaataatgactgcaaacttgttcatggtaatgtatgcttggccagtgttgttgttacacaaaccctggattggaagcttcatgcttttgatgttctgtcagaatttgatgctaataatgaagcctctggtagccccatgttgcaatttgaatggttagttggaacacagtacaagccaatggagctgtcaaagtcagattgggcttcaattagaaaatcacccccatgggccattgattcttggggactagggtgtttaatttatgaactattttctggtgcaaagctggctagaacagaggaccttcgaaatactgcttcaatcccaaagtctctacttccagattaccagaggctcttgaattccacaccttctcgtagactaaatccttcaaaacttattgacaacagcgagtttttccagaacaagttagtagagaccatccagttcatggaaattcttaatttgaaagacacctttgagaaagacagtttttttcgtaaactccccaatatagctgaacagcttcctcgtgaaatagttctgaaaaagctgctccctgtattggcttcttctcttgaatttggttcagctgccgctccagccttaactgttttgttaaagatgggttcctggcttcctgctgaccaatttaatatcaaggtcttgccaactattgtcaagctttttgcctccaatgaccgagctatccgagcatgtcttttgcatcacataaatcagtttggggaatcaatgtcagctcaaattgttgacgaacaagtttttcctcatgtagccactggcttctctgatactgatggtactattcgtgaactgacattgaagtcgatgctcgtattagcaccaaaaatgcaggagcgtgcacatacgcacaacaatttgccatggcatgctttgatggaatatttctgggattttagatcctcaatccctcatgcactgatttctatttcctgccaaaagctatacttgcagatgactgattgtctggtggacgaagaacctggtatcaggacaaacacaacaattcttcttggcaatattgcaggctacatgaacgatgggacaaggaagagagtactgatcaatgcattcacagttcgtgcattacgtgataccttccctccggccagagcagctggaatcatggcactgagtgtcactagttcatactatgaaatgacagagattgcaactcgcatcctgcctaacattgttgtgctcacatttgacccaaatagtgatgtccgaacgaaggcttttcaggctaccgatcagttcttgcaaatagcaaaacaacaccatgaaaagcttaatacaggagacaacagtgtggctgaaagtactggtgttaagttaaagcctggaaatgcaggtttacttgggtgggccatgagttctgttacacaaaagggtaaaccttttgaccatgccccaatatctactgcaaatgccaataattctcaagcatcaacaacctcgactgccactccagacactcaggcttccacactagcgtatgcaccatccacatccacctcgcttgatcaagctgcatcagcatcagcaaggtcgtcagtagatgggtggggtgagcttgaggatggtaatatccatgaggagaatagtagcgataaagatggatgggatgatgtagacccatttgaggacaagccatccccatctcttctatccaacatacaggctgctcaaaaacgtccagtggtgcaaccaaagcaaccggttgcaaactcatctaaaccaaacccactgaaagcgccaaagtcagaagacgatcctttgtggggtcctatagctgctgcaccacctaaaagtgcagtaaaatctgcagacatcaagccatcaacatcacataatgatgaggatgacctctggggttcaatagcagcacctccaaaatcatctgggaagcctttgaagccagctgtagcgaatagtgacgacttatggggtgccatcgcagcacctccaccagcaaccaaagccagacccttagcctcgtcaggtaggggccgaggaacaaagccagcgcaaccaaaacttggtgctcaaagaataggaagaacatcttcaactggaatgtgacgtcttatgatatcaagtgttgtacaagaatgcaaagttttcctttttttttcccctgccttgcgttgagtctgtccaggatgacattctttgtaaactagtaaaaagatttatgtatatgagcacagttttgaccaatgtattagtattattttaccattgtgtattaaaatagatccagaagatttttgcacatcacagctgcaatcatcttaagtccatattattaatatattgctatgtcttattttggcgtgataagagcaacttaatg

SEQ ID NO: 38684 - DNA, 516 bp, Zea Mays
gataatcatcgtgattaatatatctattcaatccatcaacccaatcaattagtaagaatagcgaactagagaacgattaccgaatcaactagaattccaagcaaacgttgatgattcttgttcgtgcctccgatcgatttccaggcaagtgcaccacgggttccacttcttaactcaaactccttagattgcagcggtgatcaaggacgagcacgtagaggcagggttggagcgaacacaatgacaacaagatcgctgaccagcagtagtgtggaggcaaatgacgacatcgatgtgtcggcatgacaattctatttgacgaaaataatggcgcggcgacgaggatccgaggagtgagcgccgcggtcacaggcgtggggattcgacagcgaataggacgcgtatcagggagtctgcttgggagtcgagcaagggaggaccgggtttgacgactcgatagcaaacgtgagcatgtcgaagcccgatggacgaggagcgagcgcgccgcagtgacga

SEQ ID NO: 38685 - DNA, 1654 bp, Zea Mays
catcacaccagtggacgtgccttgtgcacgctctcttctccggggtcaggaacctgtggccccaaatcctccacctttccgctttccagaccaagtttgttcttgtatcatctgtgtgcagcatggcgctgccagttccccgctgctagcctcgtcgccgtcgccatggcaatggtcaccgccacgatctcttgctcttatccacagctccggtatcgcccctctcctcgatgccggcgccacggccccgcagcggccaccgtggccgccttggcgacgccgcggtcggagcaggacatcgtcatcgtcggcgcgggcgtcgcggggctggccacggcggtggcgctgcggcggctcggcgtgggcgccgccgtgctggagcagggcgacgccctgcgcgcgggcggcacgtccctgacgctgttcaagaacgggtggcgcgtgctggacgccatcggcgtcgccgacgagctccgccccaagtacctccgcatccaggggatgaggatgaggtcgccggggcgggatctgcgcgagttctccttcgacgaggaagctcccgggaggtacgcgcggtggagaggagagcgcttctcgagacgcttgcttctaagctgccaccaggcgccatatcgttctcgtcgaagctgaaatcgatctcggagcaagggcgtgcaggcaccctgctcgaactggaagacgggaggcagattcttgccaagatcgtggtcggctgcgacggagtgaactcgccgatcgcgaggtggatgggtttctcggagccccggtacgtcgggcacatggcgttccggggcctcgcggagtacgccgacggccagccgttcgagcccaaggtgaactacatctacggccgaggcgtccgtgccggctttgtccccgtctccgcaaccaaagtctactggttcatctgcttcaacagacaagatccagggcctaagatcaccgaccccacggcgctcaagaccgaggcgctggagctcgtccgcggctggccatcggacctcctggcggtgatgcgcagcacgcccgagggcgccgtggtgaggacgccgctggtggaccggtggctctggcccgggctggccccggccgcgtcgaggggcggccgggtggtgctggccggcgacgcgtggcatcccatgacgcccaacctcgggcagggcgcctgctgcgcgctcgaggacgccatcgtactggcgcgccgcctcgccgacgccggcgcggacggggcccaggccgccgccgccatgcgcgcgtacgaggcggagcggtgggcgcgcgtgttcccgctcacggcgcgcgcggggctggtgggtgcgctcgtgcagtgggagaacgcggcggtgtgcgcggcccgcgacggcgtggtcatccccaggctcgtcaggctgggaccgttcctggagcacaccaacttcgagtgcgacctgctcgaaccggcgccgggagtcgccatgacaccggcacactagctttctccggcacaatgtaactagtagtatattgattaacctcttcttcgaaagatcgattaacctctgattgacatgtactccctctatctcatctcaaaatagtatttattttagggtgaatttatacaatatttgatatatatgaatttatatatgta

SEQ ID NO: 38686 - DNA, 2954 bp, Zea Mays
ccctagccgccactaccctgctccctcccccaagccgccgccactccttctccctccccctttctctctcttctctctctaccgcccacctctctccacctcctctccccaagccgcgccaccaggagtgcagcagccgctagaagctgccatccgcccgccaggagttcagtcaatctcctgtctcctgagagccgccgcccgccgagtcccgctcgccgctcggtcgctcccgtgaggcgctcgatctcctcagcgccgcgcccacccagccacggtggagccacccttcgtcccgtcgtccggcggccggccctcaatccctcacgccctagcttctctgccatttccggtcagcccctcacgccctagctttcctatcaggcgctcggtcgctccctttgccacgcgctcctagcttctctggtcggctcttcctccgccatttccggttggatcctcctatggtatgtgcatcataatccgtcacttttactgtgtatgcaatctcgatctgcctagttcggataagaagaacctatccgaagagcgcccgttaatgtctactagtggccaacgcgcgcctacgcgcggtgtttttacccttttctttcaaaaatatatgagaattgagtctctcgcaaggaagcatcaggccaatgggatttagtggccaaaacacgatactacctgtagaggcagagaagacccaaaattaaggtgctgctaatgatacgatgaatttagagaaaatgaaaaatgcaacgaaagcccctccaaaaaaattctaccattttcttttgattggccgagactgatgtgcatttgcctaaaagtctcacaaattcattcctcattcttcatgccgacattttaattgggaggacgttttgaattttggcgaatgggacttctccatccttgaaatccacccacacgccacaaaaccaaaacagaagtaagcaaaataaaaatttcgaagctagcatgccaaaaaagacgacgaagaaggacctgaatgatgccgtaggggtcaggccacgaacgatggttgcccgcgctccattgtggcaagcttctgttgctggcttggcgggtcgctggagcacgacctggagctcctcctcgacgatgtactccgtgatgcgggtacgtgcggtcgacgactgctgtagcgtcggagactccgagttggagcggctgctgctaatgctgccgagctccacacgaaagaagtgcttgagcggccagtggggcaacgcgatggaggcacgacacagcgggcatgatggctcgctgctcagcgcccgcggggaggagctaggatgctcgggtcggcgggcggcggcgcctcgacctaagcgagcgcggggccatgggcaggtctggtcaccattcagaacagggggctcggaggcgaaggcgagaggagagaagcgtatttgtttttttaaccctaccagccggtcgtctaaaaccaaaagtgctagccgcttcaagaaagtgcgaggggtaggaagcatagaaattaccagctaaacatgtgcgacggcggtgaagcgtccaaagtagatcgaacggctcctataaaaaggacgacgtggccacgctcattgggcgtcttgatgcagagctttaatatatagaaatatcaacgagtcgccgataaaaaaccaagcatgaatgtgcagtgcagtgctcgacaaacggcaccagcgccgctgggtactgtcaccgcttcggtcgccggagcccggagatgtaaatgcgctggagttttcatgctgtcgctggaggaattgaggaagaaagtttggtaaccgtatactgctctaagaagttttgccagttttgatcatagccaagcttttgattcatcataatctgatcctgtaaccaatttctctccctatgtctagagcagcctcgtggccaatgcaattgatgccctggaactgccgaagggatctgcaattgctattgacatgcctatggatgttacctaatttcaggatgctaaggtaataatgcttggactggtacccagcatcgttcgtacttggaagaatacggactgtacagctggactagactggtcctccatccggaacgtcaatcatatggatgcttcttcagtggaattatcatgtgaatccccatagtgcccaagctgtgaagcagtcatgattgatgcttgggctgttagctttatgtggtccagggggaggaaggataccttagaaactgtcagaaaagctcatttcatacttcatttttcatcatgttattttgttgcatgagacatttgtccaactgcgtagggaatgaaaattcaaattatttctgccactgattgggggatgtaattccaaacgttgtaaaaggcgactgtatctagtgattatttatggctgatgggaagagctggttgtgatgcagttgaagacccaagatttgaacgacactattgtcacaccgaaagtgtgttcgatgaaatgcctccaacatccggaggtttctatttgtgaaagtttgcaggctaagacaaatgatagctattcaaggagctagaggctgctcaacataaagcatcaacagcaacctctggaacagctgaaaatgctctactggaagctaagtcagtgactgatcttaaatctaaagatttggagaagaagaaaagtgagctttgttcactgatacaagaagttggagtgcttttgtgaaggcttttgcgaatcacttgaagtgttagtacttttgtgaatgattttgtaaagtgtttgcaaatatgtgcaaaacataataacatgtgtaggttttgtgaatgattttgttgtggtgcttgttgatggtttatgtgatgtggatctatcattgtgcaatactaattaaatttgtatatctatgtgattatctgtataaaaattggtgatttgtgatgcttttgtata

SEQ ID NO: 38687 - DNA, 6381 bp, Zea Mays
atggagacggctgccgcgaccgcgaggcccggcgcagcgaggaagcggcggtggaaccaatcgcagccttgccaaggggagggtccgagcgatctcaagttcgctagacttcgcttcgacggcgacggcggcgccaagggcgcgtgggaacacctcgacctcgtcctctccctccagagcaaggagctgtcgctcgaaagaaagattgagctagcggtcgaatttctaaccacactgccaaataactcaagctgcagcattcagctattgcggctggtgtcatttattggaaactggttgcagtctatcttaaattttcctgagaatagtaaaaagattctacatatttttgatccagcattggatagtagatgctgggcaattttgagagtgtgtgttgaaaagaaaccatccatttcaatatctctgaacttacttaaatcccttagtcgagttgcaagtcatggtttgggcagagttgatagcaacacatcatgtcctgacaatgaatctattgagctctttgaacaagtgtttgactgcatgtcattgcttttctcttccaatacaagagctttcttcaacgctggtgtggatttatgggcctcttgtgccattgaggttgtcaatcttgctcagaaggtgtcagctaaaaaggacaatttttgccctgttcttcagaagcttgcaaattgcctcctcgggcaattcgcatgcttcctgagattttatgcaaatccgaagaatattttccatgcttttgttgataaggttcttgggccattgttggaattgttagttttacttaattcacaagcacattccagtgaacacaagcagacaggaacaatgttgaaaattgttgaagatgttttttcaaatggactgtttcatccccaacatcttagtggatatttcggtctcaggagtttgaataaatcttctgctgctaaggatatcaaaggaagctaccatagacatctatttcagcgattcaaaggaataaaaacagaaaacaaggctgtattgctggctgggtttggctacttgtttcaattgtttgttaggagggctagaaatcaaagaacaactgtagcaccaagtagaacgactttgggtacgctgcacaaaagcaatgatggttctgaagaaccacaacatagggaatcactttttgaagtgtttattatgttcatggaacccatcgtattagagtgtaaatcgtattcccaaaaggacttctctaagttaggggtgacaaggctagtagaggtccattgcatgctgaaatccattaatgtgatgctgataacccttattgaagagaagatctatgttcctacagaggacacattggaaggatctcacttcaattttttgcaagatatttactctgtcttgatcttaatatctgaaaagatgtacaaattctggatgtctgctgtgcatctagaagatgtaaacattaagaagatagtacctttaatgtttgcagagattatttctgcagttggcaattttctagaaatcgagtacaaagttctaggagacgaccttgtgaaattgtggttaatgatttttgctttgtctgctattaatacatcttccaaggacatcgaaccctgttttctgcttgcttcaaagatttcaagcctctcagcccaagtgatttgcacattcagtgaacttcgtcaggtttcccgctcaattttcagtctgtgtgatgctgtgagggcattcagagttgagggccctgatggagtacatggctcattttctgtggcctctttatcgtcccaggagtgtttgggatcattgacaacactgttgagttccgaaacattgatgggtgctattcgcacttcaattaagtcgatgcctcaaggccagtctagccgatgtatagaggagcttacatcggatctcacagaaacattgaattggatggcagattgcagttttgaagatgatgtaagcaaactcagagagccatccattgccaggaagtctattttttgtcagaaagccgaacttcttggcagacacttatctgaagtatatgctagcattcttgattcaataactgtcactgtttcaaatagtacactggtaggaaaatctgttgaaaggttggtcaatgcagtccggcgaaatttcagtcacttggtcagaaacaaatcaaaaaatataaatggatttatttcttcaattatgggaaaaaatgtatctaaaaaactacatgccaaccggcagaagatcccaagtttttcctggattttttgcctattctgtcgcctatatatatcatgtagaagcttgtatcagcaatctattggcctcatgcctccagatgtagccatagatgcaacaaagttagtggggaatccattcattgtatgttcaggaaaggaatggaccaatccgacgaatattcttgggaagggttattttgcattgatcgatgaaaattcaaactcccttttggatgttattgagagtttatcagagtctctctcaacaaactgtgcttcttttgctccacttgtttacatcttccatgtcatggttctgcagagactcaatgaccttaacaggcagattaaggcatttcaatttttgcttgaagatgatgcttggcaaatagataataaggatataggaaacactcgactgttaaaggaatcttgcagtctggaggctgctaaattgatgagttttgtgatgaattatgtgaagctattatcttcaggagaaactggtccttttgggtcttatgatgttagtagttcctgggatttgagtctatgttccttagatgaaggctcttttcctatagccacgtggcagcttctgtgtgaaaacattgacgtttggagctctcatgtttctaagaaggatttaaagaactttttctctaatttgataaggttttcttttactcaaaagagatcttccctggacaaggagaataatggcactcaatcttcgggcagagaaatgactttgcatagtgtctctattggagtcctttgtgatacaattatttatgaaaaaaaggtaattttgaagaatctggcatcaagtttttgtcatgctttgaagaaatcgttttcttttgttaccaactctgatggagataatgtctttttggacacttcacctgatttgatggagacaataagtaacctggaaaatgagaagttgattggtacaggttctggtgctacgcatgcgcactgcttagacaaacactggatctgtgaggatttccttaatttttttagtgctgttcctggatttcatgcaaattccaaggcattcatacggcttataaactatattctccatcttgaaagactgctgctgcttaaattgctaggtcttcgttgtgaatcctgcaatcccatgaagttactgcgtttgtttatatgttgtcgtagggctctgataaatctcatcttgaaattcgggaaagagtgcccagaggcaaggcaatacttgtccttttcaaataaaaatggtaactcatattccctggtttggtttttgagatctgttcaggaaattgttggttcatcacataaaatatttgacgagtgtactgatgaggtgaataggttgatgttctccttgttagataagacatcagaattattttctacactagctagtttgaattcatcagtttacttgtttgatttaaagaaacaaattgaatcttcccttgatggtagtcctattaaaaaggagacttcagaacataatgaccaggcatttgatatagtagaagtatcagccttagagtgtgtcagaagtatggctgaattgttgcagaagactgcaactgggatacctgttaccataaaggacagcaagtgtgttatcaaaatagaagactgccgtaacactgtatgttggaaaagattgtcatgcagcatgtcttgcataggaggatttttgcagggacttaattcagcattagaaagcacattcaatgatcacccaatagcaagcccagaggacaggaagatgttgcttcagtattgctcaagatttagcagttatgtcgctaagtttgggacctttgtagatatttgtgttcatgtcttgtttatggataacaaagattctgcctctatagatttagtctctgttcatcttccacaagagctagattgtgcgaatggttttctgaatattgaagcaatcatggatgaattgacaaagtgtggaagtcatggagttgatctgtctaagatacagtacatggaaaatgttcttctggaaaacctgttgaaaggtgaatgcccactcatatcattcactttgagagagatatacagtatatctgctgctatcattaaatttcatggttacctatccttttcaagtgatgtttctaggcagacttgcagccctgtcgaacagctttcattgggtaccatgcttgggatagctttcatcactctacagaaagttgcagacatgtctagctggccacacatgttttgtcttgtatggattgatggggtattaagatatcttgaagtcttaggaagtgcatttacattgtctgagctcaatatttcaatagaactgtatactcagattataaatgctttattgagggctgttggtaaatgcatcttacttcaacagaagaatgctactctccctactcatgagattggctcaagcacgaaaacactgcaattacagaatgcatctggttatgcttttcctaaagatttcattgatacacagaatagattaaattcattgaaatcgaggcttcgactagtacttggaaaatttgtcagtattgcatcaaacacacatctaaatgcagctctacaagtaattgaaagggcattggttggagtgaatcattgcagtcattcaatataccaaatttacactggaaatcctgatggtgggacagtttcttctgatgttgctgctgggatcgactgcctctatatgattcttgattttgtgccaggaaacaagcgcgtttttaagaggactgtccctggcctagttggtgctttattcaacattatactacaccttcagagtccacatattttctatagtcagaacctgccacctcaaggtagtgtgttccatccagatgctggagccactgttctaatgtgtgttgaggttatcacttcatttgtgggaagacattcttttcaaattgatgcatcccatgtttcccagtgtctgcttgttcctgtgacactcttcaaagagtttaaacatcttctagcaaagtactgcaaccaaagtgtacaacaccatggagatcatgctgaatatattcttgacagacaattttcagttgatatctatgctgcatgttgcaaattgttatgcactactcttcggcaccaacaacgtgagattgggtggtgtgtggccctcctggaggattcagtaagcatactgctcggttgtttggagtccacagattcgaagatgattaacgtagctggatattttgcttggaatatggaagaggcactaaaatgtgcttcctttttcagaaggatctatgaagagatgcgccagcagagagaaaccctaggaaaacatgccatgcactttcttgctggttatatttccatgttttctggacagggtccttttcagacagggataacacgagaaattgatgaggtcctgagacctggtgtgtattccctgattgatatatgcgaggaaagtgattttcaacagctccacacatacctgggtgagggtccatgccgaaccactcttgctgatctggtgcgtgattataaattacacttccagtatcagggcaagatctaagccagcctgttctttatttttgaacaactggcgtttatcctgtcacgtctggttagaaaatctatgaagtaccatcttctggatgatcttgtgttttgggtggactaattttggcctaatggctgcttaccgacttatcaaggagacatggtggctaataaagatttaaggcttgtgaaatcaacttcataggatctacagctgcctcgtgctgttctgcaagttgacctggacacctggttttcctggtacttaacaacagcaaaaataggacggttagtatcaagtggtgtttggctaccttgtaagagatttactgattaaaacattgtaatgctaaagcttgaatagatcataattgaggaaagagaattatctagtgtcctggtgaagttctgccggtgttggtctcgatcgacctgcttctagtgcaatccagatccaggcatatttatcactcagaatcgagcccccctacttctgttttgcccgttttctttttgcagtttcctttcacagtttgacacaaccacaaaagtc

SEQ ID NO: 38688 - DNA, 3400 bp, Zea Mays
aatttaacaaattcctctcccgtcccctttcccttcggggatggtattcgtcgtcttggcttcatcctctcgcccgccgtctcgactgtagcaagcggggctgctgtccgccgcattcaggagccatgcgtgaggggatgagggagagggacagaggcgggagcccggatgcgtcaggtcctccgcccttccgcggcccggcgtacaagacgaagctgtgcgcgctttggaggggcaggggcggctgcccccgccccaactgcggtttcgcccacggcgaggctgagctccgaaggccgccccctcgcgcctccttccagcctcgcccacgacctgggctttgcatcaccttatcatcttcttctgggttttaccgtacccaaaatgttgtcgattccatgccaatttgtcggattaggttatttggatggtttcccgagcaagagacaccagtgcgctcttcttcaaagagatgcatattcggcctgtttattcatcgagttattgggatgattggttgatgactggagacacagcccaatgtttgaatgctagtggtgcagcaaacactgacagatagcaatgtgatctgaatcatatgatctcaggaggagagttagcgaacagggaagatagttgcaactgcaagaattatataatgttaacaatttgcaagtgcatcctttgaggatgtacaaatggggttgcagatgttaatggctgacaattctgggaggttttatagtttctacccgttgctgagaagactctacccttcaattgcataacagtatgatggtttggcacctgaatcttttctcagtttgtgttatatcttctcatcttatggtgcatatacaccatgattcctgtgtagtggtacttgaactgagtgcttgctgccgcagaacacaaaaatcatcaacaagcctgatttcattgcagataatcttggcattgctggttattattttgattttacaatagatatctcatggacagatttgttgagattgactgcttccagaggatggcacatcttatttccatcctggcctttgtttcagttggcaatcggtcatttatgatacttgaatgcttaacctgcctcagaagaactgaacatggaagatattatacattttatcttctcgatgggattcatgctatggtcagtgagctttaacaatgctattagaagcttttgcaactaattgaaacatgccgtttgaatacactgcatcaagctatatctgtggctttattgttacctgcacttcaagtatcatcttggaacaagatttttggcagtcatatggataacatctgatcaaatgaaattaaatttatttggtgctattcgagttttggaagattttacgtcatggtgattggaacatgacatctaattaattttggtgattccatccaaatttacttcaggtgattcgtattagaagtactggatcaattctaagtggttaatcatgataatcatgtattggcatctactctttcattagttgtattggctcgtctgtgtttgtggtctatggtgtattggtgttattgtgggccctctaatttttgagctaattgaataaccatatggctcaaggttgtgggagaagggattacagagatcatgagtttagactcaggcctgatagaagacactcaccccatgggaggatctagtcattcaagatcacctattaggaagaggtatgtaggaacgaataacaattattagggattcaagatctagtcattagaagtacttaaatttgtttattacatcgggctagtttatcttcatgtaccatcatgacttaatccctgctaatttattggtttcctaattttttatatgtgcgagctgcaatgttaagtttgtggtttatgagaccttttattctattgttcaaccatgatctaccatggagtctcattaccatccatttataactttggggtggggttgtagccgtgtagggtcatgaatgttggtatcaccaaggagggttttgatcttatgttaggcatgtgatctgtatacatgctttttttgcaagtttatggcttgcttgtgaaattgcctatctttatgtttatgttctatggctgctcagtgagagaaaacatagtaaaagtcctgatggtggagaaaccgattcatccgtaagtgttcgaagtcctgataacgaagacagaggaaaagatgaaaggtacttaagcagtgatgagaaaaatggtcatgaagatcaactgaaacaaatgcatctggacatggaagcattgcgtgaagacaaatcaaagctggagatgatattagagaagaagactgatgaagagcacaaactttgtagcagagtagaagatcttgaattgcaattgaacaaagagaaagaagattgccaaaggatgtcctccaaaaccaaaaagctaatcaaagcacatgggcgttatataaaagcacaggaggatttaaagaggtctcaggctcgctttgagaggctagcagatttgcttgcttcagatattttgaagccttgtaccaaggagcagggttccatagggattactgccaatgaagatccatataatgctaatgaaatgagcccaagtgaccaaagacaaaaccatgtttcagcatcgagaaaaagacttatttccctcccaacaagtgaagaagcaaaaactggaaagagacagagagagaatggtgatgatatgatcccaacatcagagaactatagacctgaagatgccctagaacatctccaagatagcaagggaactgatctaccagaatcatttacagtgaagaagttaagggagggtgacaacgatgatgtaggaaacattgtctcttcaagcaatatttttgcggataggggcttggacgtgggggtggatgaggatgtggcagttgtcaacagtttcattagctcgcgcatgattgataagcggccaataccgagctcaaactccttgaaggagctgtcaaactccttgaaggagctgccgcctgctggccatgcaactccgaaacagcagctggcatccttaggcggcgcttcaggacgagtgatattcaaccgtgggccgacagtggcacaattccggagcacactcaggggggcggtcctgaggagggtgcggtgcaaaggaggaactgacggtggaggtcgaaccagcaggaatggcagcacacgagatgagacaaacaggagagccacacatctttgtgttggaccactcaccctcgagaggtgtttggttgcctgggcaagcctctaggctatgctatccattgatcaatcttactgaactattgaataactgtggaggaacatatgtctatttttgtacaaatagagtggactaaatcttcatg

SEQ ID NO: 38689 - DNA, 4507 bp, Zea Mays
cgaagctgcaacttccagatcgttctcatcccatcgtttcctcctctgctcaagcacggcagccagtccagccaccatttgggtgctcatctccctctgctcggcacccagccccagctcgcccgagctccctgcgccgacctcatcctccccatggtgcgtcaccttctactcctctccttcccacggcacagcagcgcccctgcagctccccttctccagatccatggcgcccaacaccttgagcgcccctgccgctgctcctccaccgggatctcctcctccactaggcgtccaggcttgtcccaccatggctgcccctcctccatctcctccctccccaccaggttacccagattccatggccgccgccgccccagccatctccctggtggccgacctcgcccctgccccagccacagctcccccttcggccctgctgctgcaagcactcagcccctcccatggcacacggagaaatcccatgatttgggggaagacgaagtccaagcacaacccccgccaatcgctcgatgaaaaatctaaaccaaaaccctcagcgttttcatgggttccggagggattttatgttggtaaggtgttgtgcggtgtgatctccaattccctattgctgatgtcttactccatcatgaccttagggaaggatgttttcctctaaattactcgtaataattatgcttggtgtatgtgttgttttagctacttgatgaaatgttttagttgtgtgcgataatatggttgccgttcgagtggaaagtagatgtgttgtatgacctgagttggagttgaagcaagtatgtgtgtctcgtattacgaaactaattagagatatgcatgatgtttgtagatggattatgtgtagagtgttttagtacaagtatttttttaggtatagttgaaccaattattgtatatgaattgtgcgatatcaaggttgttctaatgttcttttaacatcttgctaataaggtgttagagtattctaaatgccaaacataggataattttacaagccaaatagaagttaaattgaaggtattgatgtttagggctgtaggtatagttttagttatgcagctagtccaataaagtagatcatgttttctgtagaagcgttatatataaaacttgtagataatctctttatcttacttgtgtaaaaatttcatgaccataggtgtagtagtttaggagttatgatttttccaagtccagtctcagaatctgtccgaattctatacaggtttcgaaaattggattgtttggctaagctaaactgagaatcagcccttagtaattatagaagaattgtagtacttttcttaagctttccaacaaattttggagcaccctttttggtggtctagagatcaagttacagctgtttgaactatagagtctgaatctgtccaaatctggacagcgaagtctgtttgtagtaactgactttgatatgtattgaattaacctgagatgtttataaatgaattgtagacaattctattaactttctaaaaagtctaggatcaccggatttggatttcggaaactccagttctggacttttgaagtagttagtcgaattctgtccaaatctggacaaaatttatgtttagcgctgtttgacctttctaaaggtcgaatcttgttgtgatggtaatacaaaagttatagaggactttataagctttccaaaaagtcctagtttactatttttggatacatattttatgaattgtgagctaaacagatagttgttgacttgctgttctgctgtccaaacacatgtctactgtctgaaaatagctcattttgtagttacatttgcatcaggctttgatgattgctgtacaaggatgatatggcctcccgcccaaagctgtctggtattcagaagcaggttttggcgctgtacaggggattccttcggacagcacgccttaaggcccctgaagaacgccgcaggatcgagtctgttatcttggcagagttccgtgacaacgcaaggagtgttgaccgtaggaactttgtacacatagagtacttgttgaggagagggaagaagcagcttgagcagctcaagaatcctgatattactggactcgctacccttgtagtaaagaaatgagcaagagaagaaggaagacaagtcagacaaaacagaagacgagaagaggttcctaccataacacttaagcaaggaatcctgtacacttctctcctggggttgtgacttgtatattgtcaaggatcacttggatgtggtaaatgctatactggacactgatgatagctgcataaggattgtgcgaaaaaacgggaagacatccctacatactgctgcaaggattggataccatcgtattgtcaaggcactcatagagagggatccaggaattgttccgatcaaggataggaagggacaaactgcacttcacatggctgtgaaaggcaagaacacagatgtagtggaagagttactgatggctgatgtttccattctcaatgtgcgggacaagaagggaaatactgctttgcacatagctacatggaaatgggagaattttgggattatgaaacaccgcagacgtggcttcgacgaaacggaggcgtaggcgagggattcgacattatgaaaaaccagagaagatactacactctaaaatggacatgaatcctctattaccagggaaggatgatgtttattacactgaaacagacgctgtctcacatccgttacccgcactagacgcacccagtctttctacagagagaatcgcgccgttcttgaatctgccattcgctgaatctgccattcgctgctgttgtttctggacagtgaagcagtattccggacagtgaacaaaaatctgggaacacatttcattttcactgtcattggctaccagagtccgggaacaaaatctgggaacaaaatctgggaacacaaaaatctgggaacaaaatctgcctttggctaccagagtttattgctcccatatcattcgctgtccatttcactgtccattcgctgaacacaaaaagctgggaacaaactcattttcccagtgaacaggtagcacaatttagttcacaaaatctgggagcacaatttagttcacaaaatctgggagcaataaacaggttgaacaggtagaacaaaatctgggagcaataaactgccatcccagaacaaaattcgcagctcacatttcagttcacaagctagttcacaatttagttcccaggtaccacaatttagttcacaagctagttcacaagctcacatttcaatggagcaatacacaggtagcagtttgacaagctattacacaagctcacatttctgggagcaatacacaggtagcagtttcacaagctatcacacaagctcacatttctgggagcaaaaaacaggtggcgtagtagcagtcgtgtgttcatcttcatttgcagcaacgacaagttcacggcttggtgcttcatcttcatttccagctacaacaacgacaagccacctgctttggcgcggactagggttgtggtcgcagcgccgccgccacctgctttggcgcggggccgcgagcagcaagggagaagacgcggagtttggagagaaggaggtgcagcgccgccgccacctgctttggcgcgggaccacgggcagcagatctccgggcagcaggggaggagactagcaggggagggaaatggagattgaagaaaatgagatggaaggaagaggcttgacgggagagagaagaaccttgaagagagaagaacggctctggacggcagaagaaaacggcgcgtgggctgatagcgacggaagatcattattcgttctcctgaacgactaataacgatgggatctggaataacaggagcctgatggttgcatcagtagagttgaccacttctcagtattgcgagatgcatcttacatggtcaagaagataattcctattctgaactacttgctcgtgttcgtgtacaagtctccttatcatgtcctcctttcaagccagtctattctttgcttgattcatcacgggtgcacattattgtaattagaatcttcagagtactcgaaggatagttaaagctgtttggctagtccttcagattactaaaaatatagttaagaacatttgtattttgctatttcgatttccaacagtacaactattggggatgattgcttttctttataaaagcaatcaagtaatttcttagctaagttctagctataagttctgcatgacatgctattgcccatgataattctgacaggattgcttcaactctttcaggttgatcagttttgcctagtcccagtaccatacaaagatgttcaggtgaacctgaaaattcttctcaatttgacttgcaagctttctgatgcgagcactaaatagtgatttttttgcaattttgtatgagccttgtttgagtgaatctttcctttgggcagcatggatataaa

SEQ ID NO: 38690 - DNA, 8821 bp, Zea Mays
gcaaccaggccgcagggcgcaaggctcaagcctcaagccaacaaccgaatagagagagcagaggacgcactacaaggccgcacagacggagcagagcagctagaggagagaggcggcgtcgcggcgaggtggaagagagagagagagagagagtggtgaaggtgcgtgggttaaaaagaggaaacaaaaaagaaaacgagcgaggcagaaaacacaagcaaagagacgacagcaaaaataggaggccggaggcgggcgaggaacgtgaataaaatatcattcggagaaacaagagaggccggggaatcgcgtcggaattccggcgaatcggcgggatccggccgggatctgcgcgccggatgaggggtcggcaccatgaaatggtccacattactcagtaaggtcgtcttcgccggcggccagcagcagcagccgccacctccgccgtcgccgccgccggagtctccgttccacggccagcaggcggtccaggacctcgccaccccgaggctcagctccgcctccaccggcggggacgagggcggcttcgacgcggcggccgggagctcgccctctgccgctgcgtcctctgccagggggagaaatgaattggagtcggactttaggagattatgggaagaatttcgctcttccagctctgaaaaggagaaagaaagggccttaaatttggctgtagatgtcttctgtaggctagtgaagcagtattctagtgtagctcaattagttacaaagttagtagaaggacatattttttcttttgttattggaagagcttttgttactgatgtggagaaactaagaatccacagcaaaggaagaccgctgcgtgtggctgatgttattggcttcttttcggataccacagagcttggtatatgtccaggatcaaatttgttgtacgcagtcgaagtgcttgtgactgagacaaatgataggcaacctctgttggactctggtattttgtgctgccttatatatatcctcaattctctattgagccccaatgagaactccacagataccttgcctgttcaccaagaaggatccagaaatgagaaaaacaaaaatttggatcctatgcaatcacgacggcttgagttcagggatggtattgttccccttcacacaattcagctccatcgccatgcaatgcaggtccttggtcttcttcttgcaaatgacaatgggacttctgcaaaatacatcaggaagcaccagctgattaaagtacttcttatggctgtgaaagatttcaatcctcaaagcggtgatgctgcttacactatgggcattgtggatttattactggaatgtgttgagctgtcttacaggcctgagtctggggccataaggctcagggaagacatacataatgctcatggttaccagttccttgttcagtttgctcttacactttgtagcttacacaaaaatcagactctccaatcctcatccaagttagcatccgaagcggatgcatctgttccttctcacagattagaacaagatatattctcatgtgacctttcacctcagttgtctaggttgcttgatgttcttgtaaatttgtcacaaattggcccctcagaaaatggtggtgttagtagccctaaggccttgaggggttatcatcttcttgcactttttcttcataggagaatgtcactatttgatatgcaatctcttgatatcttctttcgtattgctgcctgtgaggcttcctttcctgagccacagaaatcaaagataaatcgaacagcaggctatgcgtctggaatgtccccagaggccagccttgatgatctcaccttacccaggtttgccgatgatatgtcttctgggggatcacatggggatctagatgacttttcagctcaaaaggattcatttagccacttgtctgagctggagaatgctgacttagctggtgagacttctgaattcatagtcttgtcaaatgctgatatggttgaacacattcttttggactggactatatgggttgctgctcctatatcagtgcaaataactcttcttgggtttcttgagaggatggtgtccatgcattggttcagaaatcacaaccttacaatgctgcggcgaattaatcttgttcaacatcttcttgttacgttacaacgtggtgatgttgaaattcccgtgttggagaagctagttgtgcttctaggtgtcatcctggaggatggttttctagcttctgagctggagcttgttgtaagattcataataatgacatttgatcctccagagcttacaccgaaccgccagattgtgcgggaggctatgggaaagcatgttattgtgaggaacatgttattggaaatgcttattgatctacaagtaaccataaatgctgaagagttgctggagcaatggcataaagttgtttcatccagattggtcacatatttccttgatgaagcggtacatccaactagtatgagatggatcacgactcttttaggagtttgccttacgtcatcaactacatttgcattgaagttccgtacaagtggaggttttcaaggattgaatcatgtgcttccaagctttcacgattctccagaaatatactatatattgttctgtttggtgtttgggaagcctgtttatcctcgagtgccagaggtccgcatgcttgatttccatgctctcatgcctagcgatggaaactatggagaattgaagtttgtggatctcttggatactataattgcaatggcaaaagctacatttgattccttgattatgaaatctatgcttgcacatgagaataacaatctttcacatcttaatggcaccttggtcgcggatcttgttgaggcgacatcggacatgggaggtgatcttcaaggagaagctctgatgcataagacatacgcagcaaggttaatgggtggtgaagcagcagcacctgctgttgctacttcaatattgaggttcatggttgatctggcaaagatgtgcccaccattctctgccgtttgcaggcggcatgatttcctagagagctgcattgatctctatttctcttgtgtgagatccgattttgccctgaggatggcaaaagatcttacaactgttgcaactggcgagatgaatgaacatgatgatgataatggaagtttaaaggatgccctttcaagtttaccacatgatcaggatcaatctaccaaaacattgagtgccacaagttttcctcaggagcagaaaagttccagttcagaaagtactggcatgccaaacccttttgaaactgctgaagccaaagcagatgattcttcgaatcaggagttcagcaataaaattttaaatggagaagcaaatcaaatatttaataatgctcgtgatcaagggcggatcacagcttccggtgcaaatggcatttctgaattccaccatgtaactgattcacccaactcagttgctatgaataatgttggatctcctgttttatccgagaggtcaacccacagagcagctagtacccctactgcatctccaatggccccattcacatcttggcctggcagtgcaggatcgtatactgatggtagacacctgacagcttctccatccatggcttcatctatatctgggatagacctggactcgtcccctgatctgaggacaaatattcagggaccatctgccgcaaatacccttttcccaatcaattccaagcttttgcttgacatagatgatttaggttatgggggtggcccatgctctgcaggagctacagctgttctagattttgttgctcaaattcttgctgacactatctcagatcagcttaaagcagcactctttattgagaacattttggagtccgtgcctttgtttgttgatattgactctgctctagtttttcaaggcttgtgtctaagcagattgatgaacttccttgaaagaaagctcttgcttgatgatgaagaagatgggaagaaacttgacaagagccgctggtcggtcaatttggacccactttgctggatgattgttgatcgtgtgtacatgggctgctttccaaccccactcagggtactacaaacactagaattcttaatgtcaatgttacagcttgctagtaaagatggccgtgttgaagatgccgtgcctccagggaaaggtattttgtccattgctcgaggaagcaggcaacttgatccatacatccacgcgatattgaagaacacaaaccgaatgataatgtactgtttcctcccaatattccttaaaagtatgggggaagatgatctacttgcaaatcttgcattcctgacggaaactgggaggagtttagcttctaaacgttatcaggaagatttttctattgatatttgtacagttcttcagctactagttgccaacaagagattggtgctctgcccaagcaatgttgatacagatctaatgtgttgtttctgcataaatttaatgtcacttctccatgacaagagagtaactgctcaaaacttggcagttgatttacttaaatacttggtagtgcatcgtcgtcaatctcttgaggaccttctagtttgcaagcctaaccaaggacaacaactggacatcctgcatggaggacttgataaattggtcactggaagtacatcaacgttttttgaatggctgcaaagttctcagcaaacaataagtaaagtgttggaccagtgtgctttaataatgtgggttcaatatattaccggctcagcaaaatttcctggcgtgagaataaaaggaatggaggtcaggcgcaagaaagagatgggacggaaatttcgcgaatctgcaaaagtagatgccaggcactgggagcagataaatgagcggcggtataatcttgatttggttcgtgatgtgatgtctacagagctaagagcaattcgtcaagacaaatacggttggatattgcacggagaaagtgagtggcaaagccagctccaagaacttgtccatgagagaggtatttttcctatgcggcaaccatccacagaacctgagtggcagctgtgtggtgttgaaggaccatatagaatgaggaagaaacttgagcactccaaatttaagatagatactattcagaatgttctaaccagcaaccttggatcaaatggtggtaagattatcaataaagaggatggagaattgttgttgacatctgggtcagacacaatgtcaggcttgaatcttttgacctatgacactgagcagagggatcttgatgctgtcgagttttcgtcattcaaagatgatgatgacatattcaaaggaggaagcacaatttcaggtccaattggctggactgatgataaaagcagcgttaatgagcagagccttcattctgcgacggaatttggagcaaaatcaagttccctttcttttcacatgactgagagtcaccagggtaaatctgaacttagttcaccaaggagggcaccttcagtcaaaggtactgatgcaagaacctcagaggataaatcagaaaaggagttgcttgacaatggtgagtatcttatcaggccttatctggagccctatgagaaaataaggcataaatacaactgtgaacgggttgctggtcttgataagcacgatggaatatttttaattggagaactttgcttatacattattgagaacttctacattgatgattccaattgcatttgcgaaaagggcagtgaagatgagctctctgtcattgatcaagctttaggtgtgaacaaggatataatgggaggcagtgaatctcagttaaaatcacctaccacttggggtgggacagcaaaggtcttgcttggtggcagatcatgggcatataatggaggtgcttggggtaaggagaagctttgcaacagtagcaacctgcctcatccatggcatatgtggaagcttgatagtgtccatgagttgttgaaacgtgattaccagctccgccctgttgcaattgaaattttcagcatggatggttgcaatgagcttctagttttccacaaaaaggagagagaggaagttttcaaaaatttgattgccatgaatctcccacggaatagcatgttggacacaaccatatcagcatcctctaaacaggagagtggtgaggggagccgtctttttaaagtcatggcaaaatcattttctaaaagatggcaaagtggagaaattacgaacttccaatatctcatgcatctaaatacacttgctggtcgagggtatagtgatctcacacagtacccagtatttccatgggttctcgcagattatgagagcgatgttttagatctgaggaatccacagacatttcgcaggcttgataaacccatgggatgccaaacggaggaaggtgaagaggaattctgcaagagatatgatagctgggatgaccctgatgtaccaaagttccattatggctctcattattcaagtgctggaattgtccttttctatctcttaaggttgcctccttttagcacagaaaatcagaaattgcagggtggacaatttgaccatgcagaccggttattcaacagtgtgaaggatacatgggtaagtgctgcaggcaaaagtaacacatcagatgtgaaagaactaattcctgagttctattatttgcctgaatttttggagaaccgttttaatctggatctgggcgagaaacaatcaggagagaaggttggtgatgttgttttaccaccttgggctaaaggcagcgccagagagttcatcaggaagcatcgggaagcactggaatcggattatgtatctgagaatctgcatcattggattgatcttatttttggatataagcagagaggaaagctgaagatgccgtcaatgtcttctatcactacacatatgaaggcaatgttgacatagacgcagtatcagatcctaccatgaaggcttcaatactagcacaaatcaaccattttggtcagacccccaaacagttattccagaaaccacatccacagaggcggactgacaggaaagtccctcctcatcctctacggtactgtgcctatctaacacagcaggagattcgcaagacagcatcttcggtgtcccagattgtctcctacaatgataagatcctaattgctgcagttaactgcttgctcaagccgctaacttataatgaatacatttcctggggattccctgaccgaagcttgagaatattaacatatgatcaggatagacttttgtctactcatgaaaaccttcatggtggtagtcaaattcagtgcactggagtgagccatgatggcaacattctcatcactggtggtgatgatggagttgttgcagtgtggagatttgtgaaggatggcatccgccgtctcctgagaatggagaaggctttgtgtgctcacacaggaaagataacttgcgtctctgtcagccaaccttactcattaattgtctcaggctctgatgactgttctgttatcttatgggacctgacaagcctagtctttgtgaagcagctaccaaggttcccggcatcagtatccgcgctacatgtgaacagcctcactggtgagattctgactggtgctggtgttctttttgctgtttggagcatcaatggggactgccttgctgtggtgaacacctcccagcttccttctgacctcatcttgtctgtgacaagcgcgacacactcagactggcaggacacaaactggtacgtgacaggccatcaaagcggcgcggttaaggtatggaagatgttgcactgctcgtctgatgaagcagtaaatagcaagagcaaatcacctgcggtatcgtctggtgggcttagcctgaacggccaagcaccagagtataggctacttctgcagaaggtgctcaagtcacacaaacaccctgtcactgccctttgtataccaccggacttgaagcagcttctgagtggggatggcagcggtcacttgctctcatggtcattgaaagacgacagtttcaagggttcatagctcagagaaatatagggattcagctgcacatatagagaaacactggttaaatcttaccactgatttcttcctcgtccagaactgagcattggcgtgcattgacaaaagagctcggatcagcaagcttctacatggtatatgaaatgttcccttgatgtcccatgcctgggccatacagcagtccgggcaggagagagaatacaacagacacaattggaaggatgaagtggacgtggatgcgctgctgcgctgacatcataatcttatactgtgaattatgagatggttgtaccttctcttgtttttttgaggagaaaaggattcatgtgggctgtaggtgccattgtttgtaaagtctatacagggtaattttggtggtgccggttgaggtggctgatggtgtagtgtctcgatgttttgttcggggttgtgggagcaaggaaagaggtattagtttcattttctccccccacctctggaggctagtttgggagccacaaaaccgaaagtgattggatggactaaaagcttctacatattcaaaattgaataagaacgagattttaatcacttcaatcctcttcgattttgtggcttccaaactagccccagaagtgttgattctttgactgggtgtaatttgagcacccttgtgttcagtaagtctatttgcgtatacatgcaagagttttgctgaacaaagcgacgagccccttccatggttcgattggaagtgaagtgtagtgtcgcagatattttctccgccctaaattataagtagtttgattttt

SEQ ID NO: 38691 - DNA, 2832 bp, Zea Mays
ctccgctcgccccgcggttcccgcttcctacagccctccggtcgactcgggttcccacttcgccgccgctcccccgtttccttcacctcttctcctgcagtcctgcgcaccttcctccctcccagagtcccagtcaaaccctgctcggaagcaaacggacttcggatcctcggctttaccactcgcctcgcggacttcggggtttagtttgggacccgttgctccggagttcttcttaaggtaccctgctggaggttgttttgtatcatggagagtacagacaagaatgacaaaagaaatgctgtcacagaagagtcttctaatcctggacaaaattgtgaagatgacggggatttttcaatgaaaactgaaatgttaaatgtagaagaagcaccaagtttctcgaatgacaaattaaacaacgaatcagaagtgcagattcaagagggaggtaatgattcagaagagggcttaaacggacaaatgaatgaaaggacaagctcagatgtcatggaatgtgcaagctcaaacgagatcacaaaagagaatctttctgaagataaaactgaagagccagtatttgatggaactgaggttcttgaaatagaagaaatgaggcgttcttccaatcaatctggggaacttgactcagaggctcaggggtctgtactcaatgaccgggctgttgcaataaaaaattttgttaaagaaaggagtgcaattgcagtttcaacatttatgcggcgcctttctggcaaaaaggatgagaatgaatttaaggctgaagctgacaagactattggttcagaatacatggactgcgagaaaaccaggacagatgctgaatccaatcctaaagaggtgcaacagaaatctgtggaaagaactgtctggaacccactgaacttcattaaaattggccgggattctgatacttttgtaactggggaagcgttgaatgaaaatgtgcctggtttgttggagataccaccattgaagggtaggataataatatacacaaaactgggatgtgaagattgcaaaaaggttcgtctattcttgcttcggaaaaggctcaagtatgttgagattaacattgacatcttccctggtagaaagttggaattggagaagaatactgggtcatccactgtaccaaaagtgtattttaatgacctactaattggagggttaattgagttgaggaaaatggaagattctggcatacttgatgagaatatcgatgttctgttcaatgaggaatccccatattctgctccattaccccccttacttggagaagatgatgaatcaggaagtgggaagattgatgagctggcaaccattgtcaaaaaaatgagagagtcaatcactcctaaggatagattctataagatgagaagatttagcaactgctttcttggtagtgaagctgtggatttcatatcagaagatcaatatttggagagagatgaggcagtggaatttgcaaggaagcttgcaagaaaatacttctttcgtcatgttctagatgaaaatgtcttcgaagatggaaaccacatatatcgtttcctggatcatgatcccatagttatgactcaatgttacaacatccctaggggcatcatcgatgttgcaccaaagcccattgctgaagtagcatcaaggctgaggttgctatcctgtgccatttttgaagcttatgtatcagccgatggtagacatgttgactaccaaagcatccaaggttctgaggaatttaaaagatatattagaacagttgaggagctccagagggtggaaattgattatttatcacgtgaagagaaacttgctttcttcataaatctctacaatatgatggctatccatgcattagtgacatgtggccatcctgctggaccattggacagaaaaaagttttttggagattttaagtatatcattggtggatgtgcttattcactgtcagcaatccaaaatggcattctacgtggcaaccaaaggccaccatacaacattgccaaacctttcgggcagaaagaccgaagatccaaggtggcccttccataccatgaacctcttgttcactttgctttgatatgtggcaccaaatctggacctgcacttaggtgttactcaccaggggatatcgataaagaattgatggaagctgcacgtgatttcgtgaggaatggaggactgattgttgatcctgaagccaaaattgcatctgcaagcaagattttgaaatggtatagcacagattttggtaagaacgagatggaagtgctaaagcatgctgcgaactatcttgagcccgcagagtcagagcagctcttggaactgctcgccagcactcaactgaaagtcatggtggtgcttatcatttttctgaattccgttcagttaactaaatgagaatcgccgacgccgtcttccctaccggagctattaagatttacaaacggtggtgatgttatcagcacggccggtgatgtggagcgagcgagcatgcgtgaacgctgctgcagcgcgcatgattgcttggaacaattaacttctcgccattacgagcgagcgtttgagctgcacgtattttgttttgttgactggctcgatctgaaaaaaaagctgattctacgattttcctcttaccttttaaactctccaaacagtttaaattacctgtctcccatggtttataatggcattttgaactcaaaaccgttgaaattacctctactatggtttaaagtggccttgaagttgattttgtgctttttagttacaaaatccaactaagtatttggtgaggtttttaattcaaat

SEQ ID NO: 38692 - DNA, 1883 bp, Zea Mays
ctgagagccatttccaccgcccagcacgctggacccacctgccggcgtcccgaagagcggaacacctgaagccaacgccggccgtgctgcttccgctgcctcatcgcaccaagccaccagtccgcagcacgaaagcttccccccctctcttctcctgctggttggctcatcaggcctgcccgaataatcctcctgcggattcccctcacggcaggccaaaacccgcacctttcccccgtcgacagattctcaaacccggcgaactccgggcagggctcacgtcgccgatcccgctcccggattctctttgccgccgcgaggagacggcgtccagtccaggccttcagcagctccgtctccgtgtgtatctgatcgggggattctttgcttgagaaactgctagcatgggcgcggtgcttggacggcatgacacgcacaagcggagttcccatggttcgaagctggaggtaaagatggtcgacgctatgcagcagagagcatcgcatggaacctcactgaaatcgttcgatagcattatcatgaagttccccaaaatagacgagagtttcagaaaatgcaagactatcttcgaacagtttgattcaaatggcgaaatagataaagaggaactgaaacattgttttcaaaagctggaaatctcattcacagaggaggagatatgtgatctctttgaagcttgcgatataaatgaagatatgggcatgaagttcaacgagttcattgtctttctgtgccttgtctatcttctcaatgaagcagctgtcttggaagcagtatccttcataagtcatattaattcacatagtaacatcctgattgcattattagtgttattgtcacattgtgttgtgttgctacagaggtatgcaatgtaattttacttcacttacaaaaaggtaattttactttgataatttttcttaaatccattagcgaagtcttggtttctttatataattacacgtggttcttattggcaaatttattgtgttgatggagacaccaattttcatcctaacataagcttgccgcaattttgattggattatgaaggtttctagatttactgtgagaatttttttgcactcggtgttttagttctcttagatcgtctcagcagtctacccatagtttacccaaaagcattgttttgcactgttctgcattataaattacactgttcgcagagtggagtttgaatatgggtatggagatcggtaagctgctggagatagtcttatgccatttctgttaggagcgtccatgtttcctttacatacttcacagaagataaagatgggactaggaaatcttgaggcaaccttcgagaccttggttgatgcgtttgtcttcttggataagaataaagatgggtatgtgagcaaggatgagatgatccaagcaataaacgagaccacgacaggagagcgctcttctgggcctatagccatgaaaagatttgaggaaatggactgggacaagaacggaatggtgacattcaaggagttcctgtttgccttcactcgctgggtaggaattgatgaaaatgaggatgaagatgacgatgaataaggactgtgaaggctggttattcttcaagggttagggccagatcagccttggagaagctggaaatggatggcggataaaagcagttgacgtttattggttgcttgttgatcgtaatattcatgccattgctaatagaatgtctcgacattatactcctagtagggtgacttgcatgtctgaacactggtatcaatgttacagttgctgtctactttcttccatgccattcagccattgttctactctgcgctagcccgcgccgatccatttcaatcgtgtgcagcttcttg

SEQ ID NO: 38693 - DNA, 3425 bp, Zea Mays
catctaggacggcggatgctcaaaaatgagaaatgctcgccacgtctgcaccatgcatgcgctaatgtttcctctctctcctgtcgtgtttccttccaattccattctagcagttggccagaaggcaccacctttcccttcgcccgcaggcttttccgatccgcaaccagaccaaactccacaacatttcctcaagctgttccttcaagaaacctggatcaatccaaccttcaatcgcacagtccgtgggatctcccttgagttgcgatggaagaggggaccacggaacctggatcattctcccgctcttcctccttcgttggattcgaggagtgggtggcattggtgaggaaacgcaatgggaaggcctcttcgtgcgggcgtctgggtctccgttcaacagccagttcagaagtactagaacttgcagatcctgatagcaatgtcattaatcctgacccttgtgaccaagtgccagaaggaatcctttgggagaggcttgggagggtttccatgatggatattgagtcaagtgacttcagttggacctctctcacctcactgcaccatacaaaacatacggctacaagtactgatccatctgaggatgacattagcagaagttttgaggtgacagtaaattctgggggcattgtttttattgcattattcaaagctattgaaaatgttgatcttccgtccaaggaaacagctgcagtaattaaaatagcaccttcaaggatggccacacagtctgaacgctttgggtacgaactcgctaaatggcttggagtgagaactcctcaaggtagagtcattcatagctcctcagatgaatggcaacaagtcaaggatgcagttgaaaatgctcgaaatgcatcgatagcttctggtgatgaacttgaggagatgatttgcgccgaggttttagaagcccttgaattgagtcgttgcctatttctgatgaattatgtacatggctccgctctgctagagaatgtaatgcccttcgagtcacggcaagctgctgaaaaaactgctgaagcattaggtagggtcttaatcttggacctcgtattgaggaatgaggatagactgcgatgccgtccccttggctggcgtggaaattatgcaaatctacttgttgccaacagggaagcttatgccaaccttgactcactagatgatgtttatgattctgctatcattcgatacaagccagagatcattagaagccctcagaaacagaagcagagaagagctgtttcaattagtggcagtattggctcagatgtctctgacctcacattggaggactcttatgcttctagtggacatgtgttttctagctttaatattgtagccattgattcaggtgtaccacgcaggccaccagccagtaagcgggcaaaagatcaggagagctaccccaaactagtggagttaacattgaacaacttcgactattcttccaaacttctgtttgaggtgtccttcggaaaacttggcaccccaggacatgaagaatttgatgtaccatcagactacagttataattctcctctctctgagagtgatatggtagcaacagtgcattcattccgaggaggttttcgtagtgctctgagagaccttcagcgattccacatttttctcatcacactgtatcagaagctggatggtctattaaaaattttcttcaaccttatgtataaatgttccaatgaatatgctagggaggatgctggtacttcggattcaccattgtgttcagtggaaccacaaggagattcaaatgatactgatgttccaaggcatctgcgtaagccttcccgaaccttatcccgtgagagtctagaccaatcatctccttgtcgggatagctttatcaccagacatttcaaaggaaatggtgattcctcccgtggtcttcggttgacaatgaagctgcgagattttaacaagtatgccaagatagacagtgaattaagcaaagagatagaacaatggaatgacatgctgaggactgaagtagtaaagttgtgtcaagacaacaattttcaaacaggtttttttgaaggcactgataatagcactgttgttgatgcttacgagttgaaggttcgacttgagcacattctcgagaggatatctttgatctctgatgctgcaagtactgagcgtccatcacagatcacagattatctgtatattggtggtgctcttgctgctcggtcaacacacacacttaaacaccttggcatcacccatatattgtgcttgtgtgcaaatgaaattggacagtcagaatcgcagaagcctgacctttttgagtataggaatttctcgataaacgatgatgacaatgcagacattggtgatctctttcaagatggttctgatttcatcagttatgtggatcacttgcgtggcaaagtacttgtgcattgctttgagggaaaaagtcgaagtgcgactgttgttcttgcctacctgatgctgaggaagtaagactgcacagtaattactatatcatcactatcatgcttctctgttaaaaccaataactcaccacgactaaaacaatctattaacagatttactatttttcatgtgatcttaaggtctatcaacccagaattgacatctgtaaggataggaagattggaattgcatctttccttattttttattgttctggacgcagtcatcatctcgtaatttcccctttttctcttaagaaactgtactctcctggaagcatggaacatgctgaagaaggtgcaccgacgcgcgcatcccaatgatgggtttgctaagatcttgctggatcttgacaagaaactgcacgggaaaatctccatggaatggcaacacaagaggcctgcaatgaaagtgtgtcctatctgtggcaagaatgctggtctcagcagcagttcactcaagctccacttgcagaaggcacacaagaagatatcctctgggagcgtagacagtgcaatgactctggagatacaaaaagcattagaggcaatcaaagctggctggggcggcagtgacagcccagtgcataaatcacaatcacacatagaaggattttgacgtttaatcttacgttcctacggtcctattaatatatcaacaaggctggtagtcggcgaccgctttaagagtgaagcctcagctctagacttcatgacacttgtaagtagcacatttttggaacatttggtttttattctatagttcatgagcttggattgacaagaaccatccatagagggaatgtagtttctgttataaaattgtgcgattcttttttcatgaaacttgtacgagatgagcattcagattctttggctatcaaattttgaatctgttgtcctgtataatcagtttgttcaaatggacaagctcttctttta

SEQ ID NO: 38694 - DNA, 1621 bp, Zea Mays
gactgacacgagccggcccacgtccccgccctcggccttgtggagtggaggccaagcccctcgcgaaaatccccccactccaccaccacttctctcgctttcgctttatcacctgtcgcccccgcccccgagcctggtcgccgcttcacccgccgtcgccgtcgtcggtcgggacgcctccgggcggccgcgccctcgacggaggaatgtcttctgttgctcccgccctcgtccaccaccgcggggtctcaggcagagcaatcttacctttgcatcatggagaatgcagagtccctccaggtgcttgtttcatgggcacatcacctacgttggggccaatgagggtatccttggtatgtaatgcaagccccaaccaccataggccaaggaattcggatatatcgcgacaacaaaaaggggggtcctccagaggaaaaggcaagtcgtaccaggataaagatgactctgagaacattgatgaatttgatagtgatatcatgttctccaagaatgggccaccaatctctttggcaagcaattcccgtcctcaagccacatcggctcctggggaaagagagaaggagatcgtggaactctttaaaagggttcaagcacagctgcgagctagggggaaaagcagggaagacaagaagcctgaacatgcaaaagtgcagggtgaaaggggcagtgttgattcacttcttcagttgctcaggaaacactctgtggaccagagaagaaagaatggtgacgacaaagagcagaattccgatgtattgaggagaggcaacgattctggaaatagacaaggttcaaccgtctttggcacaaaaagtgacatccaggaagagaagaagaagccacctccggcacccttcataaggccagcctcaaatttcaggcgaaggtctcctgttcctggagtgaagttccagcctgttatcaatgcggatctggacactgatgacgatcgcaagtccatcggcagtaatgccgtggatgctgtacagaaagctaagacagctcttgatgagaggactgctacagatgagcctgactccatgtctccatatgaggcggattctgtaatagaaccaggaaacatttctttgaatgacctcgatgacattttacatgacgatgaagaattcgatgcggatgaaccagacgacgagtatccagaaccttctttgggtatctctgatgtcacagatacggatgagtcgcacgagaacgactccacccccacgggaagtgcggatctaagctctctgaaggttgcggagctgagagagctcgcaaagtctcgaggaatcaaagggtactcgaagaagaagaaaaacgagctggttgaagtgttgagcagcagcatggattgatgataaagtgggtgacctggcgctctgtttgaagtttgaacccactttgcttggccccctctagaaaattgtaaatgagcaaggctaactctgttccggtctgtgctgatcttttgctggttcattttgtacgcctagcttggtagccgtttagctgaattctgtggtgactgaaggctggcaattattggtctgcgctgcgctctcgacgccgtgcagtagctgcggctttgctcatggaa

SEQ ID NO: 38695 - DNA, 2910 bp, Zea Mays
atttcctgttcctccgcctcgtctccgcctcccatcgccgcatcagatatccgcacaaaccaagccatcagcgccatggcgatctccacctggagcgcgcgccttctcctcacccctgcttcctcccgcgccaccctatcaccccctcgccctcccactacaaacccgctctcatcgttctttcctcgcaatcgtctccatttcgtgcgcccgcgcccgcgcccgccgtgcgcctacatctctgcgccagcgccgggcccggaggccgcatacgcgccgccttctctcgacgccaccgccgcggcagccgatgtcgccgctgcgatatcctcctccgacgcggtcacttgggccggcgtctgggcgctgctctcgcgacacagggcccgcatcgcggtctgcatcgccgcgctcgtcgcctgcaccacctgcacgctctccatgccgctcttctcagggaggtttttcgagaccctgattgggagggggaacgagccattgtggaggctcttatccaagattgcgatactgtacacactggagcccatcttcaccatcatattcgtgatcaatataactatcatctgggagcaggttatggcaaggctgcggagccagatatttcgaaggattctgatccaaaagatgttattttttgatcgtcacaaggttggtgaattgaccggtttgttgacatctgatttgggttccttgaagagtgttgtaagtgataacatatccagagatcgtggactgagggcactctctgagatcattggtacactttgtatacttttcacactatcaactgagctagctccagttcttgggctccttatggtgtccgtctccgtgctagttgctattttcaagaggtcaactgttcccacttttaaatcttatggaatcgtgcaagcacgcatatcagactgtgcatcagagacattttcagctattcgtactgttcgatcatttggtggtgaaaaacgacaaatttctttgtttgacaatttggcacatgcttaccaaaataatggcacaaaacttggagtgctgaaatctgctaatgaatcattaactcgagtagtcgtctatgtctccctaatggcactttacattcttggcggtagaaaggtcaatgcgggcaaattatctgttggaaccatggtatcttttattggttacaccttcacattaacctttgctgttcaaggagctgttaatacccttggtgatctgcgtggcacattggcttccgtagagagaataaattctattctttcagcgaaggacattgatgattcacttgcatatggtttagccaaagaacttgatggcaaagagtttgatgattccaatggagtgtatgaaaatggatctgttaacaaacatttcatgtcagagctgaaatcatccagtagctgtagtaatctagcctggtctggtgacattcgtctgaaaggtcatattattattacatctggtctggtgacatttgtctttacatctagggtgcccttatatctaagcttatactatatttcaccttttgtatgctttatatattattactatatagcgtattgttccttagcttatgggtcatgattgaatatcctcgtaacttaaaattgtgtcattagctcatcttttctaaaatattgtttcaccttctttatctaaaaacatacttaagatgaaatatgttcacacatcaaatttgtgaatagtactggtaactcaccagtgtatcattacctcgatagaacattatttcttttgattgtttttgtaatgtcgatagaacatgcaacattcaacctctaatgcactaacataacattcttggatgacttcagttctacttgctcatgtagtcatgtgtttctgacagaagtccatttctcttatccattgagatctaatgtggagattttaaatggccttgaccttacaattgagtgtggaaaagtcacagcacttgtcgggcctagtggtgctgggaaaagcacagtggtacaacttctagcacggtattatgagccaactcaaggttccatcactgtcgcaggagaagacatccgtgtatttgacaaaagggaatggtctcgagtagtatctctagtcaatcaggatccggtcctattctccgtgtctgttggagaaaatattgcttatggtctcccagatgatgttgtctctaaggatgagataataaaagctgctaaagctgccaatgctcatgaattcatcatctctcttccacaggggtatgatactcttgttggagagcgaggtagtctcctaagtgggggacaaaggcagaggattgcaattgcacgagccctcttgaaaaatgctcctattctaatacttgatgaggctactagtgcactggacgcgacaagtgagcgactcgtgcaggaagctctcaatcacttgatgaagggaaggacttctctggtcattgctcacaggttgagtaccgtacagaatgcacatcgaattgctgtttgttcagagggcaggataactgaactggggacacaccgagaactggttgctaagggaggcagttatgcatcacttgtcgggacacagagacttgctttcgagtaatcacacgtcaactgcgaggaacggatcgactgcaatgtaggggattctatatattactctattttccttcagggcccatcggaacataggaattctcgtggaaatcagaatgaatttcatgggtaaaatatagaaaacagaagatgaaaaaaaacccaccttctgaatgtggccttggttataggttgtttcttatccacagaagcaacacatgaatcagaaaacacatgtatgtatcgaactttataatatattaacctaaacaaaggacaacaaacttcttatcctcac

SEQ ID NO: 38696 - DNA, 3371 bp, Zea Mays
gtcactttcaccagctctcactcttatccacccgcgcgcccaccgccgcgcgcagcaccgcgccgcccacccgcggccaccccagcgccccaaatgccgctccaaccctagcctctcgccatgcctttcgatctcgggcggccatgggaaactgatgccgctcgccggtcgccgtcgcgcgggaggacgtcagctcctcgcacttccccgcatccacctcgtcatggagctctgcgagggcggcgagttcttcgaccgcatcgtcgcgcgggggcactacaccgagcgcgccgccaccaatgtcactcgcaccatcgtcgaggtcgtccatttctgccatcggcacgacgtcatccaccgtgacctcaagccggagaacttccttttcgccaataagaaggagaactcgccgccgcgcagcgcccctctcgatatgccgccctgcttcctcctctcctcttgatccatctgccatcccatccccgctctgccagttgcccctcgcttcctcttcggctcttcatccccctcgatccgtcgcccgtgcttcctcctcactatgtcccgtcccctctccatcttgtcgccctgcctccccgcgtctgcgtctgcgcctgccttcggcgtccagagccatatccgcgttggcctccacctacgcacccgcctctagccataagagctcctcccgtgtctgcctttagagatctgctacctccacatcggtgtctagggctcctccattgcctagatctactagagtgagtgagcctacagagctggcctcatccaggctccagttccaccccacggtcatcctctgttgctctacgtttcatgcttctcacatcctctcctcaatctcatcaactgtgctgaaggaggcagatgaaagtatttccgtctcatcaactgtgctgaagaggaggaaaacacctcacttgttgaagggagcagtggagacccggaggaagatcatttggagtctgcagctactaatcttcagcctggcagtgacacttgcattgcaagggaagagttgccagatcagaaggatctggtgaaactgcaagctgttatccgtggacatctagaggcggcccatgcctcacggccaaagcagatcagatgagattttttggtcttgcgtggttctttttaatctactcacatgatacttcttattcattgccatccaatttaattaattgccctcgattgaattggttcctttgccattttacttaggaggataaaagaagacactaccttggcacatgcctgttgtcacaatggacaaaagaagattagtgttgtgtgagatttttttcattcctttgatctattgcatgctatttgtaccctaatcgacaaaatagatgagactcaattcaggagcaaatcaccagtcctgttcacagtccaattcactatggctaaaatatcaaacttatgctccttgaggtttgttttttccttatcttcctttaatatctgatgactgatggactggtgagttcatgatctgcttcatgcttttccttttatatatggtcactacctcactggttagttcatggtgctttttgtctacttctttgcccaaaaaaaatcccggggcgaatttcagcatgcttttcctgcttccgctgtgcaaattcacaggatgcgtgggaaatgtgttcttgtttcgtcgggtggtgttcttgccattcgttttagctcaacacaaaacaaatgcttcttgttcttcaggtcgccctgtgtttctttctcgccagtttgggccatggattctggtgtgcatttgttcaatatatcttagtatcttatttaacaatcagtacttctctgatgctcaagagatcaatttactcaaagtagcaaactgtatcatagttgtatactttatcaaacgaggaacctgatgcttgtagtataagcctcattttgttccaaacaagacaggcttcggatacaatcacctggaaatcaatcagtaaacttttgctattcagttttttaaataaaaaatttaggccttacgactttcctcgcaatgtgttcacatgtagattaccttattgcattgcctacttttgtccgttgtgtaaaccaatcttttatcatttatcaaatgattttgctcttaacattaacaaattatcgtttggtcatatgcaactaatgacatcacattaccaagattctggggacccatcgctaccttgtgtcaacagtagactgaccagatcagttttgttatgaaatcatggaactggcaacatgatagaatttttcaaggaaaaaaagggaaacgctcggcggcgaagctaaagcagagcttgcgctacacgcgctgcgagcagtttctgtctaaagggcaaggtctgatctcatatttgagctccccgtggcactgctcgcccggccagccaccatcccggtcttgcgctcggcggcgtgcatgggaagagacgacgataacatggacactgttttctaaatggatcagtatttttgttgcggctctggataaactcgaagctgacctatccaagttcgacgacgggcccttcttcctaggccaattcagcttggcggatgtagcgtacattacgattctggaaagggttcagatatactattcccatcttaggaactacgacatcgccgaaggcaggcccaacctccaggaattcatcgaggagatgaacaagattgaagcgtatgcgcagaccaagaacgatcctctgttcttgcttgatcttgccaagaaccatcttaagattgcctgaagatgtgacaaagcagcattagtccgttgatcggtggaagaccactcgtcagtgttgagttgaatgtttgatcaataaaatacggcatgttgttgctgactttggacttgcaaagttcactactgataataacacccatgtttcaacaagagtaatgggtacttttgggtatttggcacctgagtatgcagcatctggcaagctcacagaaaaatccgatgtattttctttcggagtcatgcttcttgagcttattactgggcggcgaccaattgacacaacccaattggcactgcttgttataagcacatatgtacttccatttgcatgttgtataatactaataccaattgcaaaattatagttattttttctacccttgttagttaataagcatatttgtggtcaataggttgtattcttattcttgtaaccgtgttaattaatgttatggacttgtagtcttgtattaccttgtgaatatatctgtccctgcctgccatgtgaacgtgcttagcctggaatttgtgatatgtacatatatccatgtgtttgaaatctgtattgtatgtg

SEQ ID NO: 38697 - DNA, 1109 bp, Zea Mays
tccgcacttaatttttggtaacaaactacattcaaaacccacagctcgccgctataccaactcagccgtaaccaccggccctgatgaatcggccaataaagcatcgtcttgacggcctccttaaccacaccgccatactctccagcctgctaaacaagctagccgccatcaccaatccacaagctagcaaagatgggttgtgcggaggagatcaatctggccgaactgtggcgggatccttcggcgtgcgtgaccaaaaaaattggagagccaccgagactagtagactggtgggaatcgcatcgaccgtcggggttggccaccgccgtgaggcacccgattgctgcagcctgttctgtctcatcgtccattgaaggtgagcgacatctattgttttcataggcacctgcgattggtagatcctgctcgtaagtatggaggaagggggattgaggccatttggatgggttacccggtgaatcaccacagccagattcatcctacgctaaggcggcagcatttgattctctatatgtcgcgagcaccccggtttatcggtagcttctctacgggacctttctcccagtctagttaccacgcagcgccgatgacctattgtcgcgcatagccctaagcctatctccccattaatgccggagctcaccaccgggggatgcatggcatgaccatggctgtgaggcgagaaggaagaagacatgtgtgtcgttcggtctatgttggacgatcctgattatgggatcaaaccgtttcggactgattcatttgggccattagatgtgagctgaacgatccacgttagacctcagttcataacctttgactatcgatcgaaatctattggcctggttcgctcacccccacagatcttctgttcccacggtcatgtagcccatcatgtggctagactctagccaatgagatcacagcacgtcgcctataatccgtgaaatattatttactcaatatatttgcgttgtagatccatttcaacccgttctaattgcgttaagtttgtaataatataatctacttgttagaaacattatttgtcacgacacatttttgattgattaattaattaattaatt

SEQ ID NO: 38698 - DNA, 924 bp, Zea Mays
tttagaagttttagaggtgatcctccgcaacaagttatcccttgtattccgttgccgatgtgtgtgcataacattatctatttacaattggtatttattttactgttggatttcattgtatgtattgttttcagttttctcatactacttacggcaccttttcagataattacaacaatgcggactctttaccaaacgtgcaaactggtccatggtgatttgagtgaatacaatattctatattttgagggtcacttgtatattattgatgtttcacaatccgtcgatcttgatcacccttcagctttggactttctgaaggaagattgcttgcatgtttctgacttctttaaaaaacgtggtgttcctgtcatgacagtaaccgatttgtttaattttgttattgatcaaagcatttctgatgaaggtgttgatgattatctggaaaaggctcagcaaaagattttggaaaacggtggtgcggttccaaatgatgatgaaattactccaacagtcatggtgcagacgttggactacgtgaagcaatgtgaggcagatattgtcaacatgtcaataatgcaacgttcatcctctggctatgagccaaccgcagataagctttatgaccagccattgttaggatttgtgcggactaaaaacacacacactgaaaaggagcaaggacaaccggcacgaaacttagttgaggttgaagaagacgagagcgaatcttgctcgagttctgatgaagatgattcgtggcacgaggatgatcctaaggtgggacccgaggaaaggaaggctgctcggaaggaaaacaagaagaaagtgaaggaagagaagagggaggcccgcaagaccaagatcccaaaagctgagaagaagaagaggaagaaaatggcaaaggcaaaatgcaagcggtag

SEQ ID NO: 38699 - DNA, 3122 bp, Zea Mays
atggcgagcgggggaggggggattcgggcgacgacttcggggaggatgaagtcgcgagggtggggagattcaagcgacgactttgggacaccggctattgcgctgaggcgtgggggcgactgtagtggcacggcgagttcagactccagcgccgtcttcttcgcggtcgccttttgcgctccatcccctgggctttccgtcacggcggccgcagccatggtggagatgcggcagcggaggaagccgctggtgctcgcctccacgcaggcgctcctcgactcgcttccgggggatcgcccgccgccaccgccgcagaagccggtgcgccttaaggccggcgtcctccgattcccctccggaggtggtggcgccgagttcggggagctcgcgtctttcgtcggcatccctgcccctgctctccgacggctcgcggtcgtcacgggtactcctgtgcttgtcaagaatactgacaataatgttgggaggattgtcaaagcagtattgtttggtaacccgtcccttgacaagtcctgctcagaacatactgaccaagtgatatattcatcctttggaggaagtgagtaccaagacatggtagatcaagctttgaacgagtactttaagtttgataggttcctagcaagaggagatgtttttggtatacaaaacagttggaagtgtggctcaagctgctgcctggcatgcaataagcaggataataaactgaatccccgtaatatgatctactttaaggtgactggcatggaaccatcagatgaacctatacttcgtgttaattgcaatgaaacagcccttgtacttggtggagctgcttctgctgcaatccccccttattccttttttgcttcttctggtaattcagtaccattgcacagtgaagtagtggagcatttagcatctgtcattgcaccagcattgtgcccttcggatattttaccaaaaataaagttttccacttttttatatggcccgccaggatgtggaaagcgcacagtggttaggcatgttgctaaccatcttggtctgcatgtggtcgagtgtagctgtcatgatctgatgacatcatcagaaagtggggcacctgctgcacttgcaactgcctttaaagaagctcagaagtattctccttgtataatacttcttcgccactttgatgcaattgggaatgcatcctcaaacgaaggtccacagtctgagcaatctgggattgcatcgaacattgaatctgtcattaagcagtacattggacaacgttgggttgctaaggattcactgccaggaaaagatgtaaatgggagctcatacctcgtggagcctgaatgtgtaagctctcttcaaatcatactagttgcaactgcggacagttctgaaggaatgcaacagtcaattagaagatgcttccgctatgagatcgacatgaagactatgaatgaagaacagagaaacgaactgatatctgagacacttcaaggcattcctaaagttgctgatgagagtatttgtgacaagttcataaaagatttagcagcgcaaacgtcaggtttcatgcccagggacatacttgcattggtcgcagatgctggtgtgtcttttgcgcataaaattgcagcagggaaagatagcaaagcaatcagtaagcatacggaggtccttccagaaagctcttctgccactcaaaatgaggaacaccatttcagcaaagaagatattatgtcttccttggaacgagccaagaaacggaatcgtgctgcactgggcacacccaaagttcctaatgtcaaatgggaagatgttggtgggctagaggatgtgaaaaaggttattctagatactattcaggtaaattggacttgattcaactgtaaatatcgacagcctcaatagtactcgcaattatgggtgaaaacaagtttttccccctacagtagtttcagcactagaagctggctcgtcaattttggccttttgcaggatattgaccttttcttttatacttgatatttcagttgcctctgatgtacaagcacctgttttcttctaaattgcgcaagcgatcaggtgtcctgctatatggacctccaggaacagggaagactttactcgcgaaagcagtagcaactgaatgctcattgaactttcttagcgtcaaaggtccagaactgataaacatgtatgttggagaatcagagaaaaatgttcgggatatttttgagaaggtacagaatttacacagccatgtaattgtgtgaaacgtgcatagtttttttttcagttttccactgtcaatctcaggctaggtctgcacgcccatgtgtcattttctttgatgagcttgattcccttgctcctgcacgaggatcctcagcagattctggcggtgtcatggacagggttgtttcccagttacttgtggagatcgatgggttgagtgacaacagccaggaccttttcattattggggctaccaataggcctgaccttcttgattctgcccttcttcgccctggtcggttcgacaagcttctttatgtcggtgtaaatactgaggcatcatacagggaaaggatccttaaagcacagacacgcaagtataagctgcacaagaacgtttctctcttgtcagttgcgcagcgttgtccaccaaacttcactggtgctgatatttacgcgctgtgtgcggatgcatggtttcatgcagcaaagcgatcagttgaaacattcgaaatcgatccttcaagaagtaatgaagccagtgccgaagaagtcatcgtcgagatcgacgattttatcacggtgttaggagatatcgcaccgtcgctctctctggacgagctacaaaactacgaacagttgaggcagaagatcgaaggaccttctagatgaatgccagcagcgatgcctccttgttggtgctcggcaagtcggctggtgtgagcaaaatccgtacgtcgtcgtctccagtggtgtcattctaaactggatctgctgctctcgagaccgaacaactgcaacaaactcaggcagggactcagcatctacacatcctgttctacggtgattgtgacacaaatcggctgcatgggaaccatactagctgccaa

SEQ ID NO: 38700 - DNA, 1573 bp, Zea Mays
tagcattcaggccttcgcatgctgtggtttccaatagtggtgtcattcctgttgcacctagcctggacactataggttggtttgcaaaggatccaagtgttttgcatcgtgttgggcatcttcttcttagacttccttatgctggtattcgccaaccgagaattttttacatagcagatgattgctttgatctttcaaagatacctgctaggagacttactcaggtggtgacaaaatctgtggagaagctctttggaagcaggaattcaaagataagcatatggagtggataaattcagttaagcctgctgtggatgcacgcatagtcagtgatttgtctgaggatggtgattcagatattgatggctgccaaaatgtgaggaaagaagcgcgctctgctctaagtggacttcttaaggatgatgggattctggtgattccaactgctttggggtgccccccgaagcttaacgctaaggaactctcgtctgaaagctacaattctcagacactacgccttttgtctttagctagcatgtcagggtgttgccaggtttccattcctttgggtacacatgataagtgccccatttcagtttcgttgattgctaggcatggtggtgatcggtttttgttggacaccacacaaaccatgtatacaaccatccaagagcaagtggagatactagcgaaatctagtgtttcaagtaaacaggcgatgaatgaagaagcagctgaagctgctaaagagaaaggtaatgctgcatttaaggaaaaacaatggcaaaaggcagtaaatttctacactgaagcaataaagttaaatggaaaagtggctacatactacagcaacagagctgctgcctttctagaactaactagctaccgtcaggctgaggcagattgcacaagtgccatcgaacttgattccaagagcgtgaaagcttatttacggagaggcactgcaagggagatgctaggttattataaggaggccgttgatgatttcaaccacgcccttgttctagaaccaatgaacaagacggctggtgttgccatcaacaggttaaagaagctgtttccttgaatatgaagctgcatgaagatatgataacctcatattttgtgcacacacaaggggtgggattgaagtacctgagttcaaccgacggatgctgatcacagtttgagctagtgggaacggatttcaacactgagatcaggttaagggtcaatttagcggtttctctccccacccaaagttttggaaaagcaaaataaagaaggttttttgggaaccggaaagcagtttacgggtgtccgccatccccaccatgtataatatagtttcgccaattatttgttcagacgctttgccaatcgaactttttctgccatgcttacctgtacccatctctccttgccgttctgagcggcagcttttttgcgggctcgctctgaaaacggctgccaccagtgaggtcgctcgtggaggctgttaggcggccatgtgctgacgcgcagtcgcttcgccggctgaacctttcagccctttcagtttcggttgtttgct

SEQ ID NO: 38701 - DNA, 797 bp, Zea Mays
cttatctctgctgctcgctcaaatttttttggttgaagctgctggccgcacaagcttgccagccatcttcctcgccaagccgctcgttgtgtcctgcttccgtagttctgcttcacctcgtcgtggtaaagtagccggtctctagttctttcccacgcactcggcctctcgtcttcctgctccatctctgctccagctctctcccatggccaccccagccatctcccatggtggccgagctcgcccaaccccctctctattggtggctagcgcccatctccctacgccgagcgtcctctccgtgctcgagctcgccctcagctccgtcgtgcccctgcgctcggtcctcgtcaaagtcacgcctgggtgctatccccatcgaccacgcttgctcatgcaccttcaacagctcgtcgtgtatggtagagccttcatctccgcgtccaacatctgattcgcgccaccgctcagcttgccgccgtcctctggtgaacgcccgaacctccaaccttgtcgtggacgctgtcctgcgcgcaccgacgattgttgggacttgttctcaaatgctataagttaagaacaatgcaacacaaaatgttaatggttaaagatcttcgtcctactaagcattatctttcttaggatataatgatctttagacgaaggttatgaaggacataccttcctcatcttagtatgtaataatgaaagcagaagcatatgaaacatggaaaataacatgaacaatcatcttgaatccttatattatttatattctcattatctcatcatggaca

SEQ ID NO: 38702 - DNA, 2430 bp, Zea Mays
cgccactcttatccacagggccgcgcaagcgctctggcttcttccagtccagtccaccatccgcgccatggcgatggcgttcgcggctgcctccgcctggagcctcagtcttacagccttctccctcccgctgccccagtctctgcgcccgaaacctagccaactcctccatggcgcgaccagctcgttcccgcggccacgccgatgcgggtggggcgccgtggtgcgctgcgcgaagcgcacggggaagcagcggtacccgtcggagaagaagcggttgaacaggcgaaaacaggagttgctacgccaggccgccccggaggaggggagcaaggggcgggagtccgggtactggcggctctcgaagctcgctgttcccgcccgcgacgacccaggcaaggacttcaccggcatctccctgccgctactccaggccatcgccaaagccatcaagttcccggttccttctatgctccctgacgaggctttcactgtcatccgcaagtcatttgacgcacgaaaggttttgaaagaacctcaattcacttatattgttgatatggatgttaagaagattcttaatattgagccaagggcatgggattttattgctcggttggagcccaaacttggagttgtggaatacatgaccgaagagaagttagcagttgatctggtgaacttggtgcagaagttaccttattggagcgtggtcagcctgttgaacagagaggtcgtgacattggtgcactagcagttagacgaattctacaaccagagagcaacttttgctttggcgagggtggtgcaggtacgtggagtgatgggaagctgatgaccaggataggaaaaaacactgatggtgttcaggctgttatgaaaacatttgttcactttggagcccctccaaacattttagttgatgggaaaccacacttgggtactgataaacttgttccactgctgcgaaaattcaggcatcacttaagagagttgggtgttaccataagatttaatgctagagtagatgaccttatagtagaagatgggcaggtaaaaggaattgtggtctctgatgtggaactacagccaggtcctgccagccagaaactagcatttgacgcagttgtaatggcagttggtcattcagctcgtgacacatacagtatgctttggcagcataatgtagacatgagcccaaaaagttttgctgttggcttaagaattgagcatccccaagaattgataaacagtatccaatactctgaactggcagctgaagtacaaagaggacgtggacggattcctgtggcagattacaaaatagtgaagtctgttggtgaaagagacgcagagaatgaacttgacatagctgagccaactcgcagttgctactcgttttgtatgtgccctggtggacaggttgttctaaccagcacaaacccatcagaattgtgcatcaatggcatgtcgttctcacggcgtgcatcaaagtgggcaaactcagctcttgtagtcactgtatcatcccatgatttcaagccatttcaatcccatggtcctcttgctggcgttgaattccagagacaatttgaaagaagagcagctatgatgggtggagggaatttcgttgttcctgcacagtgtgtcaccgattttatcagcaacagactgtcagttacaacactgccaccatcaagctatagattaggagttcgtccatctaatcttcatgagctattccctccttacataactgaagctttacaagagtcactaataatgattgatagagagatgccaggctttgtttctagcaaggccctacttcatggtgtggagaccaggacaagttctcccttacaaatttcacgacatggagaaacatacgaaagtacatcactgcgaggattatatccaactggggaaggtgctggctatgctgggggcatcttaagtgctgctgtggatggtatgtattgtggttttgctttagctaaacaactttctttattccatggcgatatagagccatttctaggcaaaacacaaaaacaaacaggttttataaagtattgaatggactagtgcttggtattttgttgttccaattttttgggggaaaagatcgatgtcattatagctttaaccataggatatttttgtcatgtttagagcagctgtgattgccttactaaattcatcagctaatttgtgcacggttgatgtagaagggtagagcaaggcattgatgttgtaggagaggttctggtataggtatagctatgtaacaaataatttataacttcctatgtgatgccaccttaattttgtcaagataattcaccaagcataataccatatattctcttgtgtgatggattgatgaacattaatgtgaagaagattacaagctcaagtattaactga

SEQ ID NO: 38703 - DNA, 3845 bp, Zea Mays
gctgccagactgcaacagccaccggcggtcggcacgacagcacggtccttccattgttgctcccagctccaacgcagcattactcatctccattctccagtccgataatccactcattacctcatcatcgtttccaaaagcaaagctttccacgcagattccaccattaaattgggcgaacttttttgaattaaaaactcaaatcctggaaaacgagatgcggtaggctggtagtaggaggactaatcatgtgggcgacgctacataaacccgtcgcgcacgccaacttgcgtctcctcctcacagtctccgccttctccggaccactccacttaggcaccgccagcgctgtcgcggcggcggttacgacccgacgctcgagttctagcaggggcgtcgcggccaccgcgatgccttcgtcgtctccgcctccgctgccaccagccgaggagacgaccgcctctgctgccgctctcgcccctgagggtggattctccctcaccgagccctcgttcctcgagtccctcatgccgaagaaggagatcggcgtcgaccgcttcctcgccgctcaccctgagtatgacgggcgcagcgcactcatcgctatcttcgattctggagtcgatccagctgctgctgggttacagactacttcagatggaaagcctaaaatccttgatgtacttgattgcactggtagtggtgatgttgacacgtccaaagtggtgaaagctgatgctgatggtgctattgttggtgcttcaggtgcccgtttggttataaacccctcatggaaaaacccttctcaagagtggcatgttggctgtaaattaatatatgaactgtttactgacacacttacatctcgattgaagaaagaaagaaagaagaaatgggacgaggaaaaccaggaatcaatttccgatgctctgaagcagctgaatgaatttgaaaagaagcatcctaagcctgatgacaccatgctgaagaaggcacatgaagacatgcaaagcagacttgattacctgaggaaacaagctgaaggttatgacgataaggggcctgtaattgacattgttacatggaatgatggtgatgtgtggagggttgctgtcgatacccagacccttgagggtaacaatgatggtggaaaactagcagattttgttcctctgacaaactacaggcttgaacgcaaatatgcaattttcagcaaattggatgcttgctcttttgtagcaaatgtttataatgatgggaaccttgtcagtatagtaactgactgctctccccatgctactcatgtcgcgggcattgcagctgcatttcatccagatgaacctctgctgaatggagttgcacctggagcacaattgatttcctgtaagattggagacactcgcttaggatctatggagacagggacggggctggtgagggccttgatagctgcagtagagcacaaatgtgatctgattaacatgagctatggagagcctacccttcttcctgactatggcagattcattgatctttctaatgaggttgtggacaaacatcgcattatatttattagtagcgccggaaacaatggaccggctttgaacactgtgggtgctccaggtgggactagtacaagcattattggtgttggtgcttatgtttcaccagccatggctgctggagctcactgtgttgtacaaccacctgcaaagggaatggagtacacatggtctagccgcgggcctactgctgatggggatcttggcgtttccattagtgcacctggtggtgcagttgctcctgtaccaacttggacgcttcaatctcgcatgctcatgaatggcacttccatgtcatctccttctgcctgtggtggggtagctcttcttgttagtggcatgaaggctgaaggcattccattaagcccttattctgtaagaaaagcaatagagaatacagccgcatctataagtaatgcacctgaggagaaactgaccacaggaaatgggcttttgcaagttgatagggcttttgaatatgcacagcaggctaagaagttgccacttgtttcttatagaatctcaatcaatcaagtgggaaagtcagttccaaaactaagaggaatatacctccgcgggggcaatgcatgctgccaaacaagtgagtggactgtgcaacttgacccaaaatttcatgagggcgcgagtaacttggagcaactggttccttttgaggagtgcctgcaactgcattctactgatacctctgtggttcaaattcctgagtatatactggtgacaaacaatggacgcagtttcaacattgttgtcaatcctgctaatatcagcagtggccttcactattttgaagtttatggcatagattacaaagcaccatggcgtgggcctattttccgtgtgccaattactgtaataaagcctattgctctattgggagagccaccactattgtcaatttcaaaccttcgttttcaatctggtcatattgaaaggaggttcataaatgtaccttttggagcttcatgggcggaagttactatgcgaacatcagcttttgatactcctagaagattctttttggacactgttcagatctgtccactgaagcgacctgttaaatgggaggctgttgttactttctcttctccatcttcaaagaatttcagttttcctgtagaaggtggcttaactttggagttgtccatagcccagttctggtctagtggaattgctagccatgaacctacctgtgttgattttgagattgtgctgcatggaatatccattgatcagaaagtaagtacccttgatggtgagtcacccttgcttatagttgctagatcacttctagcgtcagagaagcttgttcctgttggcaccctgaacaagatcaggataccttatcgacccgtggagtgtaatctttcttcacttcccactgaccgtgataaattgccctctggcaagcaaattattgccctgaccttaacttacaagttcaaattagaagacaatgctgaaataaagccccatgtgccactgcttaacaacagaatatatgacaataaatttgagtctcagttttatagaatatcagattcaaacaagcgtatttactcgtccggagacgtttaccctagttatgtcagactttccaaaggagaatacacgttgcaactgtacataaggatttcgttccattgatgttctactcccaacctgatggtcctatagttggaagtggcaccttcaaatccactgttctagttccaggcgaacctgaagcattctatgtgggtcctccgtctagtgaaaaactcccaaagaatgctccacctggggctgttttggttgggtccataacctatggtactgtaagcacatttaacaagaaagatgaacaaaaccaccgtgctccagtatcttatagtatctcatataccattttgccatcaaaggttgatgataaagaaaagggggttttagttggtacaaagagcatacctgaacagttagatgaggaggttcgagacaccaagataaagtttctttccagcgttaagcaactaactgaggaggacaagtctgcctggtcagaacttgtggtttctctgaagtcagaatatccgaagtacacacctttgctttctaagattttgcaatgtgtcctccagaaaggaactgatggtgataagattagccatgaaaaagaggttattgctgcagccgatgaggttgtgggcagtattgataaagaggaactggctaagtatttatctctaaattcagatcctgaagatgaagaagcacaggttttctcct

SEQ ID NO: 38704 - DNA, 1837 bp, Zea Mays
ccctaatcgagcgcgaaaggaacggaacggcgcagccgcggcggcggcggcggctcatgtaagctccccaccagcgaccagtggacacgtatatccatctcccctcgcacagtcgcaactcgcacgcatccgtcctcggcctcgttccgtccgccagcaatgccgctggcgctcgcgcaactgcaggacttgcgggaccgcatctccgaccgcctccgcccatggagccgctccgcgcagttctgggtccgcgccgcggacatctacaccagctacaaggtgtgccagctgcgcgcggggttcgtgaaggacgaggacgagctagagaccatgtgggagcggcagcacgagctcggcgcggagaagatgtactccctctgctccgagctcggcggtctcttcctcaaggctgctcaaattctgggaaaacctgacctggcaccgatggcttgggtgaagagacttgttacgctgtgtgatcaagccccatccacgccatttgatgtggttagagatgttgtggagaaacagttggggaagaacttcgatgacatgtttgaattcttcgatgtcgagcctgttgggtctgcttctattgcacaggtgcatcgagcaaggcttaaattatcaaagacagacgttgctgtcaaggttcaacatccaggagccgaacaactgatgatggttgatattcggaatatgcaagcaatggccttgtttttgcagaagcatgacctcaactttgatctattctctgccaccaaagagatggaaaaacagatatgttatgagtttgactttgtgcgtgaagcaagagcaatggaaagaatacgagaatttctacgtgtcactaataagaaacctccggttatggtgcctcgtgtgattcctgggatggttagcagagaagttttgataatggaatttatcaaggggaccccaataatgaatcttggcaatgaaatggctaaaaggggcatagatcctggtggtaagattgcagcaatggcaaagcaatccacacccaggaaacatccttatctgcaaggacacagaggtggctttacttgattatggacaagtgaaagaaatgccagaagatttacggctggcttatgcaaatcttgtagttgcaatggccgatgatgatttctcgagggctgaggaaagtttcagggagctgggtatccgaacatgggccataactgataacaaactagaagaattgtttcagttatccctgcgaatgttcgatacaagattaccaccaggtgtaactgttatgtcaccttttgccgatgattcttcgcttaacaaaattggagtggagagcttcccggaggagctattttcagtgcttcgaacaatccagcttttgcgagggttgactgtgggcatgggccttacattctcgtgcgcccagcattggagaccgatagctgaggaggcgttgttaaaagctggaagacaaagcgcttcaaaatcaagaaaacagaagaggagttttctgaggagattgttttggtgaagtaggcatttagccgcatagcgaacatcaaaggacatggtatacgaacattctgtgatgaaacggaagtagccaaaagctcgagccttcgatttttagacagtacatctgtccatattcgtttaccttgggtgcgtgttattttatatatttgctcattcctttatcactatgtgttttttgggattcagtatatagttgggattgtatcggaagctgacatgtacacaagtgacatggaccaattcaaaggaaatcatcgtggtatgtgggggtttgttctgtggactttttttgtttctgatgtga

SEQ ID NO: 38705 - DNA, 1410 bp, Zea Mays
cccagctcacatgttagtaagaataagaagagtaccacattgaagattgtactcccgattatggctggtttgattcttctaataacatgcacatggcttgtattcaagccaaaagacaaacacaaaagcaagaaaagtcagtacacactgcaacactcggatgcttccaacaggtttgagaacgaaaatttggaatttccatcaattgccttagaagacatcatcgttgcgacaaacgacttctctgattttaacatgcttggaaaaggtggattcggaaaagtttacaaggcaatgttggaaggtggcaaggaagtagctgtcaaaaggctcagtaaaggctctacacagggggtcgaggaatttagaaatgaagtagttctgattgctaaactgcagcacagaaacttagttagacttcttgattgctgcattcataaagatgagaagttactgatatatgaatacttaccaaacaaaagcttggacgccttcctttttgatgctacaaggaaatctttgcttgattggccatcccgtttcaaaataattaaaggtgtagcacgaggacttctttatctccaccaggattcaagattaacgataattcatagagatctcaaagcaagcaacatcttgttagacacagaaatgagtcccaagatatcggatttcggtatggcgaggatttttggtggaaatgagcaacatgcaaacactactcgagttgttggaacatatggttacatgtctcctgaatatgctatggaaggctcattctctgtcaagtctgacacctatagctttggtgttctactactggagattgtaagcggcttaaagattggctcaccccatctgataatggactatccaaatctcattgcttatgcatggagcttatgggaaggtggaaatgcaagggaattggtggactcgtcggttctggtgagttgtccacttcaggaagctgtacgatgcatccacttgggtcttttatgtgtccaagacagtccaaatgcgaggccgctcatgtcatccattgtgttcatgctagaaaatgaaacagccccggttcctaccccaaaaagacctgtatattttactactaggaattatgaaactaatcagtcagatcaatacatgcgaagatcgctgaataacatgagtatcacaactctagaggggcgttaaatgtttagtttcattgttcgctattttggtaaacttttgtttaatgtgtgccattaaacaattacattaggtttgtattaatacaattacgctagccgttcaggtttgtacatagaaaatgttccattaaatctgttgtacaccatcggttcggtgggttgtattgatatattctcgagactgtaaagttcactagtttttacaactggttccgca

SEQ ID NO: 38706 - DNA, 2397 bp, Zea Mays
gtgagatgttgcagatcttttctccttttcctctccttttcattttcctttcagtttttccgtggcgaagatactgttgcatttgtgggggcagtgctctgtgcctctgtctgagctgatcccagctgtgattgattgcttgctcatgggtcacggccatgaccatggcatcccctcctctgcaaaagcccgtgcctttggtgtcttgtcacgggcaaaagtggcgcatgttcattattatcccccctgcctttttgctttcgcaagccctgtatgtgtcctggccataaagatgcaatctttatcctctatgcacatacttcacccgaaaaaaagctaaaggggtcactgattggtgctgcttccttaaatcttgcatgtgtgggaactaggaggccattggtcacggggttgggtctgtgctcaggtgccagcaagatgcagggtgtgttgtcgagggtgaggaggcccttcactccgacgcagtggatggagctggagcaccaggccctgatctacaagcacttcgctgtgaatgcccctgtgccgtccagcttgctcctccctatcaaaagaagcctcaatccatggagcagccttggctccagctcattgggatgggcaccatttcgttccggctctgctgatgcagaaccaggaagatgccgccgcacagatggcaagaagtggcggtgctctagagatgctgtcggggaccaaaaatactgtgagcgacacataaaacgtggttgccaccgttcaagaaagcatgtggaaggccgaaaggcaacaccgaccactgcagatccaaccatggctgtttctggtggttcattgttgcacagccatgctgttgcttggcagcagcagggcaaaagctcagctgctaatgtgactgatccattctcactagggtccaacaggagaactgtgcatcatatattaaaagaagtaaaaaagtctaaagaagaccaaaatctgccataagaggcagaaagagataggaagtgggaggggcaccagcacactatattttctcaacataaatgacaatctatggttgatacatgtgccagtctagcagtcagggttcaggacgtaccaaaacattgaaaatgttatatcctttagacattgaaattttgtccatagccattcatagttgaaaattttgttcttgatttctttcaactggtcagtgatttcttcatgtaacctgtcattgatgcattccatcttttgccccgtgcccattcctatatataagattttattattatgtttgtttgttcaaacaattatggtaagcatgtgcaaagaaaggcagtaggaagcactataaataactgaaatgatatggtacttatgtcagtacaaactttagagataggtgaattctgttcatgatgaccctttcaaattttgacgacttactatagtcagcagtgaaagaaaaacaggacagtgtttccttttccttccatgaacttgaaatgttgactctggtttgcaggaatttgctggataagcagaatctaggtgaccagttctctgtatccacttccatggactcctttgacttctcatcatcacattcttccccaaaccaagccaaagttgcattttcaccggtggccatgcagcacgaacatgatcagctgtatcttgtgcatggagccggcagctcagcagaaaacgttaacaagtctcaggatggtcagctgctagtctcgagggaaacaattgacgacggacctctgggcgaggtgttcaagggcaagagttgccagtcagcatccgcagacatcttaactgaccattggacttcgactcgtgacttgcgtcctccaaccggagtcctacaaatgtctagcagcaacacagtgccagcagagaatcacacgagtaacagtagctatctcatggcgaggatggcgaattctcagaccgtcccaacactccactgagtgttcatcaggctggtctttgttgggaccacaaaataactgaagccatgttgatgtcctgagtttgctgatactaggttttcagtcgagtcttgtaactcctgttttagagctgttatatgttcacgtcatgtcgcctttcattttcggttcattcagatgggtgttctaataatttctttccttcttacctgtgaaggatttgagttccaatctgagacgtgggtttgttctaacttggaggtatttatgaatattaggcacttctgatttccattgaagcgagatttctttaaattgtcgaggctgtatttttttcaggcttttcaagtgctatactcttgaatgcttgatactgcctccgttctcgaatatttgtcgcctgttagttcatttttgaactaaaccgcaatagataaataaaaaagaa

SEQ ID NO: 38707 - DNA, 2342 bp, Zea Mays
ataaagcacagttagagcagataaaagaatgtgctcagatagctatcgagtgcagtaaccctaaagcagagaatagaccactggatacaaagcatataatcgataggcttcaaaaagtggaaggtgcacagggaactcaactgcagtctgctggcaagttattacttcaagtccacccgaccttcctcgtgtttgagttgcaacccgccgggaagttgaccccatgcctactgcacctcacaaacgacacggatgaagacatggagtttaagcttaggatagaagagggtgtggaccagcgatggtcggagcaatttggtgaagagcgtttttcaggatgcggtgttgtggctgcgcgatccacttacactctcattctgacggtgtcgtgggagcgggacgatattcctgaaaacagattttgtgaaatgattctcgacagctggcctaagcaaaactggtactctgaagctaataagaattcgaaggaggtgaaactgacagcttatttgtcgactcagcacagacagtcgacagcaatacccacgatctcatggatggagaaaccccgcacacgtatgtactccgttgacgcgcacccgaccaagccatggatcataactggtcatgaacaaggacgcattaccattaggaaccatgacacacagatgctactgtgttcgtttaaagtttcacgtggcggagtcttttgtgttaaatttatagcgcagaagcaatggttcatttgcagctcaggagaaggtttcatacatgtgttcagttatgaaacccaagaaatacaaaatgtgaacaatttcagagcttatgacgacaatagtcgctggctccccatatcactggccgttcatccatcccggccctatgtgttgtcgtggtgtcgctacgatagtgagataataatgaagctttgggactgggacaaaggatgggagtgcgcacgcacattccgaagtggaggcattaatgtagatcatatcgctttcgatccaaaggagaccaaccgctttgttgctaccgattgcttggatggcaaagtgatgatttggagcctcgactctcccgaacctgaatatcatctgcctaagacggattttaagggtatcatgttcctggaattcttcacacgttatggtcggcagtgtttgattattgctcatgaagatcataaagcacacgtatgggactttcggttgcgcaaatttgtttctgagaagcgaaaattattatctcgtgaagcttctgtcttcttacgtcctaatgtatcgttactacttacaccttcatctaaaggcacttgccgtttctgggacgctaagaaattcagtttttatggagtcattgacaattctgctggaggagatgtgctgggtatcgcttgtttgatggggtctaaaacaaggtttgtgattggacaatattatgcattaacaatattgcatcttgataatgcaatatatcaaaaggacccaaggcaatctattgagccacaattatgtgctcatacaaggcaaggagacacaagttctgaggagaaatatggggaggagatggtttggcatcatggcccaaacttcgattggcagcatgaaccatttgatgccgcaatcatgcgagctagtggtggcgagaacgcacatgaacagtacacgcttttcgacataatgattgactcaacagaggtgagagctcaaaggatgagttcttcattctgtagcatgagcctttcatctcatcagcccaaggagcaggagttggaggtggctaggctgcgcggggagctgagacagcgtgacgagcatcataaagtgcaacaagactacatgttctctttcatacagcagcaacacgagattattcaagaattatcccagcaacatggcttggatgtagtcctcccagagtttcgaccgccactgccaccgatgctgccacaattgagtccttttctatctacaatatctcaagctacgactgatgcaagtgggacggaacctactggaatggcttttgtggagtccttcgcctaccctcctcctgcaacagatagcaaccacaactctaataatccatgtagcgattttggtgcctgagtaacattgcatgtttctttgcatttaaacttgtgctttttccaattatgtatgatggtcaatatgaattgaattgaatctctatagtttgttgaacgaaagacttgaatatgtgagatgtgattgtggctttgaaaggatatgtgagctatgacgagcattgatgaatttaaagtattatgtatatgatgtatgtgaattgtgatatataatgtatgcgaattgtgatat

SEQ ID NO: 38708 - DNA, 1706 bp, Zea Mays
caaccgagtccaccgccgtccgccgcagcctctaggccagggccagctaatttctcgcaggccgcgaacatgacactcacagccagttctagagcctgcaagattctcgtcctatcgccatctgttgcgtgctcgcacctcgccgcgcccccaagggctcacgctcgtgacgcgtcccacgcccccaccgcctcacgagcacgcccccccgtcgactcgcccgctccatcgcccccacgcacccgctgccggccaaaagccaattcgaatctccccgctgcgcggcggggcctctgcttccgcaatgcgggcctccgtcgaggaggcgggcgcgctcctggcgcggagcgactcagccggccgccgccgccgctccccgccgccggtgcagaccgcgtccccgaggcccggtagcctcaggcgccagtcgtcgtcgttccgcgaggacgtcgggcacgccgcctccgagacttacctcgtctcgcgcctcaccttcaccctcctccagtacctcgggttaggttaccgatggatgtcacaacttctttcactcacaatctatgcaattgtacttatgccaggatttatacaagttggatattactatttcttttcgagccaagtgcgtagaagtgtagtctatggagaccaacccagaaacaggttggatctatacataccagaagataatagtaggccctgtccagtggtggcctttgtgactggtggagcatggattattggttacaaggcatggggtgctcttctaggacgacgattggcagagcgaggaataatagttgcttgcattgattacagaaatttcccacaaggtacaataggggacatggttcatgatgcttctcaggggatttcttttgtgtgcaacaacatcgccagccatggaggagatcctaatcagatctacttgataggtcagtcagcaggtgcacatattgcagcgtgtgccctcatggagcaagcagtaaaagaatctggtgggaatcctgtttcttggagtcttacccaaatcaaagcatacttcggtttatctggaggatacaatatgcataatttggttgaccatttccacgagcgtggtcttaatcgctcaatattcctcagcataatggaaggagaggaatcattgtcacgttattctcctgaaattgttgcaaagacgtcaagtgctgaaaccatagctcttctgcctcttgttgttcttatgcatggaactgaagattattcaataccatcatcttccagtcaaacttttgttgacgtcctccaacaagctggtgctcaagcaaggttactattgtacgaagggaaaacacatacagatatctttgtacaggaccctctaaggggtggaagagatccattggttgaagacgtgttgtctattattcatgctgatgatgcaaatgcatgtcaaaagattgctttagcaccaactcctaggagattagttttcgagtggcaattaaagttggcacgcaaaattagtccattctagcagtatgaaccatggagaagcttggagctatggattttgcaccttcatgaggaaagggtgctcgtctgctcggggagccgttgagctggattggatcaggttactttgagacagggacttcaattctgctacaacctactcgacgtgatcttcattccactgcaaccagtcttcaagtagagtaaga

SEQ ID NO: 38709 - DNA, 1353 bp, Zea Mays
gctagcggtaaccgtcgcctcacttccgcagcaccggcgcggcgactattagctatagccgagtaggcgcagccgcgcacggcgcacccctcgtgttcccttttcgtccttgttcctcaacgtcgccggtgcgcccgcctcctgcctctctccccctgcgagcgatcgtgaggggatcgggatggcctcccaccattccgagcccctcgaccccgccgacgctgacgacccctcagataacaacccagaattaccatgcccctcctatcatatcgttaccaaacctggtcaactcccagtcgagtttcttgaaccctcagctgcccagaagttggtaattggatttgactgtgaaggtgttgatctctgccgcaatggtgctctctgtattatgcagcttgcattccctgatgctgtttacctagttgatgctattgagggtggaaaagaacttattcaagcttgctttgtattttcagtttggcataaaactgcataatgtgatggatacacagattgcttattctctgatagaagagcaggagcaggaaggaaaaaagatgacatctgatgattacaattacatatcttttgtcagccttcttgctgataaacgatactgtggaccctaacttttggacaattaggcccttgtctgatatgatggttcgagctgccacagatgatgtccgcttccttctcagtatatatgcgaaaatgatggaaaagttaagcaaagtatctttatggcgtctggcagttcgcagtgagctgtactgtaggtgcttttgcttaagcgacaaccagtttgcagattggtcacctcttcctcctgtccctgatgacattgaggctgatgtttatgttcctgaagccgatatcctgtcagtcttagatgtgcctcctgggaaaatgggacgagttattggcagaaaggggtcaacgataatggctgtgaaagaatgttgcaaggttgaaatacatattggtggtgctaaggggcctccagacagggtgttcatcattggaccagagaaggaggtcaggaaagctgaggccatctttcgaggccgaatgctggagttctagagatgttaccctttgcgatacaggtttcaactgctttatattttgaacgtaaaaaggggaatatccaaaaggtgtatgcgggaccgtggatcccttgaccgtctgtgaatcatgaaaacaaaataaaggatttcaacttggcacttcgcgtttctggcctgttttcctcaacgcgtcaggatgcagaagcatgtttagatttcactctagcctccacctgtgcactaacatggtaacgatcgttgtaattgcggcgcattgatt

SEQ ID NO: 38710 - DNA, 1367 bp, Zea Mays
aaccacatccctcgtggtctgaacacaggcgttcttcaacctcggggctgcggagccgcctcttggcctcttcttgttcctattcgttctcgcctagtaggctactaggctggagcagaacggagaaccagagacaaggaggttattcggacacagaaactcctctctcgaacagccatttcatcttggtcatttgatgacatctctctgaaatcgacggagtcaacagatcaagatgacagaaccatcatcatcatattcattgccctctaaaaagcgacaacgctctcctgatgataatgaacattcactagacagaggtcgaatttgtttaagccttgatgataatcttacgttcaatgataccatgatagcacttcaattgatgcgcacacagtttccaaagctggataaggttttggcgcagccattcattttgcagtcacaattgtatagcagtgtgaaggatagaacacaagttgacagagacttggagtcatttaagaaagacaaagtgttacggatattcaaacttagttctgggcaagatgatcatgcaatcatgttcatggatgattatttgaaacaggtctcttttgctattaaacggtcagggggtaaagaccaagatggtagtgaagtatttgagtggtttgagagatatgtggtcccttcaaaactggatgttagcataactcaactagagctgtgctcactgttatcacagggtggtgatgtaacagacaaacatatcacactattgatgaatgctggtctcttaactcgtcaacttattgatccaaatatttactggttttctattccaagaattggccccatattgaaaggcctatcccagaaagtacaaggagatgccgctttcttcactggagaatacaaagttaagattatcacctcttgatacgcggttcctccttcgcgatttgattggatctgggcacataaaaacagttcaaacgcccactggtttgctcgctcgcgtatcaagggattaatagagctctctgtcgtaatcctacttatctgtctgccttatctcttatctgatcatgcacgatttggtgattctagtttcgttttgcattttacctgttttcaaacagcattcaacatgaccccaactcgtcgatagtctttttcattttaagagggtggttgggactccgctctacgttttgatgttccgtggaaactccagcaactcggttccccaaaaagcgtttttgatggagaaattcgttttaagatgtagatgtggagttcagggttaattacccaccaatgtcattcattaaatgccattcattatgatgagaaaataacatttcgtctcaatctattccttc

SEQ ID NO: 38711 - DNA, 700 bp, Zea Mays
  misc_feature (1)..(1): n is a, c, g, or t
nttgtgcgattttagacgaatggctgtcgacggagaacaatggagtggacgaactgattagacgccatcttggagggggattgacgcttcaaggtccccaagacgatgataataggcccgctaattcagcagagacggacatttttattcatgctgtggaacgtgtcttgcctaatttgccaaaaagttgcatagacaaaatcaagagactaatgggctgagctagcaagtacgtgatagcgacctgcaatggcacctatggacccggtatgacatgtataatgactgagcaggctagagcctgaacatagtcaatgatatgctcatgaggtgaaaccaatcgcttatgcaagggtcgatggctgtttgaaattgctagaacacaaactgaagaccgatttcgagttatatagtggacctgaaaatgttcctgaacttttaaaggatgtgcaggaagtgttgttctttcagatttatttttgttttttagtctcaatgtctagcgtcatagttgtaaagcacatgaactgcgaaattctgcagataatggctgcattttttataaatgtgatttttaggtaccagcagcctagcaacggtcttgtttattgcagtggccaaccagtcaattggtacttaaaaagacatgtttgtttaaatgaatgattcaagtgcatggtttgttaatatttgattgaaa

SEQ ID NO: 38712 - DNA, 1535 bp, Zea Mays
cacaccctagccgtcgccaacctgcagctccatcccggtgcttgcccagacgggtcgccccgtaaggagagaacgtgaccaggcaggagacgacgcttcatgtatccatctccgcctcaatcgaccgtgccaattaacaggctcccaaggaggagatccaatcctgcgggcgggtgtcccgtcgcccatccatcgatccgaatctgcatgtgaccagtctcatcgggctcttctcttttttaggaatgactcatgggtttctcaccatcccttccacttggggatttcaatcgaatggtgaaatggagttaccaatcaacaactagctgaatcagctcccggcctacccgggcttatctccaccggtgcaggttggtgaacaccaccgctgggagcacctcgccaggaacgtgcgtacctcccgtgtctccttcaacccgccatgaatttcttggtttcactcgctagctgatcgactgactgacacacgtacactcatgtctttcagcctttcctcacgctcttcggtaattaagttcatccatgatccgatccacatcaagcgtggcaatcaatcatctagtagtgtttttctttggtcggttccatccataaattagttctaagtatctttttttctgattttttttctagaatcctaggccatcaagcgtggcagtaatgctttgttcttgcaaataattttttaaaatattttgattgtactttgtttgtgatgaacatgtagcttctgattctttgctaaaaactaccaaatgtgcaatctgttattattttatagccatgtgaatatggatttatcctattgtatatatcattttttgttgttataatttttaggagacaactcggtctattgtccctgcaaagaatgagaagaaagaatcctcaaacactggcaagcgagaaactaggaaatctataaaaaggactggtgaggatccagttggagtgagggatctgcttgtcaggtcatgaggaacatgcttgcaaatgagggtgtccgttcattctacaagggtttgtccgctggtttgctaaggcaagcaacgcacatagactgctcatcttggatccttcagctatggaatgtttgccaccagagggtgtgatagatttgtgaatgtgtgggatgacattaacaagagaatactatatcagtactcaaaagtgcgcatcaagcattgttgcactgtcattcggtaaggatggccatctgcttgctgtggcatccaactacacttatgaagagtgagaaaaaacgcactttgtctgacaaatctctgtttacgcaatattaaccgctcatgattctcctcacacttgtcctctttgtcgtcttgagttttatttgctgtgacttagcaaaagtgaattccactgatgggactaacgatacctcaatatgttttgtcaataccttaaggagtctattgtcctatttttctttcaaggttcgttgtagacttaaggtacacattatgaatcgtgcgttgccttcttttgagttgtta

SEQ ID NO: 38713 - DNA, 2854 bp, Zea Mays
cgaagacctaatagaaggccgccgtgccggaaccatgacagatgtgtacagtcctatccggagtttatggcggttccgacgaatgaggctcctagtcaaggcgctgcttcttcctccactacttcaagcacccagggctttccgctggctgatcttgtgggcaagaaggaggacctcgatgagcttctggacctcctcgtccggagacccgacaatgagctggacaaggtcctcaaggtgatggtgatctccgtcgtcggcttcggtggcataggggagaccaagctttgccacacagtgtacacggacgtacaggagagcagaaggttctccctgcatgcgtatgtcagcgctgctgggaaggactgcagcatcgttctggaagagataatcgagcaatttagactgcaagaggatccacaagatagcagtggtggattttttcacaggtattttgtggtggtggatggcgtggagtctgaagaactggtgagtggcatagcatctgccttcccggataatagtatgggcagtagaattatcatgggtatgaggaccgcagtgggcagggatgcagagagatgtgtgggtcatcatcacaagatgtggccacttgaagacaagcagtcggtggtgtgcttcctaaatgaagcggagcggcggcgacgacgacatgaacaagacgaccactcgtcgttcattaggtttcaggaacaagaccactcatcatcctgtttgcacaaggtatgtgatggcgtaccacttgcgctggttagcgtatgtgaagtccgcagagggtccatcatcactgctgccgttgaagaacaagaccgctggccacacagaatgcccaaggtgctcgaccacagctacgatggtctgcatatccggggtgctgggagctgtccgaaccaatacatcccctatctccaagcctgcctgctgtactttgccatgttcccccgcggcaatcatgtcaagaggggatccctgatcaggcgatggcaggcggaaggcctagagttcggaggcagcaatcaagctgccgaaaacctcaaggccctcgtagaccggaacttcgtttggcccctccatgcgagcctgaatgagcacgccaagacattccagcctcctggagtggtgctcaactacatctcccgcaggtctcaagaggaggaattcatcctcaggtcttgtccaagtggggaacttaatcccaattacagccgccggctttgtctacatcctgccgaggaagaagaaggtgaaccccaacccgtggtcattaccaacggttctgtaccaccacgcctgcgaactctggctgtgtcctgggggcagcaacaggccagcaggattgctgaatgcgagcagctccgagtgctggatctggcgtcatacaatggtctacagccagaccagctagaggagatatgcaagaaactgaagcttctcaaatatctgagcctcctgccagatatcatcactcaagttccaagctcaatgtctaatttgcagtgcttggagacactcgaggtgggggaggtcaatggcagggcggcagttctggtgcctatccaagtcttggaactgccacgcataaaacacctaatcggaaaatttgagcttattgacaacttcaacggactaccaattagggcttatccagatgcactagtaccaaaggcaatcaaggaaagcaacctggagacggtgtcggggttcttcacccgcagaggccaaggatttccgccactcatgcgtcacattaggcagctcaggaaggatggcccaagacaaacagaaatactgcaggcttgtgtggctgaagctagcggtaatctttactccctgaagctgtcgtccggcacaaatctgagcaggatccaactgtcggttattgccaccaacaagctgactggaatcacaaagctatgcctttcccgctggaaaacgataacgttggatgcagaatttctgaatgagctgaccaaattggccagtctgacgtatctgaagctggatgcagaaacaataaaaggtacgtacgaccaaaacccaacaccaggaggaaataaccaagagaaggtcgtcatagagactgggcacattgcaaatctgcggcggatgtgccttgtggccaggcagacgctgcccgacatacaagtcaagcctacagctctgcaacgactcgtttcacttcatctcatcagtgaaacggacgattattgtccttccgccaacgtcatctgtaaagccaacccccaggacgacaacgagccggcgccgttcacgagcctccaggaagtctcgctgaatgctacggtacccgaaaatttaagggattcttggcgtaatgctgcaagggaccatccaaagaggccacgaattctcttcatccaacaccctcaccgtgcgggataacccctatatgttcttcgtttgaaacctccaagttcgatctgtcactttctccacgcagtgctcctgcttcttcaagattgattcgtctccttatatattatacttgcctccaccttcattcaaataatgtttgattgtattctttttgtatactgcggttttgtatccgttgaggtaatttttcaagctgttgagcactaaaaatagcacgaacggtctggccctgaggccggacggtccgtggtcctgacggtccgcgcctgtgggccggacggtccgctcaagcgcagaacagattatggtttcgagtttcttactatgtttgttggcgagaatatcgagataagctcggaattttgttggtaacgggtacagcccccctcctctataaaagcagaggaatacatgcgatttaattaatcaatcgaac

SEQ ID NO: 38714 - DNA, 1573 bp, Zea Mays
agcccagtccgaggtgctggaggctattcagctgttttggcttggcttgtggccggtgagaggtggacacgacgacggtgacggtgaggtggagagcggagtggcggatcgtggctccgatccacaagggacggctccacacatcgggttcctgcctctgctcagcagccatgccggtgaggcggcggcagccgcgtcggccggagacgggtgcggcggagaggtacagggagatggggatcggggctgcgctgtcgcggccctgggactatcccacggcctgcggcgagcttgcagcgctgctgcgcctcggatacgcggacctccctaaggcagcccaggcgctcgttgcctccgacgtgctactcgcgtttcgcctccttcccgatgtgcagacaggatatgcagtaagcacagctaatgttcttctccaagcagtagaagttgctctaccaaagcaaaagaaggcgcaggctgtttcagagttcaagcactctattattgcacataaaaggcgtgcaagagtccaacaaatttcaggttcaccacacataccacaagatatacttgtccatatcttcagtttcctggacatgcattctttggtagcagcaggtcttgtctgctggtcttggaattcagcggcaaatgacaacaaactgtggaagatgaattactcgattttctttggcctcagccatttgagttgcaacaacattcctgtatctggtgtgcaatacagcacgaattcggtgccaaattatccaaactttagctggaaggagtccttccacactaagtatgcagaatgcgcgtcatggaaatttgtatcaaatagagcactatgtgcgcattgcagatcagttatttggctgagcaacctcacatgtgcttctccacaccattgccctaagaatagacaccatgaagtaaaactacgacctctgttacctgatacaggcgtcgagctagggagcgtggtgccgagcgaggagagggacgccgccgcgccgggagctaggcgctggggagcagggcgcaacaggaataacgacgacgatggtgtggtctacagaggttcttggtttggaaacgaccgaccaatgctaatagtgctcaacggctgatgggagactagcatgatgtgatctgcaggagctaacaggtacatatgtgctactagtgctcaatagctgaaacgaccgtgcaaactactgtgatgtggtgtgtaggagcaggcgttgccaaatagatacagttgctgctactacatgcactgccagtgagtgatgactgatgaagcaatgctactgcagaaaccgatacagacaatcagacataaaagaccgtgctagcgaaaccagtgatcactctttattccgagtttctaatgagtgtttggtttgagaaatgatatagtccatcatcttctcactccttattttttttatttggtttgtataatggagtgagttaatctatcatcacctcatttctcatagttagttgtttagtactaatatgtggaatagagttatcccaccaaatttgaggaatggacctatgatacacc

SEQ ID NO: 38715 - DNA, 2475 bp, Zea Mays
gctttgcttccgtacaaaaaaaagttagaatcactctctcgagagacagagagagtataaactaacgcctaccataaatacaaaataaagaaagacaaaaaaagaaaatccctattcctcctcagcataccccttcttccttcgtccccattgatccccttcccccctccactcgtctcccaaatcgccagcgagcgccatgccgccgcctcccctgccctcgccgcccctgaccggctgacccgacctccccactgtctttcccttccacctgggcgccacagcgtttcccttcccgtcaccacgaaatcccggagggacgaggagggagttcgtcgcctgatcgatcggccgatccacgccgccggcctcccaatccttcgctgccgccatgttcaacaagataatcaagaggggaaaccgcaagggcgcgcgcggggacagtgcggaggtcgccgcgcgccccgcagcgccctcgtcatcctccgggagcggcggcggcggcgcggggggagccgcgcccgtcaccgtcaaccacgcctcccgggccacagcgccttctccgtcgtcgcccacttctccgcacgtcacgccgtccgcgtttgcgaccaacccggcggtgggggcggcgtcaccgccactcctcgagcctctcccgctcctccgcgacgtcgccgccgcagaccgtccgggcctcatcctccgcaagctccgcctcgtcgcggcgctcttcgacctctcggactcgctcaagcacccgcgagagaaggaggccaaacgccaggcgctcctcgagctcgtagattacgtgcaggctccagctcaggccgcgggcgccaacgcgcccacgcgcctcccggaccacgtccaggaggcgctagtccttgccatctctgccaacatcttccgcccgctgccacccgcgctgcacgagtccgccgccgcgatcgaccccggcgccgcgcccgacgacgacgaggagccatacctggacccctcctggccacacctccagctcgtctatgagctccttctccgatacgttgtttcgcctgacacggacaccaaggtcgccaagcggtatgtggaccatgctttcgtcctccgcatcctcgacctctttgactccgaggatccgcgtgagcgggaatacctcaagaccgtgctccaccgcatctatggcaagttcatggtacaccgaccattcatccgtaaggccatcaacaatgtgttctaccggttcatctttgagactcagcgctacaatggcataggggagctccttgagatccttggaagcatcattaatggatttgccttgccaatgaaggaggagcacaagctattccttgcccgtgctctcatccccctgcacaagcccaaatctgttgtgatctaccatcagcagctatcctattgtattgttgagttcgttgagaaggactacaaattagcagatactgtgattaggggtctgctcaagtactggccagtcacaaattgccagaaggaggtgttgtttctgggggagcttgaagaagtgctcgaggcaacacagcctgcagagttccaacggtgcatggtgccactgtttaagcagattgcccgatgccttaacagttctcacttccaggttgctgaacgcgctttgttcttgtggaacaatgatcacattgtaagcttgatagcgcaaaatcgtggtgttatatttccaattatatttgaagcgctcgagaggaatatacatagccactggaatcaagcagttcatggtctcactgcaaatgtgcgcaagatgtttctggacatggacagtgaactatttgaagagtgccagcagcagtatatggataaacaagcaaaagccaaagagatgcaggagcaacgagaatcagcatggagacaattggaagctgttgttgctgccaaggctgctggggatgacatggttttggtcaactagatccatgttccttgcatcagtgaaaaacatgtgggccgagtttgaacacattggtggccgcgacagccaatccacgcagaatttctgtgtctagtgaggtcctgctatggttctgagccgttcctttattcagcccctcctcttctgttgcgttaatttatgaacaattggactcttgtattaatccttcattgtttgccctagtttcgtacccacaattgggaaaattcaagtagtgaaaatgactcagctagattgtaaggtttcttttatttgtatttacttcttttctccttgggagttatttcagttcatgttgttgtatggaggtaacagtacaaatggcagataaaagcctttttaacctagtgtccggcatggtagcaatacaatgtcagatcttctgtaggaactgtttcgacgttgctgtgattgtttagcaatataacggctcactctgtggtacgctggattaagttctggttacatgttaattcgtgggtaaatggcag

SEQ ID NO: 38716 - DNA, 721 bp, Zea Mays
cccccccccccccccccccccccaccccgccgccgccgcgctgctgtccgatcccgtgatccgacggcacgtaccggtcgacgtacgccgcgcggttgttttcgcgcggcatcagccgatgcgcgccggacccaatggtgacactggagtcgcaacaaattaagcccgcagattctccgtgccgggggagaagaggaccgccctccgccacgcaaaaacgtggagggccagcgcacacggacgatcggtggccacacggaaggaccgtgccgtcccccgtcccgtgagaggaggaggtgccggtcatcggaagccagtgcaagttttctcccctcgctgattaatgcggcggagctccattaatgacggggatttgtctttttgactttgttcttttttttttgtttatcgcttggctgtggcttgctccgaagaatgcacggtgaccattagcccgggagatcgtcgacgctgccgttcacagatcaatttttgacagtacgtgcctcagtactccggtcgatgtggagtttaatcaagttcttcttttttcttcttcttctgaatctgactctatctcatgaaaaccacatgaagagatgtatgcgtagttacacgtacgtcttattgtttttttacaagaatcctttgatgctaatacaacattatactacctccgtttttatatatgtgacgctatacaattcaactttgtactggc

SEQ ID NO: 38717 - DNA, 2234 bp, Zea Mays
caaacaggcccattaccctcctgagatttcgcgctccgttcacccaaaatttccccatctccgacctcccccttcctctccccctgccgctccccgcgccgagaaggagaaccccagccgccgcgcagcgcgccgcccatggcctcctcgtcggagaacgcggctgtgccgccggaggaggagccccaggccccgccgccgccggacacagagcctaccgaggcggcgcccggcgaggcggaggatgagccgcaaaccctagagcgggcgcaggagctcttcgacaggggttccaaggccatcgaggatgaggacttcgtcgacgccgtagactgtctcagccgagcgctcgagatcagggcttcacattatggagagctcgcaccggagtgtgccagcacatacttcaaatatggatgtgccctgctatacaaagctcaggaggagagtgatgttttgggaaatgttcccaagagcttgccaaatgaagactcagtgaagagtacagctactaaagatgacagtggaacctcaaaggtctctggtaccgatgcggaggatgctgcgtcatcagaaaaagttgatgctgaagaaggtcacaactcaaatggcaaaaatcaggagaatgggaatggtgaagttgagaaagatgatgacgacgtcgacgatgatgagaagatgggagatgaagaggataatgatttggatctttcttggaaaatgttggacattgctagggcaatagttgagaagagccaagataacactatggagaaagtaaaaatatattctgctcttgctgaagtggcaacggaaagagaggacatggacaactcactcagtgactatatgaaagctttatccatgttggagcatttggttgagcctgaccatcgtcgagttgtggaattgtatcctctttgtcatagttacactattttgtctgctaaagagagatattacaacctgcagtcagaattatatgacattaggatcatcaaattgacttgaatgtaattcttacgtcatatataatgactggagtctggaggtagtattattacataaataagcatctgcaacctggtcgtgccttgctctatttttcatgcctttattttatagttatttgtagcctgataaacttataatttgggttggtaaagaatgccttttttatattcaataaattagttcagttgttttggtggaatgcgtatccataacattatttacttgaacgcacatgctactttagatgatatgattgcttcccagggtcagtttgttgatcttcctttgttatttgccttaatccagtcttagaaacttccgcatttgtttggtttatgaactagtttccaagatcggagaagcaatttcatactgtgcaaaagcaatttcgctatgcaagtcacgcatacagagcctgaaaagttccaaggatgctttgttggctggtatagatggtgatgcatctgctgctgaagctgaaggaggctcagaaaaatctgccattgaaaaagagctagagcagcttactagcatattgcctgatcttgagaagaagcttgaggacctgtctgaagcaaacccaagcgctgacatggatgagatggtgaaggcaatcgtgtccagggtaactgatgtgatgccaaaagctgcatcttttacttcttcccagatggcaacctcaagcaatggattcgactcctcggttatgtctacggcagcgacaaccggaagctctggaagcaccgtgactgaccttggggttgtaggcagaggcgtcaaacgagctagcatcaagccgatctctgctgaacctgctgctaagaaacctgcacttgattcaccatctcaacaaggtgacagcagcatcaactctgaggttgttcctgcaacgcagactggagacgagtcagtatctaagtaaattacaatttcattagccctactgtaatgttaacttgctggaacatattagctgctatgtaaacgcttaagaagggactgctggggccatagactcatcgtgagctgaccattgaaatgttaaattgctgagatcatcatggcggtaaatcatgtctgctatatcaaatatgcttggtgagatgtgtactttctgatttttttgatgtatctgaccgtagtagcccatcacttgcctatccactgctgtggctgtgctacgataggacatttcgtttgttaccatgatgttgtcttct

SEQ ID NO: 38718 - DNA, 1070 bp, Zea Mays
caaacaactacaacacttgaatatgttgcgaagaatgtagtaattgcaacataacgtaaaaatgttgctatagcctattgccactctattttttgcaacagcaggcaacgacagttgttctatcgcaattggtgcctattgcaacgatttatagtctatcgcaacaatttttgcccattgcaacaaggtgatttttagtatagtttatctattaggagccttgggcttccaaagagtgatcggaagccctaacccaatgccatctttcggttcagccgcaccaccttaaacataccagggctcgagtcgtctataaaagctaaccgagaccaccacgaattagggtttcagcgcggcagcggttgcgagcgggtggatccagcgcgggcgacgctggcgagcgcgtgacggcggccttgcgggctggcggatccagcgcgggccttgcgggctggccgtgcaggaacatgctgccactgctggtcccgtctgcatgcgcctaatctcgcggttccccgggggcgccatggggttgcagcggttgcatgacggcagaaccaacgcgcatgggcgggctgatctgacgcgagcggaccacgacgacgatggctgacatgcgagcacgcgggtctggcgggatctgacgcggacggggcacgactccggtcgacgtgcggccaggcgagccgacgaggacggggcgcggctctggctgacgcgcggccggcagacaacgagttcgcggttggtggacggacgtggcgtcatcacaagcaacacatctgagacgggatcaggggcgacggacttcccaagtggcgagctgcgacgatggcctcccctagacgcgagcagcgtcggatcccagaggcgcgtgcggcgggcgacgactcccttagggcgtttgtgacggcgtgtttttatgcttacctgtatatatatttatgccaacttcaataggtgtttataacatatatcttagtcaatgactacccttccatctattgtctgtttatgatatttctattcacattttacacatacgtttatagatttgtatgtattatctc

SEQ ID NO: 38719 - DNA, 2068 bp, Zea Mays
gcaaggttggatagcagcgtacgcgtccctaattaaaacagcagctggggcctttggggtgaggcagccgaggtgtccaagtgcaagtgatacgagtacgatacgtataatcattatcattatcaagtaggggttacatatatcggacgataaatgtacgtatcccgggaatacacaaacacacacagtccaggtagggcccatgtatcagagagtaggactagggacttgtgtacactggtctggatggaatcataccgtggccctcgtggcctcgtgggtgggacaccacacgtcctacactgcgagcgcgaggcaagaggagggggagaaggcgacgcggcgcgatcatgcgagcgacggcgggcgtttgagctaacccgcgccaccccccttcctcggagtcggagcgagtcgaggaacggctcgtctgcctctcccgttctccttcctctcctccccagaagatccgatccatcatcgaggactcgccgggaagaatcaaggatatatagataatatacaaacaaaggttcctccagagcccagagcaggagggaagtcaccggccgtcggcggggaggagatgtcggacggcgcgggctcccggacgggcgtcgctggcgcgctgggcctctcggtcacctcgtcggtggccatcgtcatctgcaacaagtacctcatcagcactctaggcttcttcttcggtcacgacgacgctgacgagctggcacctcatggtgaccttcttcacgctgtacgttgcgcagcggctgcgcttcttcgagccaaagccgatcgacgcgcgcaccgtcatctccttcggcctgctcaacggcatctccattggcctcctcaacctctgcctcgggttcaactctgttggcttctaccagatgaccaagctggccatcatacccttcaccatagtcttggaaaccctctttctgagcaagaagttcagagcatcaaggcctccctcatggttctgctgctgggagtcgggatcgcgtcggtcacggatctccagctcaacctcctcggctcgatcatcgccgtgctcaccatcgctgcgacatgcgtcgggcagattctgaccaaccaaatccagaggaggctgaaggtttcgtcgacgcagctgctgtaccagtcgtcgccgtaccagtccgcggtgctgctcgtcaccgggcctttcgtggacaagctcctcaccaagcgtgacgtcttcgcgttcagctacaccacccaagtcgtggtgttcatcctgctgtcgtgctcgatcgcggtgtgcgtaaacttcagcacgttcctggtgatcggcacgacgtcgcccgtgacgtaccaggtgctgggccacctcaagacgtgtttggtgctctccttcggctacatcatcctcaaagaccccttcagcgcgcgcaacgtggtgggcatcctcatcgccatcttcggcatgggcctctactcctactactccgtcgtcgagagcaggaagaagaccgaggacgctagctcgctgccggtcgccgcgcagatgagcgagaaggactcggcgccactcctcggcgccaagagctcgccgcggacagagaacaaggccgaggaaaccttcgactacatgccgaggacggccaagagcgcgttcaccggccggtgagcgcgtagcttgtaaggagtacgtatctttctagagttgtgggtagacgacgagcaacaaggcgggaatgtgttagtgaaagatgtaacggcggcaagtgacattccaattatcatttttgcgatttctcctctagggtggtctgcgtggtcatggtttaccagagcataaacagcagaatgtgtggtctactggtcttgaccgagcttgaaatagtagattggattggtgataatacaactatacaagacgtgcgaaatgtgtaaggtttgtgcccgttaggccatgttcgggtggggattagaggaaattaaaattccttctgttcaattttaaataaaaaataatttaatctcctccaatcccctcaatttattcctagttgaacaacccctaaagtcttgttttgtt

SEQ ID NO: 38720 - DNA, 3574 bp, Zea Mays
cgccattaaaaaaccctcgccacggcggatctgcaccacccgctcctcatctccgccctccacatataaaaaacggcaaagcgcccccacttgttcggacgactctgcgcgcttccatcccccccccccccccaacagtcccacaccacctgcatatctccgtgcggccgtgccaagtcaaagtcgcacctcagctctgccgaggttggcattggtggtggtgacccggcgatggcggcggagcgggacatcgacgacctgccgcggaacgacgccaactacacggcgctcacgccgctctggttcctcgagcgcgccgcgctgacccacccggccagggcctccgtcgtgcacgggcccgtgcgctacacctgggccgacacctacagccgctgccgccgcctcgcctccgccctcgcgcgcagatccgtcggccacggaagcacggtagctgtaatagccccaaacatccccgcgatctatgaagctcattttggagtgcccatggctggggcagtggtcaactgtgtcaacattcgactaaatgctgccactgtagcatttctcttggagcactcctcagcagaagttgtcatggttgaccaagaatttttcaccctggcagaggattctttgaggattatcgcagataaaaagaaaggcacttttgaacagccacttctaatagttattggtgacgcaacttgcgatccaacaaccctccaagacgctttgagaaaaggagccatcgattatgaggcattcttggaaagtggagatcctgaatttgcttggagaccaccacaggatgaatggaagagtatcgcgctaggttatacttctgggacaacttctaacccaaagggtgtggtattgcatcacaggggggcttacctaatgtcactgagtggtgctttgatatggggaatgaacgaaggcgctgtttacttgtggactttgccaatgttccattgcaacggttggtgctatacatggacacttgctgctctctgcgggacaagcatatgtcttcgtcagaaggtgatttgcacaacttcaagaacaagagcacaagtcaagtcaggtcatcagaaaagacactctggtaacttgttgatgctaatgtcacaaggtctgctttcagcatgttgatataaaaaaatgaagcatgatatattaacaaagagaaatagagaaaaaaatggaaacctgcatagatgaaacacttagtactaatagagaaaataaagaatgatgaacggagtaactgaacaagtatgaatgtgtggagagaaactagtaattgaagctatgttgctgctgatcgatggtttggagcagttttcaaaaacattgaagtgtaaacatgaaagatgttagcctgaattatatatatggagataaaaggaaatacatgacacgaaattatacttggtaggtactgcattggtatgttgtctggctagaattaagattgtcatttgtgccggtataagcaggacatcatggatttttaattggaagctgaatgatgccttatctttcttattcacttcggtttctcattaataagttgtggtaagattttgttcgtatcacaagttttactaactgctcataactcaggaaaacaaggtgggctttaatggtcttgcatgtgatacaatggccacatacccacacaaatggaatgaataggttcacatttagctgggccaatgttgttgatgtcctttgagtaaaacctagggcagtactggcttgacgtttagcttcctcgatacccttgatcccccaaagtaaacttttccccccagatgctaccaagtagttctaacaataactccttttcatatgcatcaaacattatactcgattctgtctccacccaagaatgtcagacaaccaaacatcaaatgtatgaccttggagacctctctccctgcattatgtaaggcgtatttgatgagaaatcgtaatttttgacttttgatttctcttacaatattgggaattgctccaaaaatattgtcattttatggacatattgatgaagctttgcacactaagcatacacaatttgactatttttttatcgaacttgcaaagtttgaatttttcaaatcataatgcaccccacccttcgttgatggactggccggagggagtacgttctgaccaaaacttagcgttcttgaatcacttgtttggttctaactttctttgtttagttctgactttccttggtaattcctttcttcttcttttttgtaattttgagtcattgagggtatggcgtttatttaaggctttttgttgaagtaatgaagaattacaaaacacatgataaaagagttgttcttctccatgcacccaagacacctacgactacgacgagcaggtttcagcgaaggccatcttctcagctatagccaacgagggcgtgactcacttctgtggggcaccggtcgtcctgaacaccatcatcaacgcccctccagccgacacgattctccccctacctcgtgtcgtcaacgtcatgaccgctggcgctgctccgccaccctctgtcctggcggcaatgtcgaagcttgggttccgcatcactcacacctacggcctgtcggagacctatggaccatccacggtgtgcgcctggaagccggaatgggacaggctgccagccgacgagcgcgcccggctccacgcgcgtcagggcgtccgttacgtgggcctggagggcctggacgtggtggacccgaagacgatgacgccggtcccggccgacggcaccacgatgggggagatcgtgatgcgcgggaacggcgtcatgaaggggtacctgaagaacccggaggcgaacgcggaggcgttcgagaacgggtggttccactcgggcgacctgggcgtgcggcacggcgacgggtacgtcgaggtgagggaccgcgccaaggacatcatcatctccggcggggagaacatcagcagcctggaggtggagaaggcggtgtacctgcacccggcggtgctggaggcgtcggtcgtggcccgcgccgacgagcggtggggggagtcgccgtgcgcgttcgtgacgctcaaggacgccgtggaccgctccgacgaggcggcgctggcgcgggacatcatgcggttctgccgcgagaagctgcccggttactgggtgcccaagtccgtggtgttcgggccgctgcccaagacagcgaccggcaagatcaagaagcatgagctcagggccaaggccaaggaactgggcccggtcgggaagagcaggatgtgatcgagcctcgagctcgtcttgctttgctacactgtactattcgtaggatggatggaagttgtatactacagactacagtgcaaactgcgtttcttctgtataacaccactactgtacgaacaatacagtcgtgtctgagcttttcttttgccagtgaggactgaactttgtatgaagtatgaactcgcgaagggcgctgcaacactgctcccacttgtatattccaaatttccaagggtacagtaatggcaagacagttaagaagttgcccaaata

SEQ ID NO: 38721 - DNA, 2340 bp, Zea Mays
aaaactcaactacaatcaggcccacctgcctgtcagctccctcccgctcactcgcgcaatccgtcgaactcgaacactgccatggccaccgccgctgccgacgacgatgtcaagctcgaatccttcctccaatggctccagtccaacggcgccgacctccgcagctgcacgatccgcgcatgcggcggcaagggcttgggggttttttccaccgccgcccccgagccgggctccaacgacggggtggcgatggtggtaccgctcgatctcgccatcacgcccatgcgggtgctgcaggacccactcgtcggcccgcgatgccgcgcgctcttagaggacggagtcgtcgacgaccgcctcctcgtcatgctcttcctcatggccgagcgccgacgccctggctcactctggaagccatacttggatatgcttccgagcacctttgggagctccctttggtttactgaggaagagcttgccgaactggaagggacaactttgcaccgagctacgttgattcagaggaagtcattgcaatcctcatttgatgagaaggttaaagggctcgttgaggagcttttgcatgtcgatgaatcagcaagctcagttgaagttttgtttgaggacttcctttgtacgagtctatgacagggcaaactcaatcttctggactcgagcactgaacataccattgcctcattcttatgtttttctgggctcatgtggcgatcaacaggccagggctgacaatgatgcccaccaggaaattgatattacagctaaggattgtagtgctgatgagaattctaaaccaagtaacacagagtcaatttgggttgagggccttgtcccaggaattgatttctgcaatcataatgtaaaggcactggcaacatgggaagttgattctgtgggaaatgctaccggaattcctgcttcaatgtacctcttgcttgctgataaaagtcctgctgagactggagcagagatctgcataaactacggcaacaaaggaaatgaggaactactgtacctttatggatttgtggttgacaacaatcctgatgattatctcatggtaaccctcataatgatgttcattatcctttggaagctcttagacagatccagtctgctgatataaaaatgaagctactagagatgcagaagggagaattgaggtgcctcctacccagaagtttgcttgataatggattttttggtatccgttctagtgaagataaggatagcaagaaaaatactggtccgttttcaagttttagttggagtggtcaacgcaaagttccatcatatcttccaaaaattgttttccctcatgaatttatgagtactctacgtactattgccatgcaagaacatgagcttgaacaggttgcttctttacttggagagactttattctctaggcgtgaaactacactttttggagatgcagtgatcagtgtttcgttcgctacttctgaactgatctgttgataactgtgtactaaaaaggagtaggagactagtgactccgcacgttggatatagtgaagacagagaaacatcttgtgcagcgatccaaagtgctatttgggaggtctgcggtgatcagggtgcactgggtttgcttgtggatcttctcggggtcaaaatggctgaacttgaagagggctctggaacagaagcatctgacgccgaactgctcgagcagttcgattccattcagccagaagactacgcgagtgaaagcggcgagaagcacgaaaggaagtcaaagacaaactaccgttcgtgtgtagtgtaccggagagggcaaaagcagctgacgaggctgttcctgagggaggtagagcatcttctggagctttctgcgaaagaacagagctaagagactctcatctggccctgcctgcatcaaggttagaactgcagggttgtgaaaggaggcacacccgttgcgaaagtagaataccgccttcgtttcgttcccttgcgaaagtactactactccgttccaggactacgatttcgtctcccgaggattccggattgcccgttggctgggcatttgtggaggagacgtcgtcttgcactttgctgccacggctaggctgtagctttacctgattcagcttgcagcggcggagctgcagcgaacagccatctagagacagctccagagctctggttttaccaaaatgcgtttcttttctagatgactttgccttcgtcagagatgcatctcctggtctcacgagtcacagttccgactccgagacggtcaaggagattatagtctgctaagattatgtaatctaaagtattttttaaaccggg

SEQ ID NO: 38722 - DNA, 1618 bp, Zea Mays
gttcacccgttgtttatcttgcgtccggcgtcctctctctctcgtggcgacgactgggcgacctccccgcccccgccgctctacgccaggtgcccagatcttcgtcgggcccttcgccgaagagcagccaacagcttaggttaaaatcaaaaaaatttgtcgggcggataatacaaggcctacaccagaaggaacaccctttgtgcgacaggttgccggtctgcgggttgaatcatggcggagcacttggcttcgatcttcggcactgagaaggacagggtcaactgccctttttacttcaagattggggcctgtcgtcatggggatcgctgctctcgtctgcacaacaggccaactatatcaccaactcttgtgcttgctaacatgtatcagcgccctgatatgataacccctggagttgatgctcaaggccaacctattgaccctgagaagatgcaggagcattttgaggacttctatgaggacatctatgaggagttggggaagtttggtgagattgagaatctgaatgtttgtgataaccttgctgaccacatgattgggaatgtctatgtccagttcagggaggaagagcaagcagccgcagcatacaatgctcttcaggggcgcttttactctggccgccctataattgttgagtattctcctgtgaccgacttccgtgaagcaacctgtaggcagtttgaggagaacagctgcaaccgtggtggctactgtaatttcatgcatgtgaagcaaattggcagggatctcaggaggaagctgtatgggcgttctgcttccaggaggtaccatgggagaagccgaagccgaagcccgccaccacaaaggaggggccaccgtgaccgtgatgactaccaccaccgtgaccgtgatgactaccgtggtggcggcggtggtggaaggggaagaggtagcaggtatgacaggtacgatgacggagcaggcagaggtggcaggcatggcaggtatgatgatggagcaggcagaggcggcagacatgacaggtatgatgatggaggaaggcgcaggcatggtagcccctcaaggcgtgcaaggagcccagtcagggaaagcagcgaggagcgaagggccaagattgagcagtggaaccgtgaacgggagggaaaacagtgagctctccgtggctactgtttgccggacttgttgcttagctccggctctcatcgctatattctaagtatgcttgtgtggattgcattctgcatggctaagtaaaaccttttaagatcaggattcctcggttcattttatggttaaaccagacatcatttgtttccatctgtgttgtgtcggatcctttgctattatgttattttgacaattggtgtcaaatcttttgtggtgtgctattagcttatgatgatgtcagttgtggtttgtcactagatttgccatctggctttcagtcgtgtgttatgctgttccatggcggatttcttgttttccctcttctcatttttgctcaatgctcctagacagtgcttgggctgccgtcattgtactatgtgcagtagcacggagcaggttctattcagtttgagctgtcttttgtcttgggttcatggcaatctgt

SEQ ID NO: 38723 - DNA, 880 bp, Zea Mays
gttgggcaattcaaccaccaaaatcaattaggaaaaggtgtaagcctatttccctttcaggattacaaaatcaattcttcacgatattaattctccttacacaataatcattttaaacttgagtctcgcgcgacacgaccacttcatacttatgtacaccctccattgatgaatgaagcgaggcatcacgacattcatctaatacctcgacaacgcactcgtgctaaaaataaaatattcttcacgaacaactaattcaaccaatccattcatcggaccagttaataagaatagcaaatcaacttaccgttccaatagcttacacacatccacgagatcgataatgattctccgattctgctattacgtcaagcacgtggggagcaccacgcgggatttattgttctatccgaattctcgggatcgtttgacgacgcaagggatgtcgacgagttggaggcctctagggtcgagcacgacaacggcttcggagctccgcacaagtgacgcgcatctggagtatagatcgtcgggatcgactcaaatcgcgcaagcatgtccatcactcagggctctcgtcgaactcgagatgcgcaagccgtgacatcggtagcgagtgaggtcgacaacaagggcggggctgcatagatccggggctgctgcacacacgatgcgacgacgaacgacgacaaccggcgaggtcaacgacgcgaaggggattaaagccgagtgagccgagagggcgcgctggcaaacaggaagtcgcgtgcagaacgagaccgagcagagagagcggcaagcaggctgagcgcgcgctggaagctcggaccaagacgcaaggagccgtccatggagctcggggagctgcacgcagaggcga

SEQ ID NO: 38724 - DNA, 3646 bp, Zea Mays
gtgaaaattgtgttttcggtatttgaaacctaggggatatcatgactatcgcaaccggccaacaggaaatttcagccgggcatccccaattcatcttccccacgccgcgtccgcgtccggaccggacaccggcggcacctcctcctgcctccacttcaccagttcatcgggcgccggaagtgggagccatccgccgccgccacatatctgtcctcttcggcgctgactggggctcagccgctcgaagctccatcccgcctcccgtcttcgccgccgctcgatccctcgacgcgacggtcgtgtcttgactctccaccacgcgactccacccagctcttctccacgcgactgcagagcgacgatcggaggcgccgccatcgcacaatccaccgtcgctgcctgctcctggtgtgtcctctctcctctctcctctccctctccatctccgtctcaaatcttttacccaaaccctaaccccgactgctatctattcttgtaagtgatactctcacaagatccgctgctacatccatttcttcttcttccacgttgctgggaggagacgggcgcaaggatttgtgcgagggagaaagaaagggaaggaaaggggataggacgggaggaggagcacgactgcttaccacttattcttcccagcccgctcttcaatatgaaaaccaaaaattggtgcaacaactggaggtacagaagtccgaaatgcatgcattggagcgcaagttcaaggagcttagtgatgatcaatgttcttatgacaagactctgatttctttgaataaactgtggaatcagctgattgatgatttggttctgcttggagtacgggctggtggggatttggataatttgcaagcacttgaccatgaagagttatcagaagaatctttggagtcgtgtccttccgaggagatatttctcttaaggctcttgaagacaaacaacatcagagataatagtgacactagcttgttgaaatttgttgaagaagctcttgcttttcggtcttcagcaactgttactttgatgaagtccctgcaagagactatttcttcgcagcaagctagaagtgagtctttgtctttagctttgaatggacaaaagtcaaatgaagatgttattgttgcccttcgaaatcataatgattgcttgaaagaggtggcagagaatgcgagtcaagccatctctattatcaacgagaagcacaaaaggtatcttgatgagattgaggcttttaaaagcaaccattcaagggagctacaggaaatcaagcgtatttcaggtgagctagaggaaagcattgcagagcttgaggaaagtcaaaggaagttggttgtgctccagttgcagaggcatggttctgtaatggatgcatctggggcaaatgctgtgaatggtggtatttctactcataaatcttcagataaaagtatgagctggcaagacctcaaagatgctgttgacgcagctaagaccctcgcaggaaaccgtctattagaactccatcagactcaagaggataatctgatactatccaaggagctgggagatcttgaggggcaattgaaagatgagaagtatgtcttggtatccaaaccgtacatgattcttaatgataaactacaacatttgaatgctgagatagagcgttatagagggttggttgaagttttacagaatgacaaggaccagctcatgcaaagggagaaagaaatttctgcaaaagcagaatcgctcgacagtgttaaacaaaccattatcacatatgagaaaaaaattgaagaactggaaactcaaattcagatactcttttctgaaaagaatgatctcgaaaccaaggttgaggagactttgcaagattcaggtaagaaagacttcaagaatgagattcatgttatggctgcagcactctccaatgaactgggtatgatggagaatcagttgagtcgatcaaaggatgcagcttctgaagcacttgcattgcgtgagcaagctgaatcattaagatcattggtagctaaaaagattgaggaacacaagaagatttcggataaatacaactcacaagtaattgagatcaagtccctcaaggcattggttgaggagttggagcaggaaaagcaggagctggagtttattgcagatatgtacgtgaaagaaagttctgagtctaggacaattgctgatattgaagaatcagaaacccgagctcgcaatcaggctgaatatttgaggagcaatctagaggagcatagtcttgagcttcgggttaaagcagcaaatgaagctgaagctgcatgccagcaaaggctttcctttgctgaagtggaactagaagagttaaggaccaaagtagatgcatctgaaagagatgttgtggaacttaaggaggcaataagaattaaagaggctgaaggagacgcctatatttctgatatcgagacagttggtcaagcatatgaagacatgcaaacgcaaaatcagcatcttcttcaacagcttactgatagagatgactttaacataaagctagtatcagatagtgtgaagatgaaacaagcttgtagttcccttctctctgacaagcttatgctagagaagcaactccagcaagttaacacttcactggagtcatctaaactgaaaattgcccgtggcgaagagcagatgaagacttgtgtagcgcaagctataaaaacttcagctgaaaacagacatcttactattagcctggaaaggattgcgctggagttatccaacacagataaggaactcaagtggcttcggtcctccgttggatcctctgagaaagaatacgagcaaactcagcaaaagatatctgagctgagagcgttactggagcacgagaggagtgagaggcggcggcttgaagaacaatatgaagaggtgaaaaatgaagttatggagctgacctctgagactgaagagactactgtccggaaacttgaggatgaaataaaagaatgcaagggtattctcaagtgtggtgtatgctttgaccggcctaaagaggttgtgatcaccaaatgtttccacctattctgctcgctatgcatccagagaaacctcgagattcgccaccgaaaatgtcctggctgtggaaccccattcggacaaaacgacgttagggaggtgaagatatgaacctcaccaaagtgacagtgacaaaaccgacttgcgtgtgaacagcagcaacaaactcccttgtgaatatcgtctgttatgttggcgaacatctagatctaacttgctttattactgggattaaaattaggataagaactggaagaagtgaagttcctaatttatttgctatcgtgtgtgctatgtatgattacccttggcagcgagtggtgtatctgctgggtgtcaatatgctcgaattctagctcctccctgctagcgggtgcatgccagttttattaaggctattccatgtacatggtgtcacactctttaatacataccacataggatgaaaatctgatgtgacatgtgattgaaacatagggagacaccactcatgcaccagattatagacattgaaatctgaaccatctaaatgaactgtaactcatactcttatatatatctaacattttgtcttgtg

SEQ ID NO: 38725 - DNA, 263 bp, Zea Mays
ttgataagccataccttgaatccctctagccaacatacccttgagagtcttttctttagtcgggtaagtcttgctgagtaattctgtactcagggttttattccctattgtttttcaggttatagttttgtgctgctgatgatggtgttaagtgctggtgggctcggccttcttataagtctaagtaactcctttatacttcttattgaggatggccacttgagctagcatatatttcaaacttacaaataatttataacatt

SEQ ID NO: 38726 - DNA, 168 bp, Zea Mays
atctgaaccagccaaaacaaacagagatagaggtaagcattcatcgtgatcaatgtcgtgcatatgccgctgttcagggttgtacatggagtcctaattaccggctatgacaccgccacgccgtgaagaccatatgctgcagtcagccttgtctttgtctccaacgac

SEQ ID NO: 38727 - DNA, 588 bp, Zea Mays
cacgactggacgtcaaagtttcagaggacaactgtgtcgttctgaaggctcagaggatatggacaaagtcattcgcgcgtgacggcgtagtggttcctgaccgggtgagctgggaacaccgacgagcacacgtgcagcagcagggatagagcagaggccgagatgggcaactgggcagagcgtggatggcgggacctcgactgggagataggacaggacgcatagcagtttggggtcgagctcggagacgatgacccaaagtggagctcgacgcagccagggcgcgacgagcagagagaaggcgcgactggagagagatggagggaggagagaggagaccgcgtgcgcgcagcaaagaagttcggctggggaggcgtagcagccatggagctcggggccgggcacgcagggagcagcgcggtcggccgagctggagggcgagcaatgccagcgagctcgcgcgcggagaagcagcaggcgcggcaaccatggctggagcaggaacgcgtcggggaacagcagcagcagggagagggcgctcgcagcagccgtcaccggcgaggaatggtgtaggggcacgaccaaaac

SEQ ID NO: 38728 - DNA, 2972 bp, Zea Mays
aaattgccaaatctcgagatccaatcgaagcgccccctcccgcattgccgtttccgaccgccaactctcccaaggctgctctgctcgcccaccggaattcccgccgcggagggtgctgtggtataagcttgctttaggattggagggctctggttggttgcctagacgccggcgatggcgtcgccggccggcggcgagtctccggcgaagcccgtcctcctgcacggcgacctcgacctctggatcctcgaggcgcgcctgctgcccaacatggacatgttctccgagcacgtgcgccgctgcttcgccgcatgccgcccgccctcctcctgcgggaccaagcacccgccgcccgccgccgctggccgccgccaccaccaccaccaccggaacatcatcaccagcgatccctacgtcacgctgtccgtgtccggcgccgtcgtggcgcgcaccgccgtcatccccaactcccaggaccccgtctgggaggagcgcttcgccgtgccgctcgcgcaccgcgccgccgacctcgagttccaggtcaaggacaacgacaccttcggcgcgcagctcatcggcaccgtcgccgtccccgccgaccgcgttgtctcgggcgacgaggtcgaggactggttccccgtcataggcaccaacggcaagccgtacaagcccgacaccgcgctgcgcctccgcttcaagttccagcccatcgccgacaacccggcctaccgccacggcatcgccggcgaccccgaccacaggggcatccaggactcctacttcccgctccgccacggcggccaactcacgctgtaccaggacgcgcacgtcagggaaggggacctgccagagattgagctcgacaacggcaagacgttccagcacaacgcgtgctgggaggacatctgccacgccatcctagaggcgcaccacatgatatatatcgtcggctggtcggtgtacgacaaggtgcgcctcgtgcgcgaaccatctccgtcgcggccattgcccgagggtggagaccttacgcttggggacctgctcaagttcaagtcgcaggagggtgtcagagtgtgcctgcttgtgtgggatgataagacttcacatgacaagttcttcatcaagacgggtggggttatggcaactcatgatgaagaaactcggaagtttttcaaacattcctcagtcatctgtgttctctctcctcgatatgctagcaataagctcagcattttcaaacagcaggttgttgggactttgtttacacaccatcaaaagtgtgtgctggttgatacacaagccaggggaaacaagcggaaaattacagctttcattgggggcctagatctttgtgatggccgctatgacacacctgaacacaggcttttcaaagatcttgacacagtattccaaaatgattaccataaccctacattttcggtgcaaagggtcccaggcaaccatggcatgatttacattgcaggattgatggccctgctgcctatgatgtcttgacaaattttgagcaaaggtggcgaaaggcaacaaaatggcgtgaccggtttagaagagtatctcattggaaagacgatgctttaattaaactggagcgtatctcatggattttaagcccttcacccaatgttccaaataatcatcctagtttgtgggtttcaaaagaagaggatcatgaaaattggcacgttcaggtattcaggtcaattgactctggttccctaaaaggatttcctagtgattgcaaagcagcttcaaagctgaatcttgtgtgccgaaagaacctggtaattgataagagcatccacactgcatatgtccgagcaatcagatctgcacaacatttcatttatattgagaaccagtactttcttggttcttcatatgcttggccatcctatgtgaattcaggtgctgataatctggtaccaatagaattggccctcaaaattgcaagtaagattaaagcgggagaacgctttgcagtgtatgtagtgataccaatgtggccggaaggagtccctactgcagcatctgtgcaagaaatccttttctttcaggcccagacaatggagatgatgtataaaataattgcagatgagctcaaggcaacggacaataaggatatgcaccctgaagattacttgaacttcttttgtcttggaaatcgggaagaaccaccatctaatggtagtccagaatcagagaaatctacagataaaagtgcagcggccttagcttcgaaatatcgacggttcatgatctatgttcacgcaaaagggatgattgtggatgatgaatatgtcattctgggttcagcaaacatcaaccagagatccctggctggttctagagatactgagatcgcaatgggtgcataccagcctcattatgcatggtctacaaagaatggacatcctcacggccaggtatatgggtacagaacgtctctgtgggcagagcaccttggaacggttgatgatcgcttcaaggatccttcgagtttggagtgtgtaaggtttgtgaatcaaatagctgtagagaactggcaaaggtttacagcagaagaaatgagtacgttacaagggcacctcctcaagtacccagttaaggtggaggctgatggtaagatcagcccactgtcagaccaggagtgctttcctgatgttgggggcaagattctgggagctccaacttcacttcctgattcactgactatgtagtgttattacataaaaaaacttctttcagagttgaactttgtaattgtctaaaattggcgggtttatcgcagaacttgtactatatctgtaatcatcgatagttggcgcagggaaagttcaagatgttagtggtgctaagttttcccagcgtttgtaaatgaaccatatgataggatcctagacaatgcttccatttccattatgattatacaacagttttcaacatttttgctc

SEQ ID NO: 38729 - DNA, 2702 bp, Zea Mays
cttgaaacttggagacttcgtacacccaatgaatgggatcatatgactgtttggtatgatctgctccaatggaggaatgagatgtacaattcagtaatagatgcattcaaggactttggtcaaacaaatcctcaacttcatcatcttggctaccgagacaaggcttggaatgtgaataagctcgctcacatagctcgcaagcaaggtcttcctgaagtttgtgtaactatacttgataagatgtatggtcatgctactatggaagttcaggaagcatttgtgaagatatgtgaacaagctaaggcttacttagaaatgaaaggagaactagtcagtggtcttaacttaatcaataataccaatttagaatttttccctgtgaagaacaaagcagaaatatttcgtctgagaggtgattttctgttaaaaatgaacgaatgcgagactgcaaatcagtcttattcaaatgccataactctttttaagcatttgcccaaaggatggattagctggggaaattactgtgatatggtttttaaagaaacaaaagatgaggtttggcttgagtatgcagtcagttgttttttccagggcatcaaatatggagtttcaaactcaaggagccatctagctcgaattctctaccttcttagctttgatggacaaaatgaacctgttggaagagctttggataaatatcttgagcagctgcctcactgggtttggctttcatggatacctcagttgttgttgtcgttacagagaagtgaagcccaacactgtaaattggttttgatgaagatagctcaagtttacccgcaggcattgtattattggcttcgtacatacttgatggaacgccgtgatgttgctactaaaactgaaataggaagaaacatgttggctcagcagcgcatgcagcaagctatgatggcaaacaatgcggccaataacttacctgacggaagtgcaagggcatctaatcatgcaggtagtaacatgacttctgacaaccagtctcatcaagcctcccaatcagttggtgctgcaggttctcatgatggtggtaatgtccaaggacaagatccggaacgatctacccctgaaggtggcacaaataccagccatgatcaaggtcaacagagttctacaggtgctgagggctcacaagttccgcttagacgtaatagcggacatgggtgggtaacttctgcagcaagtgcatttgatgctgcaaaagacataatggaagctcttagaagcaaacatactaatctagccaatgagcttgagcttttactgtcagaaattggatcacggtttgttactctgcctgaggaaagacttctagctgtggttaatgctctgcttcatcgctgctacaaatatccaactgcaaccactggcgaggttccacagtctctcaagaaggaactctctggtgtatgtagagcttgcttctcacaagatgctgttaacaagcatgttgattttgtgaaggagtacaagcaagattttgaacgtgatcttgacccagagagcgctactacttttcctgcaacccttgctgaacttacggagagattgaaacactggaagaacattcttcagagtaatgtagaggatcggttcccagcagtattaaaactggaggaagaaagtaaaacacttcgggattttcatgttgttgatattgaactcccagggcagtacttcacagatcaggaaatcgcaccggaccacactgttaagttggacagagttggacctgacattccaattgtccggaggcatggcagtagctttcgacggttgacactcattggttctgatggttcacagcgccattttattgttcagacatcactgactccgaatgctcggagtgatgaaaggatgctgcagctattccgtgtgctaaataaaatgtttgacaaacacaaagaatctaggcggcggcatctggctatccatactccaataattattcctgtttggtctcagagcagcttaatcaagccgtttcagggcagctctctcctgaagcaattgtggagctacgtctgcaagcatacaatgagattacaaaaaatattgttaatgataatattttctcccaatatatgcacaagattctgccaactggcaactacctgtggaccttcaagaaacaatttgcaatccaagtggctctctcctgcttcatgtcgtatatgctgcagattggcggcagggctcctaacaaaattctatttgctaaaaatactgggaagatcttccagactgacttccatccagcttatgatccaaatgggatgattgagttcaacgagcttgttccatttaggctgacacgcaacttgcaagctttcttctcgaattttggtgttgaaggtctcattgtgtctgccatgtgctctgctgcccagtcagtggtttctcctaaacaaagccagcacatttggcatcatttggctatgtttttccgagatgaactgttatcttggtcgtggaggcggcctctgggcattccatcagtccctgtcgctgctggaatgatcaacccatcagatttccaacagaaggtggtaaacaatgtggagcatgtcatcagtcgtatcaagtcaatatcgccacattgtctggctgaggaggaagtgtttcttggtgggattaatattgtatcattatggtgcttctga

SEQ ID NO: 38730 - DNA, 3648 bp, Zea Mays
tatcagcatcgccctcccttctccgctgttccgtcccatccggctgccatggtgaggaagaaaaggactggccctggagagagttctggggagacttctggagcgcctggtcagggctcctcacagcgtcctcaggcaacacaacagggtgcccgaggtggaggacaacaccaggtgcgtggtggatatccgggccatggagtgccgccttcagagcacccaggtggtgggccgcctgagtatcaaccacgtggctatcagggacgtggcgttccacctttacttcctggtggtgggccgcctgagcctcaaccgcgtggctaccagggacatggtggataccagggccgtggcgggccaccttcacagcatcctggtggtgggccatcacctgggtctcagcctcgtggctaccagggacgtggtggtctgcgtcccagagggggagtgccgcagccataccgtggcgggcatgtgggaggtagtgttggaccaattgttccttcaggtccgtctagaccagttcccgagctgcaccaagccccagatgtccaacatcaagcccctgtggtggcagcaccatcaccaccgggagctggctcgtcctcgcagcctgggatggccgaggtgagcactggacaagtccagcaacttgtgattcatgaccaaagttcagccagccaagttagtcaggtagcaccagcatcaagcaaagctgttagattcccattgcgccctggcaagggtacgcatgggtccaggtgcatcgtgaaggcaaatcatttctttgctgagctgcctgataaagacctccaccaatacgatgtatcaataacacctgtggttccttcacgtggtgtcaatcgtgctgtcatgaaagagcttgtaaaccttcatagacactcccatttggatgggcgtctgcctgcatatgatggaaggaagagtctttatacagctggagcattgccatttacttcgaagacattcgaaattactctgcaagatgaagaaaacagtcttggtggaggacaaagacaccaaaggggccagagggtctttcaggtggtgatcaaatttgctgctcgcgctgatctccaccatttggctatgtttctagctgggaggcaaccagatgctcctcaagaggctattcaagtacttgacattgtactacgtgaatttcctactgccaggtattgtcctgttggtagatcattttattctcccaatttagggagacgccagcaacttggtgaaggtttggaaacttggcgtggtttctatcaaagcataaggcccacacagatgggtctttctctgaatattgatatgtcctctactgcatttattgagcccctccctgtgattgattttgttgctcagcttcttgacagagatatctcagttagaccattgtctgattctgatcgtgtgaagattaaaaaagccctacgaggtgtgaaagtcgaggtcacacaccgtggaaacatgcgtaggaagtatcggatatctggcctcacttcacaagcaacaagggagttatcattccctattgatgatcgtggtactgttaagactgtggtgcaatacttcctggagacttatggctttaatattcagcacaccactttaccttgtttgcaagtgggcaatcagcaaagaataaattatctgcctatggaggtctgtaagatagttgagggacagcgttactcaaaacgactcaatgagaaacagatcactgctctactgaaggtgacttgccagcgtccccaagagcgtgagaaagccatcttgcagactgtgcatcacaatgcctactccgaggatccttatgcccaggaatttggtataaagattgatgagcgtcttgcatccgttgaagctcgtgttctgcctcctccaaggctgaaataccatgatagtggcagagagagggatgtattgccaagagttgggcagtggaatatgatgaataagaaaatggtcaatggtggtagagttagcagctgggcatgcattaacttctcacgaaatgtgcaagatggtgctgctaggagtttctgtcatgatctcgctttgatgtgccaagtatcaggaatggattttgcacttgaacctgtgctgccccctgtctatgcgaggcctgaacatgttgaaagagcactaaagagactttatcaagatgccatgagcatactcaggcctcagggccgagagcttgacttgctgatggtaatactgcctgacaataatggctctctttacggggatcttaaaaggatatgtgagactgatcttggattggtctcccaatgctgtctgactaaacatgttttcaaggcgaacaagcatcagtatcttgcaaatgttgccctgaaaataaatgttaaggttgggggaaggaatactgtacttgttgatgctttggcaaggagaatcccccttgtcagtgacgtagctactattatctttggtgctgatgtgacccatccccatcctggggaagattctagtccttccattgcagctgtggttgcttctcaagactggcctgaggttacgaagtatgcaggattagtgagtgctcaaacccatcgccaagaattgatacaggatcttttcaacgtacggcaagatccccaaaggggggctgtctctggtggcatgattagggaacttctcatttctttctggagggcgactggacaaaaacccaagaggatcatattctacagggatggtgtcagtgagggacagttctaccaagttctgttgtacgaacttgatgccattagaaaggcctgtgcatcattggagtctgattaccagcctccagttacctttgtcgtggtccagaagcgtcatcacaccaggttgtttgttaataatcacaatgatcagcgtgctgccgatagaagtggcaacatactgccgggcactgtggtggactcgaagatttgccatccaaccgagtttgatttctacctgtgcagccatgctggcattcagggaacaagccgtcctgcccattatcatgttctgtgggatgagaacaaatttacggctgatgggttgcaaactctcaccaacaacttgtgttacacgtatgccaggtgcacacgctcagtatcaatcgttcctcctgcatactatgctcatctggcagccttccgagctcggttttacatggagccagatacaagtgacagcggatctgtggcgagcggtgctacgacaagccgtggccctccaccaggggcgcgcaacaccagggctggtgctgcgaatgttgctgtgaggccattacctgctctcaaggaaaacgtgaagcgcgtcatgttctactgctaagattgacgctgcgctgatgctgtgagcaagcaattatcgttatggtggtgatgctaggacaccgttatgcaccggtacgtacggtattacaacctctctctatctccctcccaatacagtacagaaaggacgcaattcttgatttcagatagacagtatctgttaggcaggtacttgttgcttgactgttcttcatatagatcgttggtaaagtatcggttacaatcctgagtatgtcacggagaatcaaggagatgtaggtcattaaatcaacgagattgctactggaaa

SEQ ID NO: 38731 - DNA, 602 bp, Zea Mays
tttccgaccctggcggcacttcatctctctctactccctctctcggtggcgctctctacatggcttcgatgaggcacccacggcgtcggctcacaatggatgcgaagagggtcacagggctgtatttatacaccgacgatcgaatcgtaacaacccggtaggggatccagctgcccgacgattgtggtggggtttgttgcagcgcaacctaacgaacggagaagagagctccgacctgtaggccccacacgacatcgactccaagagagaatacctgcgtgcgagatggctttgtgacgcgcgggtcccagctggtagcgtgagcaggatgcgggcgcgtagcacgattgcccgcttacgtgcggggcccacctggcagcggcctggagacgcggcgcgtgatgcctgatttggtctggctaggcggtggtagctgggccgaggagggagcctcagcccaggacgcggggcctcagtgtatcagggttgcatgagattcagtgtagcagggtagcaggggattcggtgtagcagagtttcagttgagcacccccgaatcccctgcgtccagcacctcatccaaccatcccggtaatggttat

SEQ ID NO: 38732 - DNA, 877 bp, Zea Mays
ctcgagatggcaaatagctctgttaatccaacctctcaagggcactgtacgggggtatttataaggtgcccgagtgcccaacgtctccatgtaaggacgcttgtgccctcaggcacctagattatccccagaatattcccacaagggagggttacagactgtcattacaaaaaagctattacaaattgggcccgtaacacgcttctcaatgcggggcctgttacgatgggccgaatcccacgtgggcctccagatctagcgacaacatggggtgggaagacttcgtcgtaggccttcgtcgtaggccttcgtcgtaagccttcgccttgcggtgaggaggacggagggtgggccacgccgtcatcatgcttccgttggtgcggcgaggtgacaaaggcctggtgcgaagggtagcgtcttcgccttcgccctaacatttgccctccgagggaccagttcgactgagtcatctggtgccgaagacgtcgctagatggtggagacactgccctcgctcgaagtggttctgcgggggttttgatgtgaccgttgatggacgtgtactgttggactgcgggcttcctgaagcgtcgcgtcctatgtataaaaaggggggaggcggcgtggctcaggctttcttacctttttgcgcgtcgtgaaaccctagcattttgaaactgttcgcccgttcgcccgctcgcctgccctccttgctctagttcatcggagatctggcccgcgtcaagcagaccacgcgtcgccgccgacggtacgtatccatgccgtcttcttcttcattcgctgcgaatacgccgtctggcaaatcgtcgtctgaggaaaccatgagcgatctggtggcggagttgcacccgggccac

SEQ ID NO: 38733 - DNA, 194 bp, Zea Mays
ctcggttgaagcacaaattcacggaatcctctccacctctccccaaattagtggtgcacggtgaatcagtagtcctttgcgaccgtatagccccaacctcacctcccaattccaccagagcccgtcgcggcaccgatttccccattctaagacgccggcgagcagaattctccgctctccgtggccagccgttc

SEQ ID NO: 38734 - DNA, 4621 bp, Zea Mays
agcttctgcattgccatcaaccatagaatgagaaagaccgtcttcctcatcaactacgcgccgacgcgcggacgctcccgtccccatcgcgacccgtgcgccgggtccacgctgaaccctttcaccggggcggcgaaagatatcagccgcgacgccgacgggctcgagcgccggtgagcgctcgcgcacccgggccaataaactggcaccggctcctcctctcgcgtcgcagagcctagcctcgggatgacgtggcgtaccacaacaccaccacacctcactcagccctgcgggtctccgaccaaccatttctagaagcctccaaaccctagcgcaggaggaagaggagttaggaggagctccagggatggcgaaggcgaggaagcagaagggtgacggtgccagtacgggaggaggcgccaccgtgctccaccagaagctctgcctctccatcgacatggagaaccagctgatctacgggtacactgagataaaagttctagctgaaaacaacagatttgctctacatgctgacaatatgacgattcagagcatttgatggatggtgcaactgttgagtttgactattcccctcattggaaaaatgaaagtgatcaaccgaattggtcttcagtatcatgtttgaagactgctgctgatgctgcatgttcaatgtatactttgtctctaaatcgagaagctacaccaaatcttattgtgtcatctgagagatcagtcaagtcaatgactgaacagcagttagatgaaaacagtgaaaagcatgaagaaaatagtggaaggcttgaagaacatggtggaaatcctgttcaaacttcctatgatcaaattgttaatggctgcagtggaagagggaatagaaaattctgcagtggaagaaggaaaggaaaaggaaaatgataaggaaaaagaagaggaaaatggaaatgagaagagcaaggaaactggaaatgagactgaatatgaaaaggtgaagaacataaaactggttcacatagattatattttggagaaggctgaaactggcgttcagttcgttggcaatgtcatgcgtagcagtagtcagacaaggcgggcacactgttggtttccttgtgttgatagtgccacagaacgctgtccatttgacctagaatttacagttagcatggatttcattgctgtcagcaatggtgacttgctttaccaggtctctagtaaggaagatccttcaaaaaaacttatgtgtataaattgaacactccagttagtccacagtggatatccttggttgttggcccacttgaagttcttcctgacagaatcacagaaatgacataaatgtctcacacatatgtttattccctgctttggcaaagcttcagaacactattgcatttttccacaatgcatacagctgttatgaagactatctttctgcaccatttcccttaggtttatacaatcacatttttcttccatctgaaatgacaatattaccagcaagcttaggagcctccacatgcatcctcagttctgatatcttgcatgatgagaaagttatatagatcaggtgcgtttgtttctcttattttactaccctgtcccctctgatctagaccaatgatttgacaccatactttttaatgagatccgaatgcgtggctgctatagcatgtgcttatcaattgtgcttattctttattaaactatttttcatatcagctgttgttttgaagccctcctttcactgagagcatttagtgtcagtaagcaatccatgaatgcataatttctgctccagtatttgtgttttaactaagttagattctggtttagatgcctatatgacactacattcttgttaagttgatcatttaattagtttggtacctccagcaaatactgtaaatatgtttatggaatatgttaaatacttctgtatgtttgcttgccttatattttgtattttttctgtatagggctttgtaaacctgtcatcctttggataggagtgcatgaaaatctgcaatccatgtgtctgaatcatgacctgctattacttttactttatcttcctaagcattaaccttgcttctttgtatccccttaactggtggcttgataacactttgtattatgcattaaccttgcttctttgtatccccttaattagtggctcttggtaatgctttgtacacctgcattacattatagtcaagtattatgtttcataccttgcagtctgcactaacttgtaaaatagttcagataattggcacaagaacgaaactggcttatgcccttgcaaagcaatggtttggaatatacacaagtgcagaggagtccagtgacggctaactgctcagtatgtgaatctgatgttagtggtgcaactgctttgagctctactgctgcttcaagtgatttatatggaactcaagcaatcggttcatatgggaaagttcgttcattgaaagctgtagctgttttcaaatgttggagaagcagatgggaccagactcatttcggaagattttgcaggtgatagtggctccaagtcgtgcataaaatctaggcatgagcttcctagcctctcttctcaagcaaattgatcggttcttgcaatttgacaactttatgcctggttataatggggtcttgactgtcagctgcattcgtacccttgtacgaatagcaaagaaggtgccatcttttgtatgccttgatcacatttttgaattggttgcccctttccgcaacatggacaaaccatggaaagttcgaattgaagctagcaggattcttattgatcttgagttacaccataaaggactcgatgcagctcttttgttgttcttgaaatatgtggacgaagaaaagtctttgcgaggagcgacaaagttggctgttcatgtcttgcgtatatgtcaaacaagtattgttcctcacgccaatgatcaaataaattttggcaactctagttaggggtggtaacgggccatttaatttagcctagcaaatttacggatcgaatcaagttagggccggatcataaaacaatacaattttgaactaacaaaattaagggctttgttggtttgtgaagcaagtattagggtcatgatccattaccacccctaactctagttggtcttcttcatctgcttgctggcacaaaggcatacaataacatatttcttcgtcatcaagtgttctgcatattgcaagttgctgctggaaggtccccaacgttatttggtgttccaaaggtcctcacaccccctctggtggtcaactacatcttcagtgatcaacacactaaagatgattcctcaattcctcaaccatcatagtctcaggaaccttccactagcactcctagtgtccgggaggtcttaccgacctctggacccactcaagatgctgataattatcttactgcagtgaaagaaggaatgtggtcaaaattagggtgaagcttactgcatcttccagtaaagcatctgatgctgaccatagaggccattctgatggcgcaagaaatgaaaatgaaccgggtcaatgcagctcaatgtcaatggatgcccccatggctggagcagcaaatgaaccattaaatgtaagcaatcataacattgaggaacaaaactcatgtcacgaccttggatcaaggatgtcggcaagtgttagcaatgctaaactaatggacagacatgatatttccaaggagctacagtgcactgctgattccaggctggatactgttcccaaggatcagttctctcctgccattaatccgccggaagttttagacaaacctggcagtcagcttgaaggtgtctccaactatgatgtaaaccaagctccagagactgaacggagtggaaacagaagagagagaaaaaaacaagaaagataaaaagctgaaacgtgacgaaaaactagataaaaaaatatgacccagagtatctagagaaaagctccttaataagaaggaaaagaaagagttggccagaaagcagctagaaggtgaagagctacccctgaacagcggagagcagtgaacccttcaggttcacaggaagttttgccttcaaggccaccagctccagttctaagtgttgaaacacctgttcgaatctctgaaccccaggtatcaagcaaggaaacagctgtagatactgcacgtgcagcagccaaaccaaggataaagatcagagtcaagcccttggtaagaaaatctgaagggaattaaaaaagattgtagaattgtggccagtctgccatcatttgtaaggattactgtacagcaggaaaaatgcgggtttagttattttgtgaatggctgatgtatcctgtaaaaaaacattgctctgctctagtaatttctggggtaatcgaaatctgagttctagggtagtccatattttctgctgcagttgctttagtatctcagcgcttattatctcacaggttttaagtgtttgttcgatttgctgggcctaaaactaaaactgaaggatcgctgtgctcaatttgtagctgttgatgcattcatttcagatttgaggaggcttgacggaattaactgctgagcttgctcaaacatttttatgacgct

SEQ ID NO: 38735 - DNA, 2325 bp, Zea Mays
cctctcacctaatcaatacaggcatcggatcctcctctgctctgccgctctggagagagtgaggcgtcgactctagctcgacgcagcaggcgccccctagtcgccacccctgccgctgccaaggagacctcccccgccctgcaaatcatctcacgaaggaggttcgaatgtttttggggtacatgctggccaatgctataggattcgagggctgatgcaacgggattcgagggctcatggttaggatggacgctcctgattccctacgaaggtggtttctattggccctaaacatgattgcgcaagcactagcaaggtgacaggaaaggaagcttctgcagcttggattgccaatagagtgaagcctatgttgattaaagagccagggcttggtgcaagagaaatgcagtataggttggaggatcagttcacagtcactttgtcatataacaaggtctgggaagggagaaagttggcactaaaggaacttcatggtacatgggaggatagcttcaagttgctatggaattggaaagcagccgttgaggcaacttgtcctggaagtctcattgagattgattgcaagaaggtaaagggacagatgcacttctcaaagatgtttgtggctttacggccttgtgtcaatggatttcttatgggatgtcggccttatcttggagtagactcaactcatttgactggaaagtaccttggacagcttgcttcagcgacagccatagatggacataactggatgtatccagtagcatatgccatatttgacaaagaaacaaatttgaattggaaatggtttatgacactcctgaagagggctattggaacacccccaggtttgaccatacacactgatgcatgcaagggtcttgcatatggggtgtcacaagtgtttggtgatgcagctgaacatagggagtgttttagacacctcatggctaatttcaggaggaagtacaatggtgaggtgctgaaatacatgtggccttgcgcatgggcatgcacacatgagagacatcaagtacttatggataaaatttcagaaacttgtccaaatgctgtcgcatatcttagatatgaccacccacacttatggacaagagccaaattcaataaaatctgcaaggtggattacgttaataacaacatttcagaatgtttcaacaattggattaaaaatgtgaaggagttgcctgcagttgatctcatggacatgctcagggtgatgataatggagaagattgctacaagacagtccatagccaataaaatgcaaggccacatcctacctagtgtagttaatgatctgcatgagaagagtaggaatcttcgatataccatcactaaaagtgggtacatgaagggtgaggtttctggtgctagtagagatggtgttgcttggagatatggagtaaaccttgttactcaggcttgttcatgtggacagtgggatgtaactggaaaaccatgcactcatgccatagcattcataacttctcaacgaaatttgagaatcgaggactatgttggagaatgttattcggttcaaaggtttaaagatgcataccaatttgaggtgtatccaatgggagacaggttacagtggccgaaattggacccaggattcgaaatgaggccaccaaaacttgagggcaggcctgctggcagaccaagaaagaaaagaatcaagagtgctggagagccaggtaagagagggccatatcaatgcaagaggtgcttccagtatggccacattgaaaaaggatgcaaaaatccagtggtggagccacatgaagaccttccagacaaccatttgcagagaaagacaaaaaaaggcaccaaaaaaagaaaagtgagccagaacagacttcaacttcacttgttcaaatatcgccatctagttctggaccaatgacaaggagaagggtggcgatgtccccaacctgcagctcaccttcagccagcaagcaaggagaagcaccggcttcaagcaaaaggagattaattatctagctgactgtgatggattgtatgtcatttgcatgtgtttgctacttatgcgatggacgtgtaagccatatattgtattttattgttagaatcaggcacccctgaattatattgttgcaaagtatcgattgggagagaggagggcaagagtgtcttttcccatgggctgctgggttaaaaaaaagaaaataattcaaaacagcctccgaactggttttgtggtagatttctaaataatcgagtctttgcatggtattaaagtgtaccaggaaagttagatggtagatttctaaagacgag

SEQ ID NO: 38736 - DNA, 2891 bp, Zea Mays
caattcaaacgaggatccgatcccgcgacccccaccactcccttcacctcgtccgcccttccttcctcaccgcccgcgccgacgtgatcagggatcaggcgctcagtgatcgtcaccgcgcacgactcgtccgttcgtccgtccctcatcgccgcaccgatccgggcaggcggcgtgagatggaggacgaggggagcggcggccggagccggggcccggacgggttggccatcgcaccctcctctcctccgccgagggccaagacggtgaggatgtccgaggcccgcgaattcatcatcccctacgccgccgaccagggccgcttcgacgtcggccaacagggttcgccggaggcttccgcgggagcggcgcaggacacgccggactacatccggaggggcgccgcgcggcacagggtcgtgccgctcaagcccttctccgccccagcctcgccgccagctgagggaccggcttcgagtgagagatgcggcgccgcgggcggtggtcgagccgtcccagggggcccgcaaccggaagagtctggagaggatacatccgattgctgcggtgtgttaaaacagcagtacggtgtgcttctgcgggagaaggaggaatgcaggaggctgttagaggacctcatgagggagaacgtgctcaagactagggagtgccgtgaagcccaggagtctctccatgatctgcggatggagctgatgagaaagtccatgcacgttggctcactagcctctgcagttgaagggcaagtgaaagagaagagtcgtttgtgtcaattactgaaagaattgagcgaaaaatttatggtattaaagtcagagcaccagaatctaagacaagaatcagtagagtacagaaaatgtgtgttagatgcttcacaaatgtctgcagcaattcaacaatatgtgagtcgatatgtaagtctggaatgtgagtttaaagacctcaaagagaagttcaatgaggaggcaaaggagcggaaagacttatacaacaagcttatagagctaaagggcaatataagagttttttgtcggtgccgaccacttaatgcagaagaaatagcagaaggagcttcgtcagccattgattttgactcatgtaccaggacttgttgaagcacgagtgactaacatgaaagaagcttgggaagtactacgcactggcagcaaagctagagtcgtgggttccacaaatgctaatgagcatagtagtcgatctcactgtatacattgtgtaatggtcaaaggagaaaacttgatgaatggagaatgtacaaagagcaaattatggctaattgaccttgctggaagtgaacgggtagcaaagaccgatgcacaaggagaaagattgaaagaagcacagaatataaacaaatcactttctgcacttggtgatgtcatatccgctcttgcaacaaagacctcacatataccctttaggaattcgaagctaacacacttgctacaagactcattaagtggagattccaaaactttgatgtttgttcaaatcagtcctaatgagaacgacgtgggtgaaactctttgttcattgaacttcgcgagcagagtacgaggcatagagcttggtcaggctaaaaaacaagtcgatgttggagaattgtcaagatacaagctcatggttgggagagccaaacaggatagcaagaacaaagatgctcagattaagagtatggaagaaaggatacaagcacttgaagtgaagaataaggccaaagacttgctcaccctgaatctccaagagaagatcaaagagctggaatcccagcttctagttgaaagaaagatagcacggcagcacgtcgacaacaagattgcccaggatcatctgcagaagcagcacggcatgaaagaagagaacaactcgtacctgagaagcccaatggccgagaggaacctcaactccacagcagagaaagcagcagcaacacctaaaggcctgtgcatctccaagcagatgttctccgacagcaacaccgacgcctacagcttcaagcagctgatgtcactaggggaggaggaggagaaggagaacaaccctgaagccgccgcgcagctgccggcgcccagtacgaaagcgaggcgagtctcgctcggcaacggcggaggttaccagcagccgctgaagccgatttcgcgccggacgtccctgataccgcttccgcgccacaactcgctgctgccaatgcccacagcagcagcagcagcagtgtcgccgcttgacaggatcacggagaacctgtcgtcgcgctcgccctcgccgtgctctcctccggtcgtctccgtcgacaagggcagccggagtagaagggtcagcagcctcctgcgccgaagcctgcagaagaaggtagtcatcaggccgtcagtggcggcgcaggcagcgaagaaagccggtgctgctgcacctgctgctcaagggactgacagtagtgcacgcagagcggctcggcgagtgcctgcgagcggcggcggtgttggtgggcagaaggtgcggcaacagaacagggacaaggagcgggggtggaacaacgggacgagcctcaggaatttctgaccagtaaaaggagtgttctgttagattgcttgtacaaaattcaggtgatgctcggtttgagtttgtgagttctcgcgtattgtgagagaactctacgaattgctgccggctacagtcagtctcacaaacttgtgtgatgctgtaaaaccacttcgtgctgattttcatttggagggttatcattgtcattgagaatccgtctataattaagaaaatttgcaaatgggtttcaagaccttttgattgagaatctcatcccgtaagtattcaaattgcaaagttaacaacgattctcacag

SEQ ID NO: 38737 - DNA, 622 bp, Zea Mays
aagcgaaagagatcttcaaagagacaaaaggccaagttggtcatggaaagcttgaaattttattgcatggcgtcggagaagaagcagtcgaacccgatgcgggagatgaaggtccagaagctcgcgctcaacatctccgtcagcgagagcggtgatcgcctcacccgcgccgccaaggtactggagcagctgagcgaccagtcaccggtattctccaaggcaaggtacactgtgaggtcgtttgggatccggcgcaatgagaagatcgcatgctatgtgacggtgcagggtgagaaggcaatgcagctgctggagagtggcttgaaggtgaaggagaacgagctgctgaggaggaacttcagtgacactggttgctttggatttggtatccaagagcacattgatcttggcatcaagtaagatgatctcatgtcttatcgtaaataatttgaatgaggcctgtttgtttttgtgaacgggtgttttatgatgggcattgttgcttgcctgtaagcaggggaaaagatatgtaactttgtattcatgtagcctgtacccgctatggtcactacgtactgggatagcttaaggctaagttcttaatacagtttataaccatgca

SEQ ID NO: 38738 - DNA, 4889 bp, Zea Mays
ctgcctcgcattttcccactcttccgcttccacgagcagatgccggcgaatggcaagctctcggcgaagccctccccctcgccgatggttgctcccgcctcgcgccccaaatttacagctgttacctttctcggtgactgcgacgacgacgatgacttccaacctcctcgcccccgccccttgaagccttgcattggcgccgccgcacttcggttccgtaagaagctcaaggctccatcctccgggaaggagaatagttccgccgccggtggtgccgttactgtggtgggggtcgcttcgacggccgtgaaggatgccgaaaccctagccgccggctctagggttagtggcgacgttcccaaaacgaagagacgaaagaccggtgaaagttgcggcctgtcgaggtacggatctgatagcactaaactaagctgtaaaccgaagatagaattggatagatacggatatggcaaagggtgctgcagtttcttgcccagtgcgatagactcgacggttttggcgctcggtgcggtatgtgattttggagttaggcgttgtgatgaggctcaaatagctgtctccaggcattgtacctcagttcttgaggcggggcacgccacagaagagctgacaccgacaggctctgggtgtgatccacccaaaacggagaagaagccgggcagttctgaagctgtggagggacatcacgactccaggttgattgaaccgaggcttgttgaatcagatgcaaacctcgagtttgtaactgggattcttggctcactgactgataaacaggacacgaagaaagcaaacggggtggtatttggatgtggtgttggatttcagaatgggaactatcacttggattctctacagccagagcttctaacgtcgaactcaaagtatgattctagagtttgtgttagcaatgaaatccaagagcctggtttgggagcctgtaacttgatttcacaggagaggaaagtagcagctggacattctgcatgtgcaacccctgaaaatgtgactgcagagaataaatcaagtgcacctgaggcttgtaaggggcaatgccactccgattcatctgcatcaaagcttccagaatcccatatgatccatgactttgaagttgatggttgcgataattttgagattgggacccagctcagtgagctcattaacttgtgtatgaaggattccatagagggacaatcaaactttggtgcagctcccatggaacagaacactttagactctaagagactcagttcagactatgaagcgaaatgccctctatgtggatcggatatttctgatttaagcgaggagctccggcagctgcatactaacaattgccttgacgaaccagctaagggcaagcatggtgtagtggtgagagctgtctcactagttccctcggtcgtgggtttgaagcagtctctccgcatttgtggaaggaaggaatctagtcccaaccataaaaaagagcccagtgttggacaaaatgttgaaactggacgtgttgtcgaatggttaagaaaccttgggttatccaagtatgaggaagtttttatcagagaagaagttgactgggaaaccttgcagtggctcactgaagaggacctgttgggtattgggatcagctctcttggaccaagaaagaaaattatccatgctctaggagagttactgaagaaacatgatgatcccagtgaaatggaagctgtgttaaattcaggaaatactaagaagactaaacttccgatgaatggtaataaattaattaccgaatactttcaatgttcctcatttgatcaaagacaaagaagggtatgcaaagcaaacaagccatctaatctgaacgagaagaaaatttctagtgctaaagtacccactagaagaactgctggtaaaggaaagattaaggatacgcctctttggtgttgcatcccagggaccccttttcgagtggatgcatttcgctacttgagaggtgattgttctcactggtttctcacacactttcatgtggatcattatcaaggcttgactagaagcttttgtcatgggaagatatactgttcgtcaattacagcgagtcttgtgcatcataagattggtatcccatgggatagattgcatgtattgaccctaaatgaaaagctcaatattgctggagttaatttgatatgttttgatgccaaccattgcccaggatcaatcattattctctttgagcctccaaatggctgttttgcacactggagatttccgtttttcttccaagatggccaacaatcctgttttgcagtcttcctgtgtccacactctaatacttgacacaacctattgcaatccacggtatgatttcccaagtcaagaaatcgtaatacagttcgtcattgaggccatccaagcagaagctttcaatccaaaaacattgtttttgattggaagctacacaattggaaaagaaagattgtttatggaggttgctcgtttgcttcagaagaaagtatatgttggagctgcaaagctgcaaatactgaaacatttagagcttcctcaggagattatgcactggtttacagccaatgaagcagaaagtcacatacatgttgtccccatgtggactctagcaagcttcaagcggatgaaatatctatcgaatcaatatgctggccggtatgaccttatagtggcgttttgtcctactggttgggcatttggcaaaggtaggaaaaagacaccaggcaaaaggtggcaacaaggatcaatcattagatatgaagtgccctacagtgaacacagcagtttcacggaactgcagcagtttgtcaagttcatatcaccagagcacataatccctagcgtaaacaacgacggccctgagagtgcaaacgctatgcttgcccagctgttaaacgagtagaggaattcgttcgtcgcttcaatatcttcggcttggctacagttttctcttcgaaaaccatttgatgaaagggatggacgctggacgagctaacttccaaggactaatacagtgatggcggaagcattcctgatggtgccacccagagttctgacgtggaaatccagagatacagggtgcatagatgcgcacgcagacacccgttggcgccgtggaggtgctggttgacaaatcgtcagccaagattctgtactggaatgggtaccggcgatagcgtgtattgccgaaaccatgtgaaccgtgatttgtgactgtcaagccaagcgagtgaacttgcatgtcattatgagcccatttgtacacgaacttgtccagggtttttctagtgatggtgaaaagtcctgccatgagtgtcacctttctttaaaaaaaaacgtcgatcaaactggcaaaatccgtaggagacccacttgtcagctaaccaccccttgcagtcatccgcaccagggcaccaccaccactccagatgttctagaactatcaggcggcttcctccccctaaccgcaacagttaaaacgccgtagcaactagcaacgctaccacagtgcgcgcttgaagataggttaacaccgcttcttatcctcagttccaaccccagctcctcagttctcgtcatcgtcctcgcgctcagtgtcatttgcagttcccggtagcagccatggcgtcggtgcagctgtctgggccgcgggtggtggcggctgcgaaaccggctgcgttgggcgggctcctcctgacgccgtcccttgcggtgccaaaggggcggagggccaggggcctcgtggtgagggccgccacggtcgtgtcacctaagtatacgtccataaaaccattgggagacagagtacttgtgaagatcaaaacctctgaggctaaatctgatggaggtattttacttccagtatcagttcagacaagaccacaaggaggggagattgttgcggttggagaagggagaagttttggaagtaaccgcattgagatcagtgttccggttggtgcacaagttgtctactcgaaatatgcaggcacagaattgaaattcaatgacgccgaccatctcattttgaaagaagatgacataattggtattcttgacagtgatgatgtgaaggatatgaaaccactgaatgatcgcattctgattaaggttgctgaagctgaagaacgaactgctggtggtttgctattgacgcaggcaactaaggagaaaccttctgttggatcagtggtagccgttggcccagggccgttgggcgaggacggcagcaggaatcccctgtcgatcactcctggaagcaacgtgatgtattccaagtatgcggggagtgagttcaagggcgaggacggtgagtacatcgtgctcagggcgtctgacgtgatggctgttctttcctgatccccaaaccatacagcgccaggtgcgcgataggaagttttgatgttgaggccgaaccttatcttttatttgctcttgtttggaattggtggaggcttttgaactgtaatctggtgcgaattataaggaaaataagccgagttgtgtagacttgagacaggactgtgctgtgctgtttggctggtaggtgagctaaccagtgttcagctggtgggtgagctgaccagcacgtcgggttcggctgttcttcctgatgtcagcgttgtacgccaaggttggccaacggcatcaatattactaatagcatctaggctaccgtttgagtttttcatggattaatgacaacacaagatgtgactattatatacttcctctgtttttttatttgtcatgttttagttcaaaaataaacctgttttagttcaaaaatgaactagcggacgacaaatattcaagaatagaagatagtattttgcaaagataactaggcttat

SEQ ID NO: 38739 - DNA, 1245 bp, Zea Mays
acggttatttcgtatcagcaatagcatacgccccacgtccccacgcggccacgccttctttcctctctgcccccaccacgaaactccacgacgacgcgtccgcgcaccaggcaggcacgaccaccaccgtggcaccgtccaccggagccgagcaacgcgaggagttgagccgatggaggtggcgtcgggggatgaggatctggaatcgctgctccagaacttccatcgcgtgtcccaggtccaggttttaagagtaaattgcagcactgagttcaaaaggcgggaagctcttgaatcacatattacagatcttaagaaagataatgagcggttaagaaggcaatacacagaaactttattcaaggtcaccaaccaggtgaaattccgcgcagaagctcaaagcctgaaggaagagctggacaaggcaaatagtagattgttatccatggaagaggaacacaagagggaaactgagcaacttaagcacagcagtgaaatgaacatcaatgccctggagaacaagctcagccacgcccttgtacagcaagcaagagatgaagctgcaatgaagcaactgaagttggagctgagtgcccataaatctcacatcgacatgttaggtagcaggttggagcaggttactaatgacgtgcattcgcagtataaaaatgagatccaggatttgagggatgtggtttctgttgaacaagaggagaaaaaggacattcacaggaagcttcagaatgtggaaaacgagttgaggatcacgaggatgaagcaggcggagcagcaaagggattctgtctcggtccagcacgtggagacgctgaagcagaaggtcatgaggctccggaaggagaacgagtccctgaagaggaggctggcgagctctgaagtctgaactggagtgcacatgaaaactgcaactgctttccttcacgccgtagttttatctcatactgtaggatgtagaaaaatccactgctccaaaaacacatatcacttccagatgctttaaaactagcaatgataggtatgttttcactgaaagttattatcaccaatcgacacactcataaccttttcatatgaaattatataaagataaactctatgtccaagatatagagttcaaagaactttttagttgacaacattttcatataagacaatttggatgttcgaatattcaatataaagatcacatgcctattaaactatcttgggtaaaaaatataatcaaca

SEQ ID NO: 38740 - DNA, 3416 bp, Zea Mays
ctcacgttcattccgcgggcgcagggttctctctcgtggcgatcgctgaccgtagcggccaccctccgccaggtggccaggttttcgtgtggccctccgccatgtcttcgcaggaccctccgccggcgacgagcacccaaaagaagcaatcggagagtttggtaaacctactggcagaggcaagcaggttctaccgcaaagcatataatgaactgttctcaggtttaattactgagtgggagcctgaatcatctactaatactcctgactatatgctttttgggtggcatctcttcttaacgcttcgttcgagatcaccagaattgttcaaggacctggtgtcctgcatccatggattagttgctgtattggccatactattggttcacgtgccagctaaattcaggaccttcacgattgaaggctcttctcacttaatgtgcctttgaaacattggcatctcccacaaagacaataaagaacatgttgactgttcctagttcccctttgtcacccaccaacggtggttcagtcaagattgtgcaaatgacaccaataacttctgccatgacgacagctaagtggcttcgtgaggtgatatcttcattgccagagaagccttcatctaagcttcagcagttgatgtcatcatgcgatagagatttgacaaatgccgtcacagaaagggtcagcatagttctggaagcaatttttccaaccaagtcttctgctgatcggggtggctcattaggcctcaattgtgcaaatgcctttgatactctatgggcagatgccagaaaaatggaggcttccaagttgtactatagggtattagaggcaatctgcagagctgagttacaaaacagcaatgtaaacaatctaactccattgctgtcaaatgagcgttttcaccgatgtttgattgcatgttcagcggagctagtattggcgacacataagacggtcatcatgatgtttcctgctgttcttgagagtactggtctaacctcatttgatttgagcaaaataattgagaactttgtgagacatgaagagaccctcccaagagaattgaaaagacacctaaattccttagaagaacaaattttggaaagcatggcatgggagaaaggttcatcattgtataactcactgattgttgccaggccatctgttgcttcagaaattaatcgctttggtcttctggctgaatcaatgccatctcttgatgacttagtggcaaggcagaatattcatattgagggcttgcctgctacaccatctaaaaaacgtgctgctggtcgagacgacaatgctgatcctcgatcaccaaagagaccatgcaatgaatctaggagcacagtagtagaacacaatttgcagacacctccacccaagcaatgccacatggtgttgactagtttgaaagcaaaatgccatccactccagtccacatttgcaagtccaactgtcagtaatcctgttggtgggaacgaaaaatgtgctgacgtgacaattcagatattcttttccaaaattctgaagttagctgctattagaataagaaacttgtgtgaaaggattcaatatatggaacagacagagcgtgtctataatgtcttcaagcagattcttgatcaacagacaacattattttttaatagacacatcgatcaacttattctttgctgtctttatggtgttgcaaaggtttgccaattagaactctcattcagggagatactcaacaattacaaaaaagaagcacaatgcaaaccagaagtttttttaagcatctatattggaagtaggaatcataatggggtattaatatcacgccatgttgatatcattactttttacaatgaggtctttgttccagcagccaagcctttcctggtgtcattaatatcatctggtactcgtccagaagacaagaagaatgctagtggccaagttcctggatcaccgaagctatctcctttcccaaatttaccagatatgtccccaaagaaagtttcagcttctcataatgtatatgtgtctcctttgcggcaaaccaagatggatttactgctgtcaccaagttccaggagtttttatgcatgcattggtgaaggcacccatgcttatcagagcccatctaaagatttggctgctataaatagccgcctaaattataatggtcggagagtaaacagtcgattaaactttgacatggtatgtctcatgttgactttgcttttgtaatggtactgttggcttcattgctggaatgctggttataatcaacctttactgctctatattgttctttttttggtttgcacaaccagggtggttggttttctgaatcaatcaatccatttcctcggacacaagataatttttgtatgttacacttcccaaaattgcaattaattcagaagtctgcctactttcattcagttagttctcagcaacactgaaaggatatgaatcagtcaacccgatagatgtttatctggttattccaaacaatctgacatcacatctgtttctgcaggcgagataaggaaaatctgaaatgctatcaccatttaaaacattggctcctggaagttcaggtgattaacaaacctccttcatctacatctgacattggcatgtatggtagagtccagcaactcttgtgatggcaggagtcgttcttaaacagcaactgctccttcgttcagcgcttctcatttctgattgtattgaccgagagcatccacctttccttctggtatcaactgaatgagttgccgacaccgacccatctgcgcataatggcaggttaggtgttgctgtagaatgagatggttaccatctttacaagctcaggctatatgatttcagcagcactgtaacctggggtgcaaatgttaaggccctgcaagcactttccaggccacaccaattctgcttggttcttgaagatacattcttcctatggtgccccctatataaaagccatttctggttgttatgtttatccttgacatgtcaacagattagtgttgggttgcagtcatgcggtccttaagtctcggagaaggcgagaagtcattgctgctagcattgtgatcgtcggccacgaaagtaatcaaaaagtgagagctacttgttcctagcaaatggagaagggcgatatataggtttatgatcaaattcagtgtatgcaagcagcatattttgtttagagttagcttttgaggttcatcatttcatttcacagctgattctctatgttgtaactccttagtcgtgtagaaattagaatgctatctgcttaatttttagtgaataatttgctagtatattttttaatgtaattgcagtagctctgcctcttcattaaggaattgaccccgttttaaggaaaaaccagtcca

SEQ ID NO: 38741 - DNA, 1626 bp, Zea Mays
gcacttgcttcaatactagctcgctcaccactcaccagtcaccagtctagcaagcaacaacaaaggcgtaggaggaagcttgttttggaccgagcaagcgagccagccgagcgtgggagagagagaaagaggaattaattgatgggcgaggaggccagctgcgacgccgtcagcctgacggaggccggcaccaacgccaagccggtgggcaaggaggtcggccgcgagccggctgcagcccccgccgccgcggccgacccccggctgcagggcatttccgacgccatccgcgtcgtgccgcacttccccaagcaaggcatcatgttcaacgacatcaccacgctgctgctgcgccccagggtgttcaaggacgccgtcgacctgttcgtcgagcggtaccgcgggatgggcatcgacgccgtcgccgggattgaggccaggggcttcgtgttcggcccggcgatcgcgctggctattggcgctaagttcatacctctgcgcaagccaaggaagctcccaggtgagagattccatgaccatgcatgttctgtttttcttcttcttcttaacccatctccacactctgcactgtacccagctgttgcttttgtcgatctagtgcccagcctgtggcgacaccctgatcaagtatatgtttagcgaggagggttcttgcttagcccataatctctgacaccgccagagttgtttgtctggcctgcatgcagttgcagtcccgtgaatgggatattaaaagaaaaatgcaacagacggtttatacgagaccgatcattcattcattccccacttctgtccacaatgttgtagaatcatgtgctgacaccggctctcggaaacaattattattattattattggaaggtgaggtgatctccgagaagtacgttctcgagtacgggactgattgcctggagatgcgtgtcggggccatcgagcgatccggcgagcgggtgctggtcatcgacgacctggttgcgaccggagggacactctgtgctgcgatcaggcttctagaacgtgctggagccgatgtggtcgagtgcgcgtgtgtcattgggctcccgaaattcaaggatttgtacaagttgaatggaaaacctgtatacgtgctggttgagtctcgtgaataatcggagaaatgacaacttattctcaggtgtcagagtgatcagggatattggctgtttactccttgctactgcgattgaacagtggagggacgacatggacaaggacaagtatattcggtgcatcactaagtcttggtgaggggagagattgtagtgttttaggctgagtagtgaagagcctgtagttctgcacggaacatgatggttattagttgatgcaacagcgttgctgttctattattgtttgttgaattttgtggctttggtttgaagcctagcctgggctcaaacagggatatgcatggcgcttgagtgaacaacttcgacagcaacacacacatgcttaatgtcagggaagtagctaggaacctgctacttgttacccgtacgtagtgtcatggaactcataaggtttagtggcaaaattcataaaaatgacacgggaaacgaacacagcacgcgtagcaggggaaaa

SEQ ID NO: 38742 - DNA, 1104 bp, Zea Mays
ctatgacagctctgctagagaagaatgccaagtttgtgtggtcagataagtgtcaagcaaacttcgaggagtcaaagaagagattgactacagcacccgtgttgattttgcctgatctaagcaagaactctatctattgtgatgcatctcgactgggtatatccgctaggtcttcgttggcaccttccctgacgacgagcacccacatggtgtgacttgaaggtggtgagcgatgcaaacgtcttcttccccaattgagactgtcctggcacacctcggcatgcatggctgcttctccgagatcaccaccaacctggcgagcgtcgacaccgatggtggtgtttagatctcaccgttctgtggccacgccccacagcaaaatatggagataatcaaactgccgactgaatttgatatcactaaaaaagacatggtactgctgagacaccaaacaaatacacaatgcaagcaccttggagtacatatgttccatgattaatgttagtccactaacagaagatattctctacagggattagtaaaacacttacaggcgcaacctcagctaggtttgggttgttgtctggaaggagattagtttcaaggactgagctgatcaacatgccggcaaggaacaactctttctttttgccttgcatgagctaggggaaattcagtactggctacacgggaagcgggataagttgcagtgacagcaaaaccagataggagaaagagtgcaggaactgaagaagattggtgggaagcacagctttctgatctttgaagaccgcaagtttgctgacattgggaacacaattggagcctcctgcaactacgaggggaaaaaaattctgatgactaaagtgcttcgattcttaaaccttcagtaggccagaaatatctttataatggacccgaggcctatacgaactggtaattgacaacatgggttccaaaaacattagattggaatcttaatctatctcaatatttacttcatttttaagagacatattgtcattttgtttttttccatagcgttagcatgggcatgtatactatcagtatatatgatttttttgccttacacctcggttcaat

SEQ ID NO: 38743 - DNA, 1556 bp, Zea Mays
gagctccctccactgccctagattatcctcatgcccgaccacggtacaacagcaacagccatgaaaccccttcgtgtcgcgccctcgatatgctcgatgaaataccgcagcgagctccgctccggatctgcgcagccccggccttgttgtcgacctcagtacgataagtgatcacgtgatgtgaaggactagagctcggtcgaccacaagatggtgttaagtattggtttcttcgcaaggtgatgctaatgaacaaacttaaggatggacagactgaaccagtgccaacacacaaggctggtcgccaagtggtcatcgtctaacaacactaacctagtgttatcccaggcaagccccagtgcatttgccacctccttgctgttttaaaaacattttatcacttatatgctgcattaggtggtaggagttgaatgggtaaacctttgctgcataacttccttgaattattgattatcatccttgatacctgatttgaaaatctagatatgcttagcctgcttatagacaaggaacaaaatattttgatgtatgaatcatgtttttacaaagaaaaaggggctggaatgatgaaggtatcaaaggtcttgatgacttcatcatttcggtagggtacctctaataggttccagattttcagaattattttaatatgagaccagacgttgagcaggaaaggtcgcccgtttgtgtcgattaaggaccgtaccgaaagtaggcttgctgatctaggaccctttaactggccacatgcctcatcatgggtaagcttagcctcggtcggaccaataccagaaaggccggcctgcaatgggagtggagagatggcgagagtatcgtgtatccacctggcaagaggctggatggtggggtactgagctctcggttagcggggacctgttctggtcttaagaaacccgtgggcgagttgacatatgcaagggttaagtgctacatatgtcgtgtggttggagatcctcagctgagtattaatcgattcggatcgctgttacttctcggatatgaagactagatcactgccctgcatcataattaacaagtgaaactaaagatgttaaaatgaagctagtgtagaacaattgaatgctctagattaggcaaatctagattcaggaaaagtacttaatttgtgaagtaaaagttggcataaggatccactactagtaagcttttctgcaaaaacgagtctttgaaatttgatgagctttaccttgattcccaacaaaccagcatatccttgagagtcttttctttagtcgggtaagtcttgctgagtaattgcgtactcagggctttattccctattgtttttcaggttataagtttgttctgttgtggatagtgtggatggtgctaagtgccggtgggctcggcctttttatataagtatatcacatctttagcttctttattgaggattgtcaattaagctagcatgtattttaaaaactataaatattttattcattttaaattataattcttttgaatcactctcttttgtaatcactccgata

SEQ ID NO: 38744 - DNA, 442 bp, Zea Mays
tatccaattttggcatatatggatcatcttttgccaccacttggtttgtttttgcaactcaaactcaaatctctatctctaagtcaaacacacatgttgaagcataaagagagtcatttcaaaagagattgatcaaagatttcaaaaactccccctaaatcccataatcaatacttctccccacaagaagccaacattttataagagagacaataagagacactaaaagcttttgacaaaaacaaaaactctattctactattttcaaaatctctcaagtggtagctgatccatttattgctttggcctttattttctccccctttggcatcaagcaccaaaacgggatcaatcttggccctttaaccccattgcctcaccaaaatcttcaattaagaatacaaaggcaataagattgcatgagatgaacttggaattagtt

SEQ ID NO: 38745 - DNA, 2484 bp, Zea Mays
acgccacgcgcccacgtccgggtccgtccattctgctctcaccctcgggtcttggccatcggggaagagcacgaggctctcaacgcgtcagcgactcagcgtcatatttctgagttctcgcttctcacttgtgcccagatgccggccctttccttttcgggatctcctcggtgacctagatcggatggacccgccgccggcgacgcgcgcggcgtccaggcggcgggaccgccgacggcgcctgcggcagcggcagcgcgcagctgcagccacgaaaacgaaggtcggtgcggccgtgctggccgtggagccgcagagcgcagcagtcacaaccccggtggcttcgatcggtcctgctgccacgccggcgtcgaggggcaggaaacggcggaggcctcgtagacggcgtggccggaacgcgggcgcggctggggtgtcggacgaaccaccggctgcgtcccccgttcccgttccagatgccccgcaagcaagttgcaatttggaagcaatggcatcgcgtctgagcgataatgtgctgcaaactatgactgagaagataatgaggtcagataaaacaagcaagagaaattttcagcacggaaatgaggcgctaaaagattctgtggctgaaggtgctgcctgctcttctcttgcccgtcgtgaacattctaccagagaaaatggagcctcaaggagtaagatacttaagagatccaatgtaaaatccccagttgatagttgcactgaacaaggaactgatatggattatcacaagatgaagagtgccgatttgctagggaacctggaagaagtgtaccaggaaagaacgtgtcttggttactgctcttcgcagaagttggaagaatattgggaaaatgaaaatgtatcttctctcaactccagcagtttacaggcgggaaaaaagagaaagaaaagaagaggcaggaaaaagcacaatcgtcgcaagaaagctaatttacaggattctccagcatcaactgctgctgataattctggtttggtgacgttttctgagaactgtacttcagcccttaaactagaggaacagaggaagaagcaagatcagaacaagacatccatgactaacttacttttaatcaacaatgcaaagagatcagaaccatttgatgtgaatttggaaggcgctattgaaaagagctgtgaactggcaaagaatagttttgacaacacattagaaaataggtatgaactggcaaagaatagttttgacaacaccttagaaaataggtatgaactggcaaagagtaattctgactacataaatatggtaagaaatggattacaagagcaagacttagcatgcttgtcaaacagtcacaatgttaactacctgaagccttcccatttggctgaggaatatacagaaaaactcaaacatgtcttttcactgggaaagtccttaaggcctccgaagaaaaagcttctcatcttagatcttaatggtttacttgtggatatcaacgaagactaccacaacgctcacatggctgatgccaaggttcgaagaaaattagtattccgaaggccttactgcgatgattttctcaacttttgtgctctgaattttgagctaggcatatggtcctcaagaaaaaaagaaaatgttgattcggttgttaatattgttatgagtgaattcaaaccacacctactgttttgttggtatgtccaggacatgtctaaatgcacattcaccggacataaaacactggagaataagcacaagccattagtgctgaaggaattgagaaaactatggaacgtggaagaacaagatcttccatgggaagtgggggactattcaccttcgaatacattactagtggatgattccccttacaaagctctgcgcaatcctccgcatactgccatttttcctcactcctacagttacttaaactggaatgacgattcgctgggtcccaatggagaccttcgtgtgtatctgcagaacctagccgctgcagataatgttcagcattttgttcgtgataatccgtttggtcaacctttcattactgagagcgatccgcattggaacttctatgctcagattgctgatagagggcgtgcacccttgacatgttgcgcttgaactcccaagggtcgtgcttttttctgggagttctgtggttatccatgatcaaaagatcatgatcagtatacagtgatcttctctgagtagtttgcttgtatccctgtactgaagattacagagtttctgctatgggtttaaattgcaggctctacgaaaggtatcagaccaaatgaatgaattgtctgacattatctcagtctcaaactgtttgcagccatgcttttttttcatttgcctcacgttttaaagattaattgtgatgcctccttttgttctggtcttaaagaaagaaggatggggtcctcattgcctagagtagcagggagttcctaggagtatcggtg

SEQ ID NO: 38746 - DNA, 2321 bp, Zea Mays
actgtccatataaatatgtgatgcctctttgagtttgagccgtggcctcactcgtagtcgtagctcacacaatgggcgtgcagagagccagtggcgtgtccttgctccatgcactgcttgttgtgttctgggcattgtcttctcgtcgtgcgaaggggcagaacccatctggccacctgagcgtggatgcctcgccgcagaacgttaggaagatccctgataagatgtttggcatctttttcgaggagatcaaccatgctggagctggtgggttgtggtcagagctcgtaagcaacagaggatttgaggctggtgggcctaatacaccttcgaatattgatccgtggctgatcattggggatgaatcaagtatcattgttggaactgatcggacatcatgttttgaacgtaacccagttgcacttcggatggaagttctttgtggttctaaaaaaactaatgcctgtccatcgggaggtgttggggtctataatcctggctactggggcatgaacattgaaaaggggaaggtttataaggtgagcctgcatgttaggtcatcagatgcactgtccttgactgcttccttgacaagctccgatgggctacaaaagctcgctgctcataccatcacaggtagcaagaaaacctttgcaaaatggacaaaggtagaatttcatttgagatccaaccaaaataacagcaactcaaggtttcaacttacaacaagtaaaagcggggtagtttggcttgatcaagtatcagttatgccaatggacacttacatggggcatggttttcggaaagatcttgcttctatgttggccaatctcgagcctcagtttctcaagtttccaggtggcaactatgccatgggaaattatctacgaaatgcatttcggtggagtgagactgtgggaccatgggaggagagacctggtcactttaatgatgcctggggatactggactgatgatgggcttggattttttgagttccttcagttggctgaagaccttggggcttccccagtttgggtggtgaatgatggagcaagccttaatgaagaagtttccactaaaacaattgcatcattggttaaggatgttgttaatggcatagagtttgccagtggaggacctaagacaacttggggttctgttcgtgcagcaatgggacacccagaaccctttaagcttgattatgtttcaataggaaatcaagaatgttggatgctctactatagaggtctacacctcttcgactaatatgttttcaaaagctagtatgtttgacaacacaccacgtggagcaccgaaggcaattgttagcgagtacgctgtgaccggaaatgatgctggcaaaggaacactggtagcagcactggcagaagctgcatttctcattggattggaaaggaacagtgatgtggttgagatggcaagctgtgcacccctttttgtaaatgacaatgatcgcaggtggagcccagatgccatcgtcttcaactcggggcagcactatgggtgtcccaactattggatgctacacttcttcaaggaatctagcggcgccaccctccatcctacagccattcaggtctccagctacgatcagctggttgcgtctgccatcacttggcagaacgctaaagacaagagcacttacctcaggataaaggtggtgaatttcggcaatcaagctgtggatctgaacatatcggttgtggaactggccaccggcgtcaagaagtctggatcgaagcagacggttctaacgtccagcagtccgcttgacgagaactccttccagcagccagagaaggttggtgcacgacgtactgaatcagtgggcagtgcatgttcagggttatatattacagataactgtgtgtgtgtgtgcatgcatgcatgcaggtggcgccagtgtcgagcccaatggcgaacgcggggcagcagatgggcgcttccgtggggccgtactccctcacctcgtttgacctgctgctggagccgagcaagcatgacagcgtgtaaaactgtcaactgaagaagcatgacagcggtgtacgtaaaggaggtcaaagatagaggagacaggtcagaggtcaaaattgagaccttgataccatattggattggattgtatgtatcaacaagttcaacctaaaagtttaagctgatagtgaaatgcggacagttcacattctaacaaatcccagtcaatgttgcatccaacaatactttgtacttgatgtctgaatccatttgattcagaagatagcgctttattgttttgccaatgcaaatacacatgcgatc

SEQ ID NO: 38747 - DNA, 2185 bp, Zea Mays
cccgttgtctcgtaagctgcgaggaatccccagctcgtcttgccccggttgttttgtatctcctcgtcggacccagcgttccagtcgagcatggcttcgattccgcctccgtcttcctccgtcgctgccctcacccgccaaccggcccagttcttgaaatggtgcagtgtatccaaggagacaaaggcatcggtctgcagtttcttggctacaaattcaaacagcactagggtgaaatcagtgggcttgagagtagcattatccttcaaaaatgatggtggttatccagctgacggtttctctgggaatggcaacacgctattgccaaaaagcacatccgttcgtggcgaggaccatccggttgctgatcctgtactcccaatggattcaatgatgacgccagaaatcctctctgctaatttggcacttgttatggacaagttctcagatgatgacacagatactgaacttgatttggatagcccgacagagggcttcgcgtcgattccagatgccattgaggacgtacggcaaggaaaacttgtgattgttgttgatgacgaatcaagggaaaatgaaggagatctgataatggctgcctccttggttaccccagaggcgatggcttttatagtaaggcatggaacaggaattgtttgtgtcagcatgaaagaagatgatctggaaagactgagccttcctttgatggttaccacaaaagaaaacgaggagaagctatgcactgcttttactgttacagtggatgcaaaagagggcacaactactggagtatctgccaaagacagggcaaaaacagttatgactcttgcatctcctgactctaggcctgaggacttcaaccgccctggtcatattttccctttgaaatacagagaagggggtgttctgaaacgagctggacacacagaggcatcggttgaccttgccatgctggctggattacctcctgttgctgtcctttgtgagattgtggatgatgcagatggttccatggctcgcctgccaaagttgcgtgtctttgctgaaagggaaaatttgaagattatatctattgctgacttgattaggtataggaggaaaagagacaggctagttgaacgtgcttctgttgcacgcttgccttcgcaatggggcaatggccatggatattgctacagatctgctattgatggcatcgagcatcttgccatggtgaaaggtgatattggtgacggccaagacattttggtgagggtgcactctgagtgcctcacaggcgacatttttagatccgcaagatgcgattgcggtgaccagcttgcaatggcaattgagatgattgagaaggccggaagaggcgtaatagtttatctccgtggacacgaaggacggggtatcggtctgggccacaagcttcgtgcttataacttgcaggatgatgggcgtgatactgtggaagctaatgaagaacttggtcttcctgtggactcacgagaatatgggattggcgcacagatactacgggacctaggagtccgttcgatgaagctgatgactaatagccctgcgaaatatagtggtctgaaaggttatggactgagcattgcgggcagggtgcccttggttacgccaattaccagcgagaaccgtaagtacctcgagaccaaaagaacaaagatggggcatgtatatggattggctaatgcgcaggttaaccagccaagtggtagccagagcacagaagagaagcattgagcccaaaaaacccaaatactgtgtcccatccgtgaacatggaagagccaccgaagacggagaggaacttgtcaagcaaggatacatacccgacttgggcattttggtcttcagttgcggtcgttgcacgagctgctagaggtgtttgtcatcgttgtaacatcagcgtggtccaacatcttccgtatgttcgcaaacattcctccaagccatgaagaggtgctttgttgatcaatctagatgaggaggacgaggtcaactttgtgaaggtacaaatggagaatgtaacacccctggtgttatgtgaactaaaacattggcatgccatcatatgtactggcattatattgctcgtgttacacttagaatgcatccactagactaaaatttcaaaaaaatatgtgatgtgatacttggttgggtatagggta

SEQ ID NO: 38748 - DNA, 281 bp, Zea Mays
ggaacggcctgatggcgtcgcggtcggagcgcggctgctcgcagaggtaaagtcgtcctagacgccgggccagggggtagacgacggacaccatggtcgccgggctcttgctcctcctgctgctgcgtggtgctgggaatgaggaggcgtggggaagttgggtgagagaggagcacttgagtggggcatggatcagaggagtagttttttgcggagaagaagaatagtggggcgattttagctgtggccgagcggctaggggcgggcgcgctcgcgcgctg

SEQ ID NO: 38749 - DNA, 2853 bp, Zea Mays
gcgccgtgttaatggccgccacaacggtaaacgttacccttgccgaagagaagggaaaatagcagtagcgcccggatcccctctccttccctccagatcacaccactgccgcctccgcctgcaaatccatttctagactcaagctgttgctgcgagcgagctagggttggtgctcaggtctccagggtttcgcctccccgctcccggtgcccatcgccttggaccttggcctgccgggttagggttgggtcgcagctgcgggggccgtggggcggggatgcggccgatgcggcgatcgcgggcgatcgggaggctgtagcggcggcggggcagggtatctcttgggtggattctccggcgatggccgcagacgcactatccatcatcccgggcgccgtgcttcgcaacctctctgacaagctctacgagaagcggaagaacgccgcgcttgagattgagggaattgtgaagcagcttgcaacgtttggggagcatgagaagatatcagcggttatctcgctgctcaccaacgatttcacatattcgccacaggcgaaccatcgaaagcaaattgtacctcctgtgcttacttctttcctggaccaagatagtagagtgcgttactatgcttgtgaagcgctatacaacatagcaaaagtggtaagaggggatttcatcatctacttcaacaaaatttttgatgctttatgcaagctttctgcagattccgatgctaatgttcaaagtgccgctcaccttcttgataagcttgtcaaggatatcgtaactgagagtgatcagttcagcatagaagaattcataccgctcttgagagagcgcatgaatgtgttgaacccttatgtaagacaatttttggttgggtggataacagtgttagatagtgttcctgatattgacatgcttggttttcttcctgattttcttgacggtttgttcaatatgctgagtgattccagtcatgagataaggcagcaagctgatgcagcactttctgagtttcttcaggagataaagaactcaccaaatgtagattatggtcgtatggctgaaatactcgttcggagggcaggctctactgatgaattcactcggttgacatctatcacatggatcaacgagtttgtgaagcttggtggggaacaacttgttccctactatgcagatatattgggcgctgtcttaccatgcatatctgacgaggaggagaaaatccgagtggttgcacgcgaaacaaatgaggaactccgtgctataaaagctgatccagctgagggatttgatatcggagcaattctttcaatcgcaaaaagagaattgaacagtgaacatgaggccactcgaatcgaagcattgcattggttcttcactttgctggatcgatattgtgctgagttcttggcttacctgaacgatatttttgatccactcctaaatgcactttctgatccttcggacgcggttgtcctattagtattggaggttcatgcacgcatagctgaagaatctcaccacttccatcatcttgtatcctacctgatccgcaccttccacaacaaccattttgtactggagaaacgtggtgctttgatagtccgtcggctctgtgttcttctaggtgctgaaaaagtatatcgagagttctccactattcttgagagtgaagttgatcttgatttcgcatccgtcatggttcaggttttgaatttgattttgctcacatcaactgaacttggtgagctccgctctcctcttaagaagtcgttagtggattcttgtggcaaggacttgtttcagtctttatatgcttcatggcgccactctccgatggctacgataagtttatgtttacttgctcaggcatacaatcacgcaagctgtgttattcagtcactgggagaagaagacataaatgtgaattttttggttcaattagataaattgatccgtctcttagagactccagtatttgcttacttgcgtttacagcttctcgagcctggaaaacacacttggcttctgaaaactctttacggtctcctgatgcttttgcctcagcaaagtgcggccttcaagatcttgaggactcgactgaagactgtgccattcagtgaaaatcttaagcgcacatcttcagcgaatccatactctcagattctgcaagtgacggaagatggcaatagaaaccaagatatgcagaactacagtgcaatcaatttcccattccttctccagcaatttgagaacatgcagctgcagcatcgtaaccatttgaaggatcaactgcaatcccgtaaatctgcttcgactttaacattatctcaggagatacaaagatacgaagaagcgcattcctcatcgctgtcagagattaacaggcccccttcaagaacatccaaaggcattttatgatgcatttgttcttgcgatgtatgatatatttgccggaagcatcaccacatatatgttggggctttggttagtctcctcgttttttttcaaaggaggttgcatagggtacatagtgtaatcttttctatttcgttcctagattttgtcaagagatggcaattatttgttggagaaagctcgttgccacattctagtcattcttttcttagtggtttcactgctcatctggtttctgtaatttttcaattgaaggccaaatgagcaaagtagtaattggagatagaaatatgttactactgtcctatctatcgatctccaataaattagcgttgcaatgtaaattcctgttggctcgtatgatatatttattatattatttatatgccttatctttacccccattttatattattacaatatcgc

SEQ ID NO: 38750 - DNA, 2731 bp, Zea Mays
tcgctcatgcagagatctgtgtagtgctagacactgaagggttcgtccggccatccgggcaagtcacaactcactagtcaccagtaactttaccaatccgcgccggtggtaaccctgccttcggcggcggctagccggtatccagtgtgcgcactccctctatctccctcttggcgacgactgggcggccgtcgctgctgccctacgccgtcttcgggctcttcgttgtcgacgagcgccacaaggttcctaccatttttaagaaaaaagatcaatggaggcagctttgtcattctccaaggacagcccaccaatttcgataatttgtgctgcaaagattgtgggtctacccctaaccatcaatcatagcctcgctgctggctcggcacccaccctacagtttgcttctggagaatcactccatggtgtcaacccaatcatcctctacattgctagaggttgttgaatggcttgaatatgcccccaccttcctttcaggctctgaatttgaaaatgcatgcttatttgttgatggattcttggcctcccggacctttctggttggtcatggcctgacaattgctgacattgcagtttggtcaaatcttgctggaattggtcagcggtgggagagtctaaggaaatcaaagaaataccaaaatcttgttcgctggttcaacagcatagattcagaatacaaagaggcactgaacgaagttgtggctgcatttgttgggaaacgaggtattggaaaatctcctgcacctagccttaaggagaaggtacatgactcaaaggacccatcagctccagaagttgatctccctggtgcaaaagttgggaaagtctgcgttcgttttgccccagagcctagtggttacctccatattgggcatgcaaaggctgcactattgaacaaatactttgctgaaagatatcaagggcgcttaatagttcgatttgatgacacaaacccttcaaaagaaagcaatgagtttgttgagaatcttttgaaagatattgagacgttggggatcaaatatgatgctgtcacatacacatctgattatttcccaaagctaatggaaatggctgagagtttgataaagcagggtaaagcatatattgatgacacaccaaaggagcaaatgaggaaagagaggatggacggtattgagtcaaggtgcagaaataataccgtggaggaaaatctctcattatggaaagagatggttaatggaactgaaaggggcatgcagtgctgtgtacggggtaaacttgacatgcaggatcctaacaagtcactcagggatcctgtttactaccgctgtaatactgatccacaccatcgtgttggttcgaagtacaaggtctatccaacatatgactttgcgtgcccatttgtcgatgcattggagggggtaacccatgctcttcgttccagtgaatatcatgacagaaatgcacaatattatcgaattcttcaagacatggggttgaggagagtggaaatttatgaattcagccgattgaatatggtttacactcttctaagcaagcgaaagcttctttggtttgtacaaaacaagaaggtcgaagattggacagacccacgttttcccactgtccaaggcatagtacgtcggggcttgaaggttgatgcattgatacagtttatactccaacagggtgcttcaaaaaatctgaatctcatggaatgggataaactctggacaatcaacaagaagataattgatccagtgtgcgcaaggcatactgctgtgctaaaagaccagcgtgtcatctttactcttacaaatggtccagaggagccatttgttcgaattttaccaagacataagaaatttgagggtgctggaaagaaggctacaacctttgccaacagaatttggctcgattatgctgatgcggcagctattagcaagggtgaggaagtaacccttatggattgggggaatgctattgttaaagagatcaaggtggagagtggagtaattactgaactagttggagaactgcatcttgaggggtctgtgaaaacaacaaaattgaagatcacatggctagcagatatagaggagctagttcccctttcattggttgaatttgattacctcatcagcaagaaaaagctagaggaagacgaggacttcctcgacaatctcaacccttgcactcgacgggaaatcccagcccttggagatgcgaacatgaggaacatcaagcgtggagaggtcatacagctcgagaggaaaggctactataggtgtgatgccccttttatcagatcgtccaaaccggtggtcctgtttgcgatcccagatggcaggcagcaggcctcgcttagctaggcatggtgaccaccttttgggcacatggaattcctgagttggcgatgagtattgttgcattgtacactttaatattgtactgtgattaggctttactcgcggtggatgtctttcaccgctagatggccagaggcatatcctgccaaccaagcagagcagccattttgattttggtctatgatacttttacctgcgcttgaatattcctatacttctctagcagggccttcgttattttgccgttagattatttttactgcgtcggctgctattttcttttgcccaggtattaatcaatcatggacgggcatggtatgtagctgtgatgagtaaatgcatgtggggaccctaaggttggg

SEQ ID NO: 38751 - DNA, 2077 bp, Zea Mays
accaatcatttctttgcaatctgcagcctctgcaaactgatcgcgttgctggttgctggtaatcatcggaccagtccacagatatcggaagctctcttgctactgatggcgaagcccagcgtggcggtgccggaggttggcgtaccagcggcgcaggcgtcgtgcacctgcccggggacgctgctcgcgtacccgccgccgcgtggcgccggggtcgcggccgccgtgcggcgcaagtgcctgcaggtggagctcggcgcgggggcgggcctgctgggcggcgccggcgcctggggcgtggagtccatgcgggcgtcgtcgcccacgcacgccagggccgcggccgcgctcgccgccggcggcggcgtcgatgtcgacgtcgacgaggagcgcgccgccagctggatggcgcggcacccgtcggcgctgggcaggttcgagcggatcgtggcggcggccgagggcaagcggatcgtcatgttcctggactacgacggcacgctgtcgcccatcgtggacgaccccgacgccgccttcatgagcgagacggtgttcgagttcgtgaagctggcagagctctactacgccggcagccacggcatggacatcaagggtccggcggccgccaaggcctcctcttcttctcggcacgccgcaaaggcaaaaggagtagtgttccagccggccagcgagttcctgcccatgatagaggaggtgcacgagcgcctggtacagacgacgcgctgcataccgggggccaaggtggagaacaacaggttctgcgtctccgtccacttcagacgcgtcgacgaaaagatgtggggcgagctgtcagagtcggtgaggggcgtgctgcgggggtacccgaagctgcggctgacgcacgggcggatggtgctggaggtgcggcccagcatcaagtgggacaagggcaaggccctggagttcctgctcgagtcgctcggcttcgcggactgcagcagcgtgctgcccgtgtacatcggcgacgaccgcaccgacgaggacgccttcaaggtcctgcggcgccgcggccaggaccagggcgtcggcatcctcgtgtccaagcaccccaaggagacgagcgcctcctactcgctccaaggccccgcagaggtgatggagttcttgctgcggcttgtcgagtggaagcgcctctccagggccaggctcaggctgcaatgagatgagacggcgcaactgccgtacgtggacacgtacgacgatgcaacggattaagctaactgccaagtgccagttaattaagttaagatcctgcctgctacgtggaatcgtgaacggcactgtctctctactgtccccccgtagtgatcagcatgcatgtacatcgttgtctcatacagtactagctagttagtactaagcatgcctgttacatatatatagcttcatgtgaatgtgttgtactgatgtgtgatcttaaaagtatgctgatgaacggtgtgatatttttttaatccacactacttgctgatttggttcaaagccggacctgtcgtcgtcgaagtgatccagctttgcaacgccattggccaccaccacatcgatcgaaagccacaccaataatgagcaaggcgacgatggaatcttggataacgcatgccacacgggagcgcgcacacgatctttaccatttgatgaagataatgatctacctgtggacgtacgccgcgtgatgacgaagcgcggttggactccactcggaagatcgatggagacgcgcgctctctggccattatattcccccgtgcttgtgcttgtgcttgtgcttccaatcatgtcgtacgtccaatgcaatgtccgggaagatggattgcatggcacggttctggccatcttcaagaagacaacaatccccctccttttccactttcgatggcctcatcgattgatcactgctacagcgtacgtacgtacaatcgtttatcagcttattacctgtcggcctcgctgtcaatttgttgttgggaaagaagcgcatctaaaatcagctcgtcgatccatcttttcagcaaaatgaaatattttatccatcccg

SEQ ID NO: 38752 - DNA, 921 bp, Zea Mays
ccgagggcttcgctgttttggagacgcaggcagcaggcaatcactaaaatggaaaacagagagcgatttggtaaccagatcaacattaaactcactccgtcctcacgccgtctattgcattcgacgcgagctgcttccaaactggaaccctaggcgccgccgccgagaaggaggccaaggctgctgttgagtgcgccgccattgccgtcgacaaggtcgaagcagtgaatgtggcatcaaatgtggaaattgtcgactttaagtatcttgtgaacgtaaagaattctttgagatatgctattcaagaaatgaggaggcactcttcactgttgaattcggttaaaaaactgtgttccactatccccgaagtagaaggtggcaagataagaaaggtttgtgggcatttggatcatgtgtgcaagaagctagaggaaacttcaattgtctgtgaacaagatttggaaacaaagaatcctagttgggagattgatgacagcccttccttagatgatgaacatcctttagatgatgatgaacttagcgagggctacagtacagaagatccagagctatgggaaatggtttttgacgacctaaagtgggaagagattaaagctaatgtctcatttgaagagcactaccgtgtcataaactacaggttcgaagaaataattgatcgtaacatgtagttgtgaggcagtgtttggaatggatgaagttattttgtatgtaatgctccacatgtagtctggagcaatgtatctgtctttatgtctggtatggatgaaactaaatgtatcttgttatgtgtctgtattgtggctggttatctttctgaaactaaggtctggctgtgtattgtgcctgtgtattgtcggacatctcgccccttgtattggagatggttgtctattgttcctg

SEQ ID NO: 38753 - DNA, 3818 bp, Zea Mays
acggcagtcgtcacaccacgaaagcagcagcaaagtcatcagcaacccacgatcggtcgatcgatcgggtacctgctagcgaattcgatcggtcgggtacctgctgctagcgatatatagcagcagcagcagccagcagatcgtcgccggcacgatggccagctcgtcgtcgtcgtcgtcagctctggtcgtcctcgtggtggttctagccgcggcggtggcgtgctccgcgacgcgccccgtccccgcgcggcagcgggcggcggcggcggaggaggaggacgtgaggcggccggacacgctgcacgagggcacggtgctgatcccggggatggggcgctacgagatcggcagccactacatcccggacatcggcgggctggaccacagcgtccccgccgccacccacgggcagttcatccccggcgccgacgacacctgggtgcccaaccccggcttcgaggtccccaaccccttccgccccggcgcggccactccatgaacactgtttttgcagtttgtgctccagtgaagaagtgtgcacgcgcgatgcgtagaaagcgcatcagaactttgcatggcccggttggtagcagctgcttgtttctcggtcactactgttacaaataaaatttgctggactggacacatagctatcatcatctatcgctgtgtcaactgtgcattgccatacttctcttctctaacgtgacgtgaagcactgcggcggtggaccaaaaccatgctgggtagcatcagcacgcacgaagttcaggtaagcagcaccgtactcctgttagattgaagatactccacacattgctgcaggaaattacaatattttttaaataaaatttaagtagagatatgacatggatatcccatgctaagagattaaaatttagtgatataatgtagctaatagtaattaagagatgatgtagctgtagatagatagtgtaaaatgaaaacgaatattttaattttcatatcgatcgagatagaaagaacctcgagtgtattttaggggcaaagtacccgcacctgtactgatctccgtccggttctgcccttctggtgacctttattcttgttcagctttaatttctttgcgtgaaaagggggttgaagatgaataaagggcgagcttaggccccatggccggaggagatcgggtcagatacgagaggtagatgtgcctgccgagtgccgacccacaggaccacctgtagggcgagccaaaaaaaaaaggtgcgcgccactgcgggtatggcgttgtcctacaccgtccgggtaattaccaccaacgctggcatttttgtccagagcatgtttatggaaatgatgtagcttgtactacctctacatgtttgattatacccactctgtttttttatttgctgtagtttaatttaaaaattaataagcagacgacaaatattcgagaacggatgttaccatgactgggtcgatactaaaatgtacctccttcgttcctaaataaactaactcctaaagctatctaaaataatatctaaaataacttcaacaaaaaatttgattgttgaaccgaatttatagagaaacaatatttatgacactgaatgatcatattgttaaaaatacattatgatgtgtccaatgctactaatttagtcccataaacctcgacgctcttttctataaacttaaaacttaaatttttttatgatttaaaataactctaggtattgatttattcagaatgtgagaaaataagaacatttagttctatatctattcgtaattttttttgtaaacacatggatagatttgggatgctacaggaccgttatggcatgtacagtgagtgttttaagttgtgtcttagagtatgtctagggggtaaatgtaaaaagactcaagacatgtatcttgacgaagacacagtgtcttagctctatgttcgagacagtagattatttgattgatcactttaatttattgaatgctctgatttgtataatgaatatgataagacatatgttttagacatgaccattatattatgttgtgttttagttatgtcttatatttggagtaccgtgcaacagtgtctaggttttacatgcccttagcacctgcctgcgcttactagttattgttccccgcgtgtgccaactatgaaggaagtagcataccacgtgaattttgcattgcaccggcgcggggacgagccggtggatctgcggcacaagagccgtcccaccaaggcaccaacccgaaacgaatccagtgatttcccctcccgcatcgaaacgtcccccaagcagccctgcccggctgcccctgccgcgacgcaactggcaagcatccagcatagcagcgactcccccgctcgccggccagcggccaccagttccctttacatccacacacaacgcgcaccacaccacaccacccgacgccaacgtccgggaccaaactccgatccccaccactatgccggcggacggggaggcgctggcgccggccgttcacttctggggcgagcacccggccacggaggcggagttctactcggcgcacggcacggagggcgagtcctcctacttcaccacgcccgaccggcccagggcgctcgtgttcatggtccacggctacggcaacgacatcagctggacgttccagtccacggcggtcttcctcgcgcggtccgggttcgcctgcttcgcggccgacctcccgggccacggccgctcccacggcctccgcgccttcgtgcccgacctcgacgccgccgtcgctgacctcctcgccttcttccgcgccgtcagggcgagggaggagcacgcgggcctgccctgcttcctgttcggggagtccatgggcggggccatctgcctgctcatccacctccgcacacggccggaggagtgggcgggggcggtcctcgtcgctcccatgtgcaggatctccgaccggatccgcccgccgtggccgctgccggagattctcaccttcgtcgcgcgcttcgcgcccacggcggccatcgtgcccaccgccgacctcatcgagaagtccgtcaaggtgcccgccaagcgcatcgttgcagcgcgcaaccctgtgcgctacaacggccgtcccaggctcggcaccgtcgtcgagctgttgcgtgccaccgacgagctggccaagcgcctcggcgaagtcagcatcccgttccttgtcgtgcacggcagcaccgacgaggttaccgacccggaagtcagccgcgccctgtacgccgccgccgccagcaaggataagactatcaagatatacgacgggatgctccactccttgctatttggggaaccggacgagaacatcgagcgtgtccgtggggacatcctggcctggctcaatgagagatgcacagcccaggcaactcaccgtaacatacctgtcgaataagcattcggatgcatggatacacaagaaaaatgtttcatgtacaacgattgttatatatgctatactcagtatttgactgtaaactgttcggtcaggtttagtggcttggatatacaaaatgttggttgcctcatcagtgtaaaagaatgctgcaaatgcttgggatcgataatatcagctctcttcgggggctatggatggcaatacaaggcgttctctgccctgtacaagcttggcagaccgaattttatctccggccttaatctgtgacagaacatctctcccatcagtggtatacctgcaattgtttggatatactcataaaatttcttacagcgtcattattaacaatggaatatatcaattttgctactcaatgatca

SEQ ID NO: 38754 - DNA, 3067 bp, Zea Mays
cgcgtcctccaatcttcgcccccggcaagcaataccgaaaaagccactccttttccttctccgcgcaaagccccaaaccgccgcctcccgttctctcgagtctcgacctctcctctcctctcctcttctcaggtctcacctgagtcacacctccacagacactgagacacacacatacgctatctctcatcgtcctccactcccggcaacggaagtttcactgctgccctcatctaactccccgtctcactgcatattgtcaactgtgcgtattttcagtctgtagaagccatcttttaaagaacattttgggcagaaattgccagtagcatttcttgtggttaacatggacttctcagctggttcctacttctcatcatggcctatcaattctgcttctgagagctacagtttggctgatggttcagcggaatcatatggagaaggaagcatgccaccgtcaacctatttcatgacagctagatcagatcacaatttaaatttcagtgtgcatgaacaggattccactatgcttccaaacgaacagttgacctatgctggtgctggccagattgatctattacctgctgagactctatctagggataagcttcctgaaaatcttctggagcttcaaggacttcagaatatcagcaacctacagagtaatttagtggccccaggggtgtttcagcacaatttaacacctggggtctttcatccacagttgaacactcctggactttcagaactgcctcatgccttatctagttcaattgacagtaatggaagtgaagtttctgcttttctcgctgatctaaacgctgtttcttcagcgccaactttatgttccacattccaaaacgcttcttcgttcatggaaccagtgaatctagaagctttcagtattcaaggcgcacaaagtgattgtgttttgaacagaacaagtcatccgaatgggaatatctcagatagcaaggagtttatcagtggtagtctcccttcttttgctagtgtccaggaaacaaacctagctgctagtggcttcaagactcagaagcaggagcaaaatgcagtgtgcaatatccctactttcactgcacggaatcaaatgtcagttgctgcaatgcaaggagcacttgtccctcaaaagattccttcacggatcaatgataataaaagtgagggtcctgttagccatccttctgatgtacaaactcaaccaaattcagctgttaatggtgttggtgtgaaaccacgagtaagggctcgtcgtggacaagcaactgatcctcatagtattgctgaacggcttcgcagagagaaaatttcagataggatgaaaaatctgcaggatcttgtcccaaattccaataaggtactttttttggagggtgggggtgggttgacttgtctggtgcatactgcaggtattaaatttggacatggaactaattatcaaagctttgctacttatatacgtaacaagaacatgtattttctagttgtggcttgaaaactgaagtgacaaatagaagggagcagcaattaaatttaaggttctttgggatttgcgtgaaagagcctctagttgagttgattaggtggtctgagtatctcggccggggagggaaagaccgtcctcctggtattatattaagaagagaccgaaacatggtcccggccaataaacccccgaacatcatcactaacgggttgatcaactgcccactctgcaacggcccagatggagggtggcacgcaggatatcgatcccccgagagcgggcgggatacaacgaggagatttttttaaccaagtccaaaatttgcccactcggaagccttaaccattacgctagaggccctttcgcaggtggtatgagtaacactccttaggttctgagtttgggccaacaatagtcattacgtattttgccattggctcagttccaccccgatgaagcttcaaagacaggttttgtgcttgtttgtttggattggatgtattaaatgctacattccaacgaaacatcatttatccaattccaaattccttgttcctgttgatgcggagcttgtttaatgcatggctaaaataccatagcaaggaagacaacagtcttacctttcattaaagaggttcatttgtttagttctcttaataatatggagtggcaaatcttttggtgcaagcaggcagacaaggcatccatgctggatgaaattattgattatgtgaagtttcttcagcttcaggtcaaggtcttgagcatgagtagggtaggagctccaggagcagttcttccccttctcacagaatctaagactgagggttaccacggccaacctctgccacaaggattactggacgcactagactcggaagacagcttcgtcttcgaggaagaggtcgtgaagctaatggagaccagcatcaccagcgcgatgcagtaccttcagagcaaggggctctgcctgatgccagtcgcccttgcttccgcaatatccacccagaaaggtgtgtccgctgctgcagtccctcctgaacggtgagataaagacacgctcctcccccatgagcacgaggaaacagccgcagatgacagaactcagacggctgaagaatgcagcaatgcaaagcccgtagagtgcagcataggaagttagtctgtgaccagagcgcatggcctcgtctactaatttcgctctcagaatcagctttttttttcgtacctattgcgcatcagttgattttgcctttttgccttctctcttttctttttggccgtatttcatcaggttgcatataaaaaaaagtaaaatctactggttctggcgttctgctatatgggatcttgtgatcaggcatctccaaagtgatcctcttgcccggctgtcagtttgttagctgtagccatctactacctcagtttgaaaaactgagtttatgagctgccccaagaaacctacttagctttgctttgttgtcatggccatgcaatgaatttggctgcctcaaactttgaacaaactagaagtgtaagcaattagaatgaacaacaaca

SEQ ID NO: 38755 - DNA, 2353 bp, Zea Mays
tctccttgtcctcactcacctacccttctctatcaatcttccattgtccaccaccctcacgcctcgccctcccgtcccggcgacggcgaggccccctccgcctccgactcccgcgcgactgccccggaccccagtctcgcccttgtccaccgtcatggccgcacccgcggttgcctccccgagccgggcgacccccaccgacatccccaccgccgcgccctctcccgcctccccgccgcgccgccttgcgtcggcgccgcccgccgtcgacgcgtccgggtcctcctccccggcctccgcccattcgggggaccagctctccgcccccgacgcctcgagcccgctgctcgcgagcaggagcgaggagtacaggcttctgttccggctgccgcccgacgaggttctcgtgcaagattttaactgcgctgtccaagaaaatattcttcttcagggacatatgtatttatttcttcaccatatatgtttctactctaacatatttggatatgagacaaagaagtgccctgacattgttcctgttttccagaaaacaatacctttgcaagaggtaactgatgttcgtaaagcaaagacagctgccatttttcataatgccattgaaattgttgctggtagtagaaggcatttttttggatctttcttgtcacgtgatgaagcctatcgaattatagtagatggctgggaacaacatgttagtgatgcaagattgctccttgaacgtcaggagacaaagtcagctagtagcagtgaagaaaatggttatgttgtattggaaggaacaaaggaatctaaacaagatggagatttatcactgccggacaggtctgtcaacagtacagctgtctcaagtagcaatgctgatggtggtgattcgaacatcaacatttccaaaaggttttcagaagttgaggagaacggacttgaagacaacatcgtcgcgctaaacccattcaatttggagccagttgatgctcctcctagtgtacctgaatcttacactatgatctcggagtcgaagtttcaggtgcctgtggaggttctctttaatttcttgttgtctgatggtgcttttggctttgtggatgatttccacacaaaatgtggtgacaaagaatttagttgctccaaatggcgtacagatgagcaagggggacttgtaagggatgtctcatttttgcatccaataaaaatttatcttggcgtctagtcattcaaacctctcaatcaataggtgatgccccatatggggaccattttactgtagagggcatctgggatgttgaacaagatagcctagatgagaactgttgtgacctcaggatatacatcaatgtagccttctcaaagaaaacaatatttagagggaaaatagagcagtcaacaaaagatgaatgccgggaagttttcagtctctggattaagctcggtcatgatcttttgaagcaggagtatgatcgatcaaaaggcgcctccagcacacctgattctggtgttcaaccaggggctacaacaaacgaggaaagtgccgtggaagtagcagttccagtggtgagttcctcacatgatgaatctggtgcgagaagcctcattcctcctactcaagatcaccagcagaggacaggaagagatccttccatcacgtccacttcacaagaattgtggggttctctatcgtcatacatgaggtgaccatcatagttctactaacaagacccccccaggtccaaatggatcctcatgggatctggacgggcagttcagggtacagcaaagaaagcatagagtgggtgcagaagcgcctcagcttactaagcgaggagatgcagctcgcggaggcacacatggagacgatgaggcgcgagtttgcctggctcaggtcttacctggagagactgcagaggacgcggggcagcacatgacggcggcgcgtgtacatggcacaggggcacgagttcgctacgcgaattcggaggtgtatacaaatacaatacaatacaacccggaggtggtgttcagtgtttcttctgttgttacagatggtacagatgcaaacagagagaggtggattgttgtttgcagaggtatttgccgtaaggcagaactgcaagatcccggtatagcgttcgatgtaaatagctggagcttccccattgcgctggggtgatgtacaatgtcagggacgagtcactgcgatcacgctacggcggtgacgcgttatgttatttataaatttctgactgaattttaacttctaaaagctacccggtccgtccgcggtccgtccaaaaatgataaacagtactacctccgtttcacaataatgttcttttta

SEQ ID NO: 38756 - DNA, 444 bp, Zea Mays
aaatgctaatttgttagctaaggttgattcaaatgtttgtaatgtgtcaattcccaatcctagaaatgataatgatgatttgcttgctaagattgaagaattgaacatttctcttgctagccttagagatgaaaataaaaaattgcttgctaaggctaaagattttaatgtttgcaatactaccatttccgaccttagaagtaaaaatgatatattgcatgctaaggttgtagaattaaaatcttgcaaaccatctacatctaccgttgaacatacttctatttgcactaaatgtagagatattgatattaatgctatacatgatcacatgactttaattaaaaaacaaaatgatcatatagctaaactagatgctaaaattaccgagcatgaacttgaaaatgcaaaatttaaatttgctcgtagtatgctttataatgggag

SEQ ID NO: 38757 - DNA, 2521 bp, Zea Mays
gttgcagacagctacagccgtatgtccgtgtgacattctgctcagtcggccaatcctcaccaaattctccatcaaatccaaccaacccctcaccgcctatgccgccgcgggccgcctagggttccggcggccgccgctccctcgccggcgcgatggggaacacctgcatcggtcccagcgccccctcggaccgccacagcttcttcaacaccgtctccctggccgtgctctggcgacccccggccgccgctgaccgcgccgagccttccccgaccgctgaacccagctcatccactccctgctctcccccctccagggcccctaaccctgtcaccatctccgactccgagcacccgccacactccacctccaccgccttaggccccgccgcgccgcccaatcctaacggcaagcccaagcccaagcccaaggtgaagcgcgtgcagagcgccggcctcctcgccggctccgtgctgaagcgcgactccgagcggctcaaggacgtctacaccctgggcaagaagctcgggcaggggcagttcggcaccacctaccagtgcgtcgagaaggcaaccgggaagcacttcgcctgcaagtcaatcgccaagcggaagctcgtcaccgatgaggacgtcgaggacgtgcgccgcgagatccagatcatgcaccacctggccggccaccccaacgtcgtatccatcgtgggagcctacgaggacgctgtagccgtgcacctcgtcatggagctgtgcgctggaggggagctgttcgataggatcatacagcgggggcactactctgagaaagccgccgcacagttggcccgggtgatcatcggggttgtcgaagcatgccattcacttggggtgatgcacagagacctcaagcctgagaatttcttgtttgtgaaccaaaaggaggatgcacccttaaaggctattgatttcgggctctccatcttcttcaaaccagccttgatctgttttgctgggagaggcgaagatctcctgggtcaatcatgtaaggtcctggacaggctattttggcttttctcctctctcaacgcagtgacatgcaaatctcctgcttgttggagagaaaaaagagtgaaatattttctgatgtcgttggaagtccttactatgttgcccctgaggttctgaaaaaacgctatggctgtgaggttgatgtgtggagtgccggtgtaataatttatatcttattgagtggggttcctccgttttgggctgaatctgaacaagggatatttaaacaagttctaaaaggtggtcttgatttttcatccgatccctggcccagcatttcggagagtgcaaaggatttggttaggaagatgctaaatcgtgatcccagaaagagattgactgcacatgatgctctatgtcatccttgggtttgtgtagatggagttgctcctgacaaacctctggattctgctgtcttaaccagattgaaacagttttctgcaatgaataaactaaagaagatggcccttagggtcattgctgaaaatttgtctgaagatgaaattgcaggattgaaagagatgttcaaaatgctggacactgacaatagtgggcagatcacgttggaggaactaaaaattggtttgaagagagttggtgctaacttaaaggactcagaaattacaacactaatggaagcggcagatattgataacagtggttccatcgactatggagagttcctagctgcaactttacatctgaacaaagtcgagcgagaagacaacctcttcgcagcattctcatactttgataaagacggcagcggttatattactcatgatgagctacaaaaagcatgtgaggaattcggtatagaagatgcacacctagaagatatcatccatgacgttgatcaggacaatgatggtcggatcgactacaacgagtttgtaacaatgatgcagaagggaaataacccactagggaaaaaggggcactgccagatgagctttggtcttagagaagcattgaagcttggctaagtggcatgatcaatcctgtgtgaagtgccattcggcttcatatgccaactttagctgatgaaactaagtccgtgaatttgggacgccggtaccaaaggtggagcaagtgcgcgatacgattagctttgggataccaactaagcagtgagcatgcaggaacacattggtgatctttcgtcgttaaccccccatgtacatggcttttttgaggtgggataggaatggcggttgtgtttcccatggccattctttgcacgttatgaagctcagctgcaggatgctcttatatagagagaaatgttagtcacatcacatcgcgtgtccatactgtatagcgaaacttaacatgttgtaatatcggtcggacaatgtgtgcgtgttgtatgttatctttcttagatagaggcacaggcttagcgttgtcatatatgtattgcaagaatatgcaggctgtatattaaccaaatgatttttttgtgtacatttcag

SEQ ID NO: 38758 - DNA, 358 bp, Zea Mays
agcaacaaagtataaatagatatcatgataagaaaacataatagacattaataatctgctagcaatgggaagacgaccataacgacatgaactgaattaaccagtgcgcacgactagttaaaaacaaacatcctttgataagaagtttctaattaaatcatgactgcgcctgggcagcattattatgagagtgaaggtgtatgtgctgctacttcccactccccttgatgagcaacaagcacctgcattgagtaatgcaagagtgagatgaaacatctcagcaagctaattgttttgacgagatatttaaaccacattgaattaatcaacattttaaaagaatcacaatcaagatcag

SEQ ID NO: 38759 - DNA, 1310 bp, Zea Mays
gtagtttagagaggcgcagcggcctgtagccgcctctgacccgcagcagcgcctccatggctccattgccttctctatcccgactcccgagtcccggcgccatccaggttcgtgtgggggcgggcattcatggcagggcaatctgacccgcacctctccatcttctcgccctccgaggtaaccaaccccttcccttccacactgcactggcagggactatcttcgtctgtgctgctgcaggtggagttcgtggcggaggatgagatcgtcgaaatcgtcctcaacatccgcatggacgcccttaacatgatctacgggggatttcgggcccttcttcccacagattcccaccaaggtgccgctctggctcgccgtggcgctcaagaagcgtagcaagtgcaccatccgcaccccggactggatgactgttggtattggaagcggaaggagagtcgcctcgggaattccagccattgccattccactatattgaaatttctaagtgctggtgatgacatctcagatgcatacctggtgaggtctctaattgaggacatcagagatgtcagattccacaaggttaagaatggattagagacgatatctggacgcacctatgccgtaaagctcaaaaatctctctgcaatggaagtgaacattgtccgcccttttcatggtgagaactttgcaggcattctataagcacgatagtccacagatgattcagcaagcagataatgtagggaccagagcaacactagttacagaccgtggcccccagaataagcttcccttgtagatattgtttcaacttgcttgtggattctcggaggtagttgtccccataaaaaatgtgccctaagaatcttaagatgttgcgcacaaaatagttccatatcagaaagctggtacatatatataattctattctgattggttggtgacccggtacaatttataacagcttaatacattgcactgtatggaccagaaagaagacttggtacctcgttttctatttccatgcattatttattttgtcagaatattctcattttgtcatcaagcagcaatacatgatttgtcaggaaaagccccatgtctccaacttttgcagagagatctaaggcgcaggtggctagctagggcaggagaggaggcgtacgtacgggatgccatgactcgtccttgtccacgtggccgtggttctggtggatggaggagtgcagaatgtgaccgaccacgctgttgagtctggggttgttggagaagctgccgtggccgcagtcgtgtcccagcacgaagagcgc

SEQ ID NO: 38760 - DNA, 1088 bp, Zea Mays
gaagcaaaattccgtagctctttctaccgctgaagccgagtacattgtcgcaggtcattgttgcacgcaactactttggatgaggcaaacccttagggactacagttacaaattaaccaaagtttctcttctatgtgataatgagagtgcaatccgcatggcagataatcccgttgaacatagccgcactaaacacatagccattcggtatcattttcttagggatcaccaacaaaagggagatatcgagattgcatatattaacaccaaggaacaattagccgatatctttaccaagccactagatgaacaaacctttaacaaacttaggcatgagctaaatattcttgattctaggaatttcttttgatattttgcacacatagctcattaatatacctttgatcatgtatctttcatgtgccatgactaatgtgttttcaagtgaatttcaaaccaagtcataggtgtattgaaagggaattggagtcctcggcgaagacaaaggcttccactccactccataactcatccttcgccgtcgctccgagcgtctctccaaatttagtacaatcttcactcatatattatttgccaaagaggagagaaagtaaaagggcttatatttcactcaagtatccgtttttggtgattcatgccaaagggggagaaagtattagcccaaagcaaagggaccgcccgcaccaccacctaattttaaaaaaatggtgttttcaaattgatatctaattatgttcaaaaaggggagaaagtaatatctttgaaaaaaccctcttgaacactaagaggaggatttcacttagggggagttttgtttagtcaaaggaaaagcatttgaaacagggggagaaaatttcaaatcttaaaaatgcttctcaaaatcttattcatttacctttgactatttgcaataggactctgaaaagaatttacaaaagaatttgcaaaaacaaaacacgtggtgcaagcgtggtccaaaatgtttaaaagaaacaatccatgcatatcttataagaattaatattggctcaattctaagtaacctttgcacttacattatgcaaact

SEQ ID NO: 38761 - DNA, 1766 bp, Zea Mays
gttagcgggagcgggtgccgttggaggaggtctgatctcgtctgcggcgggggcgagagagcaaggccacggcgtcgcggcaatgagcagcaccaccgccgacacatccccggagagcgtcggctcctgccgccctcccactcctcctacttcccttccccctcattcagcgccggcggcggccctccgcggcgctccagtgaggcggcaactggacttcgcggacgcggacgccgactcctgtgccggcgccggtggcgacctggacgactacgacgacttccttatccgcgccgtggatgacattgagcggggctataacgaggccaagcgacgcgctccgccgtgcgtctgcgggcgcggctattgcgcggtgcaacgggacgaccagagcggcgggtggatgtacgtctgctcatcgcagccgaagtgtaaacatgttgccatgtgtaaggaagttgatcagaatccacaatcaccgcctgttgttagaagtgatcctaaaacaagcaatcgttgtgcattcaacgttccaaggactcctgtaaatgatgctagaacacaaattaataatgttactctcgaaggtgctggtgctacaactccaattaatgtcagtccccaggctgctgttgctgcaactccatttagttacacttcgaaaggtgttggcgctaggactccagttcatgttagtccacaaggtgcacacgctacagcagcagttaaagttagtccccaatggaatagatctaatgatggacgatggaatagatctaatgatggacggccaatttgccagtgtactgcagggaagtgtaaaatattgagagtgggcaatgaagactggtatgtttgccctatacccaagggacaaggtgcatgcagttacaaggtgccagtaacagatgctgttggagctggagacaacgacgacgcaaatggatcagccaatcccgcccaacctaatgacgacgagtggccattcgacgtcatcaacgatgaaatcgtgccgacgccgcgtgctgtagcccagcagaagtcaccgagcacaccgcaccaccagcggagtggcacggcgagaacacctgcgccatcgcccgtgacgccgttcggtagccgcggcgctatgaccgggcgcccaaacgacacctgcttcgggtgcggcgagaaggggcactggatcagcgcctgccctaaaccgtctccgcgaagtaggtgtttccgttgcggcgtggtcggtcacaggccggccaattgtccccagccgagagggtcttagaatagaaggttgtgggtgaactggtggtctgatgctgcttttgggctgtgcctcgtaggcaatcagggctcaggagcagtgctaatgtttctgcttaggaatcttaagagcttgttcgatttgaggtggatcagaggggaatccacctcaaacccaacaagtcttaatcgggtttggcattgtagctacgagagagagagagagagaataatgtgtttgttgagaggtagggtggacaacggtgtaaaggtccgcaattgggccccattgtctgcctagtttagttaatttagttaataactaaattaatgtagttaattcagttaatgtagttcggtacatctatagtacatacatctgcgtcctctgtattggacctttgaagaacgggatgaacatgaaccgaggacggacatattgtaaggtgcatccttgaaacccctgcttgttctttgcttgtgtcctgtcctgacccgtctcgttt

SEQ ID NO: 38762 - DNA, 2521 bp, Zea Mays
cttgcggtgagaaacacggtgtcgccctcgaggctcgaccccgaccttttcctcccctcttctctagatcgcgacgaggcggactccccactcctgctgcccggagcgaagcggaccgcgtccccgccgcgtggcctgatcgatccctcagctctgccggtcgggccaatgctgcgtgcatcgagctgccgctgatcacgtttgacttatctatggaaatggatgactcacatggcaccatggttaataaaagtgaagagaatgactttgaaaagaaaggcacttctgatcctgtggtttatcagctagttcgggttgaaggtgatggaacacttgttcctgctacagaggatgatgttttgcagtttgaacatttccttcacaacgagaaggttgatcttcctcctattgaagatgcagaccatgtggaagagtttttcaacaatgactgcatgttactgaagaagcctgacttggaagatggatcttccaaattggagactgtggaagcacacacacaaaaattgggtgccaacttagaggaaaacatattacagtcattggatgattcccttagtcctccctcagactttagaattcatagtcagcattcagataaattgcttacagaacaaggggcaaacgtcactcgacaggacaatgcttcaactgagactacaaaatcgacagtgttaaatgactcttgctgtgctgaaaaatataaggctgatgcctgctcaagatctgtatgcgacacatctacagatccatctgtttcgggagttaatagttccatgcctgatttttccatattaagaggagaagtctgtttggatgatcttactattagagaacttcaggaggcgtttagagccacgtttggccggcagactaatgtcaaagacaagatatggctcaaaagacggattacaatgggcttgactaattcctacgatgttccaagttcaggttgtgtagttaaagactacaaaattgttggcaaggatgccaaaaatgatatgtcagacatggatgaaagagctaagactgggcttagagctacttctgtggttatatatccaggaaacgaaggggactctccatctagctcttactatcagagcgaggaccaggaagattcttccaagagggtgccgatccataatgatgaaccacaaggaaatctgctaggcgagcaatgcactgacaagcgaactagaaagccaacaaaaagatacatagaggagctatcagacattgagactcatgactcaactgtaaaaaattcttcaccagcaaaaaggcctgcacatgatgaactgttaatgaacccgcgagtagcacctttcaatgagactggttctctgggcacaatctatcctactagaaaggatacctttggaggatttagtgtacacgttccttacgtttcaaggatgagaagggggcgccctaggaaggacttcatttcatttgcggataagggaccctcggttgaacctaaagggattcagccatcagttgagatgatattagtgaaggatggtgacaagggaaaccacctgaggaaagtacctgaggttccactaaaggttagttctgagaacgagcatgcagaagcagttgatagcaaaggggttcggaacctacaagcaaaggtctgcagtgctgtttccaagcctaaaataaagcatggtttaacgcggaagcatcatcgagcatggacattgagtgaggtcgtgaagctggtggatggtgtggctcggtatggagctggcaagtggtctgagattagaaaactgtccttcgcctcgtattcctaccgcacttcagtggatctcaaggataaatggcgtaatctgatcagagcaacccagacacagcttccggcgcaaaaagatggtgcctgtccacggaagactaacccttctatcataccaataccaccatccattttgttgcgagtgaaggagctacatgagctgcagtcgcaagggggtggcttcacagccccagtcaagttctctgggcaggacggcaaggttctacagggaaaaggctcgggttttttgtgatccgtgtaatgcagatatacgtgtacgcttctggacgatgtggtatatatgagtaaatattatttgaagtaggtgtaaccacgttatccatcacaatgttctctacacgctggaacatgtgtaactcaggacgtccagaaaatattgttatacttagataagggcagacgtctgtcgccatgttttccaaacgtgtcaggcgtacacaatttaaaaagcaaatgcaaatctagacaggaagaggaaagttagagtaaacggagtatttgcggtgcattacaggaaagttgttgcagcaataatgaactaaactagtatttgcgatgcattacagaatggaatccgcaattcccttgtaaatagaggcaaacagctttctcgtttcggcttgtgctttataaattgctttggctcaaaagacgacgttttctccagcactggttgat

SEQ ID NO: 38763 - DNA, 1642 bp, Zea Mays
ggaaaaatttagggtaaccgttgcagatagtctcacctcgccgccttagaacaccctggccgcgatggcgtcagcggcggcggaagctccgggcgcatcggcctcttccgcggagaacaggctcctgcagtccctcgcagagcgggggtggcgcttccgtgaccccaccgacgaggccatccaagccctgctcctcgcctcccccactccgtcgccggaggccgtggagtccgagctcgtcagcatggacctgaggatgtttggcggaaagtgccttcccgatcgggccgccgccggcggcacgtcgaagcggctttcgtacctccacggccccgtcgtcttgcagcagcgtcgccttctgcgctttggtctcactgatgggatatgtgaagcagtagccatagagttttctcccatcccattcatcaccgaagagatagctccaggtaccaagattcgcctcgagaatagggttccaatcaataatggcatattgtgcttaagcgcgaaaaatgtgactgttattgggggggctgtccaatcattgtatgaagaatggcagatgaaccagaaatactctggcttatcccgtccatcattgaggttgtctccaagtgatgatggagttgggcctccaccatttgagaagttagacattgaagcacgcccctgcagggaaaccaaagttcaagcatatcctgctaggaagttggcagttactcatgaccatggaccagttaattctggtggcaagccaatgaatgagggttcaaacgatgagaacagagacaatattgagagtaaggttgaatctaagcaaattactcaagacagcaggccaaaagaggtcagcgaagctgttccagtccagaaccaagctgccgcgcagaagctactgcagaaaatgtcgcaggccgtgcctgaggacaggcgcggtcgcggtcatagattcaagggcaaaggcaaggaagaagatgctcaggtttttaccctcgatgaatgggagaagaggaaagccatcagttcgaagcccgctgcggaaagctacgtgcatgacactagccgagacgaggagctggcgaggcaactgcaggaacaactagacctagaagacttgcatggtggggcaggtgcaggcgttctccatggcggggccgagagctcggatgctgaacggttacggatgagcatgttcagcttcagtggccctgacgaagcaggtggtggtaggagagattttcgaggccgcggcaggggaaggggcggagggcgacgcaggggcagaggaagattttaggcccggccacacagttgtaggtttattggtttgttgcgtgttcagtgtagtccaccggttgtatgggtaaaagtggcgcgatgatatccttctcaaatcctgtttctgaatttctctagcctcatggcgagagcagatgctagtcagattaaggaacagtttgtagacttcctggagtttttgaactgttcttagatgcaggagcacatcgtacattgtttttggaagaacgagttaaaagtctgaaatttacatgacttgtatcttctgtttacgtgtgctgttcagccgtttgaaatatggtgctgtactgtatataatgctgtgttgcttcttaaatctgag

SEQ ID NO: 38764 - DNA, 2216 bp, Zea Mays
ggtgtgggtgtacgaccgtccaccacagtcattggttgatagcaatagcatgcatgcatatggagcctgtcaaggaaggggagtttgaagaggaaaggagaaaagggcagaatctgctccctgctctccacatgaattcagcagcacctgcacctataaagagagccggccggcctgcttcagccttgcttggcctcttgcttgcattgcatctcgccattgccaaggagcagtaccatgagttcgtggtgaaggaggcgactgtgacgcggctgtgcgggacgcagcagcagcggatcatgacggtgaacgggcagttccccggtccgacggtggaggtggccgagggcgacgccctcatcgtgcgcgtccgcaaccggggcagctacaacgtgacggtgcactggcacggcgtgcggcagatgcgcacggcctgggccgacggcccggagttcgtcacgcagtgccccatccgccccggcacctcctacacctaccgcttcaccgtcgccggacaggaaggcacgctctggtggcacgcgcacagctcctggctccgcgccaccgtccacggcgcgctgatcatccgcccgcgcgccggcgtcccgtacccgttcaacgccggcgacacgccagccagggagatcaccatcatactaggggaatggtggaacatgaaccccatcgacgtcgtgcgcaccgccacccgcaccggcgccgcgcccaacatctccgacgccttaaccgtcaacggccagcccggcgatctctacaagtgctcatccaacggcaccacgacgttctcggtcacgtccggcgagacgaacctgctgcgcttcatcaacgccgcgctcaacacggagctcttcgtctccctggccggccacaccatgacggtggtgggcgccgacgcctcctacaccaagccgtacgccacgcccgtcatcttggtcgcgcctggccagaccaccgacgtgctcgtcaccttcgaccagccccccagccgctactacctcgccgcgcgcgcctacgccagcgcccagggcgtccccttcgacaacaccaccaccacggccatcttcgactacggcaccggcgccagcaacagcagcagccccgcgatgcccacactcccggcctacaacgacaccgcgacggccacggcgttcaccacgagcctgcgcggcctccgcgcggcggaccttcccgcgcgcgtcgacgagagcctcttcttcaccgtcggcgtcggcctcttcaactgctccagcggccagacctgcggcgggcccaacaacacgcgcttcgcggccagcatcaacaacgtctccttcgtgctcccgtccaccacctccatcctgcaggcgcactacgcgtacgccgccggcggggcgacgccagcaggcgtgttcaccgccgacttcccggcgaacccgccggtgcggttcgactacacggcgccgaacgtcagccgcgcgctgtggcagcccgtgccgggcacccggctggtgctccagggcaccaacgtgttcgcggccgagaaccaccccatccacctccacggctacgacttctacatcctcgccgagggcttcggcaacttcgacgccgccgcggacaccgccagcttcaacatggacgacccgcccatgaggaacacggtgggcgtgccggtcaacggctgggcggtcatccgcttcgtggcggataatcccggggtgtggctcatgcactgccacctggacgtgcacatcacctggggtctcgccatggcgttcctggtggaggacggcgtcggggagctgcagtcactggaggcgccgccgtctgacctgcccatctgctagctcattgcatagggggcctcaactcatttattatgctcaaaattcgtcaaggaacattcttgccgatttataattaattcaatcatataatactattcaaacaaaagtactggcaccgtactcggctacaaagcttttgactacgggagtaatgtagaaattattttcagaccaagaaaggtctatatgacaggatgatccactgtcatcaagaaatgacagtgaatttaacaatatgccaatcaaaaatattttgtaggtattattcaggggaacacaatggctccattacagcactgtagtctgtgccaatcctcgaaatgaaatatatactatactgtttcaacattatattatgcattacatcatttg

SEQ ID NO: 38765 - DNA, 2463 bp, Zea Mays
aacccctccgccgcccccgaaaaaacatataaaacagaaccctcgcatcctgtaaatggcgacacgcctcgcctccatcttctctgccgtgcgcagccccacctcagccccgccccacactctccgccgcgctctcccaagcttcagctaccggcgagcgcatccatctcagccccgcatgtcctcctcttcagccgcctcctccgcgccgccggccgccgagaagcctacagtggcgccgttcgggtcctggaggtcgcccatcactgcggacgtcgtatctggcgcggataggcgcctcggcggtatcgctctcgctggagatggacgccttctctggatcgagggccgccccgaggagaaagggcgtatggttattgtaaaggaggaggataatcctgtggatgtcatacctcaggaatttgcagcacgcacactggctcaagaatatggaggtggtgcatttgcagtcgacaagagtgttgttgtgttctcaaattacaaggatcaacgtctatacaagcaaacaataggaactggtggtccacctgtgcctcttacacccgattatggtgcgccaaatgtcagttatgctgatggtgtatttgatcctcacttcgaccgttatgttactgtgatggaagatcgtcgaaaggatagcttgaatcccaccacaacaattgctgctataaacttgagtggcagtgatgttcatgaaccaaaggtgctgatcagcggcaacgatttctatgcatttcctcgcattgatcaaaataaaaagcggatagcatggattgaatggagccatccaaacatgccctgggataaatcagaactctgggttggttacttcgccgaaagcggagacttgaccaaacgggtctgtattgccggtggcaatcggctgctgattgaatctcctagtgaacctaaatggtcaccgaaaggagaactgttttttgttactgacagagggagtggattttggaatatttataaatgggttgaacaaaccaatgaaattgttccagtgtattcactagatgctgaatttacgagaccattgtgggtttttggcatcagctcgtatgattttcttggaaacagcgaccacattgttttcagttatagacagcaaggaaagtcacatcttggtgtgcttgattgtgattcaggttctatttcattgcttgacatccctttctctgatttatctgatgtggttgctgcagatgattacttctatattgaaggtgcttccgcgagtattccacggtcgattgctaaggtgacattaaatgaaagcaaaaccaaagtagtcaatttctcaatagcctggtcgtcctcaccagacctcgtacaatatagacctttcttcagcacaccagaacttgttgagttccctacatccaagtctggccagaaagcttatgcctatttctacccaccatcaaatcccaattttcaaggtttgcctgatgaaaagcctcctttgcttgtcaaaacacatggaggaccaactgctgaaacacgtgcaattctggacctcagtgtccagtattggacaagtagagggtgggcatatgtcgatgtcaactatggaggaagcactggttatggaagagagtatcgggagagactattgaacaaatggggtattgttgatgttgatgattgctgcggctgtgcgagattcctggtggagagtgggaaagtagatgggcagcgcctttgtattactggtagatcagcaggtggatacactactttagcttcacttgcattcagagacacgttcaaggctggagcttctctctatggtgttggggacttgactctgttgagagcggagacgcacaaatttgagtctcattatatggacaatcttgtaggaaatgaaagagcttactacgagagatcaccaatcaactttgtcaaccagtttacttgtccagtcattttgtttcaagggttggaggataagatcaggcacgcaaaatatacagtgccttgaaagagaaaggtttgcctgttgctttggttgaatatgaaggagagcagcatgggttccgtaaggcggagaacatcaagttcaccttggagcagcagatgttgttctttgcaagattagttgggaagtttgaggtggcagatgatataactccaatcaagattgagaacttcgattgatctcttggagagtggtgtccggttcgaagttttgttcacgtaacccgattatatgttcagtacattagccgttgcagtaccttttaggaatacgacttcatcttatttttgagggttgatggaaatctcttttttgcgctgtaacgatgaagtcaccttgttttctgttcggttctagaatgaaatagaacggaatgacactatcctttatttggttgatgagtgaaaatagataatttcataactataatacattcatacaaccatatatat

SEQ ID NO: 38766 - DNA, 288 bp, Zea Mays
tgaatcctatgttgacttgattgccacaggctcagacgattcaattcaaatagtgaacgcattactagaagttacttctcttctcgaatttgccatttcctccatgacgtttaatttctggcattgccttaagcgtaacctcattcgaagggactctgatgtatcatatggattagatgtgacggttgaaattgagaaaaacagaagattacaaatatttcgtccaaagtttgaaactctggtgtctctggaagaggggggttcgtggaggtgttcgccgggtttgga

SEQ ID NO: 38767 - DNA, 1323 bp, Zea Mays
gtccgtcagttatttctcttcctcctccaaaccaccgatgtcgctaccggttctatccctgcgctgccattgctcgtccgcatcctccttggatttccctcccaggtacgcctactccatgcgcacgcattcctattccgattcctgcacattccgtggaccgatttggaaaagctgaactggtacatagcgtatctttctctcaccagtctgctgacggtgatgtttataagcgaatctgtactcatatagatttcttgtcttcttacatcgtcaactgtccagctagagatttctgttttcttagatatcttctgtcttcttaaggggagacgaggagggcgcataaaattcacaagaactgtttttgatagattcacaatttgccgtctgagcatgcgaaggctgatgtgagctgtgcaggaaggttagggttttctgatgcgctcatacatggggcagcaagaagatgggatgtctgatggcttgtacacttacaagcatcaccgcgagcgaggagctgatatccacaccatctttgtgaagaagagcaaattcaggattctgctgtcatttatcggcacaacgttccttcttgtgtctgtttgctgcgccctgttatcgaaggatggtttatgtctttgttccctttggagcatttcatttgccagtgtaattgcgaaatgcctgcgatgtgaccctgtgaagaaagagtcattggtgatcatgccgacttttggaattcaattagagcaacacttttggagtggaagagttcatcgcaaatttgtgcccattggcaagattctaagaccagtgctgaatgagcatgtgacccctgtctcatgctactggagcttggccttgcttgtacgcgaagaatatgagctcatgcttgttttcaagagcttgaatccaccagtcaagatgttggttccaatctggaaagcgttatgtgcattcgtagactccaatacgctgggcaattctgcattgcctcaatccacatgattacatgaacatgcttaaacaagttggtggctgtgtgcagccctgatgataattcgaacatatggttcgctgaagactttgctgactgacaacataatgtttagtttcgatacaaatgatgatggaatgtacggaatgttaccgacactggggctattacgtctcacgtggagtgtgaattgtgaaaggatcgtgatgcttaagagtggatgaattgagattctctaaaaaactctttcgataattaagtcctaattgcaagcttaatcaaaagttttgcaccctaatctttaaccttgtactatcaatggc

SEQ ID NO: 38768 - DNA, 1182 bp, Zea Mays
ggaagataacgaagagagggaaaacaagtgtggaagagggaaaactggaaaaggcacagcaaaccgagaaaatggcggctcggcgtgggcgagagtgggacggggacgagcagggcgcggcgctgccaacgccggcgcccctcggcgcgccggtcgtctgccttctcagctccgccggagacctagccgccggcgccttcgtaggctccctcgtcggatacggaaaaggtttgatcacaaaccaaggcacgaaggcttgtcttagcattgctggatcttctgcaaagacatttgctgctcttgctggtgtccaaagtttcatcatgtgcttgctaagaagactgcgtgggaaagatgacatgatcaatgcgggtatggcaggttgttgcacaggcattgctttgagctttccagataggcgacgggagaagagtgaagaacaggagaagagaatggaggaccagagatagaagataggctgctcagctgctgttaatgacagataaactgtcgtcctttggactggcgacctttgctgttaatgacagatatattttcactaaagggcttccaacctccatcttcaccgaggtgcgccccaggcaatgttccacagctgtgtcaccttcgcagcattctcatgcataatggacggtctcagcaagcagcaggcagcaatggcactcacacttgatgtgaaatctccaactgtcaagtatgaggagggccgggtcatcccaccattcactcttccgccgcttctggatgcattggatcctctaggttcattctgccagacccttatcaagcctaagcattaggagtgcgctgaggcttgttaccccaaaaaggcagtttcgatctatagtttggcactgtatgctctataaccgttctgaatttgtctccagtcatgctgttcaagtttggtaactgtagtggcgctataggacatatgcccattttttgtcaatggtacattttttatgaaacttgctgaagagattataaccataagattgttcattggtgaagatttgatagttcattgcaacaatggtgttcaactctctgagttgaagatattttttcagaaaacaaactgttagcaggaaatctgaataggtgcttaggctctgtgtaccaatttgcccgatagtgcaaaacctcgtcagatcgagc

SEQ ID NO: 38769 - DNA, 1424 bp, Zea Mays
tatcacctcggcctctattagtgcacgctatataaattcccgagtctcgctggcgctaccaaacccttcgtacgccgcttgtgttctgaccgccaccatgaatcgtgcgagagagaaacccaccgccgttgacgatcacctatgaagacgctcggggtctaggattaagcctcagggcttcatggtgccgtgagggagtgggtgtttccccaatcgatgggatcatcgaccagacagtcgggaatcacacgtcaaagttctagaaagctgttgaggtgtggaccatcgtggactgggcgacaaccgtgtagaaatcaggtgaagagcaggtacctacgacgagtttgatgaaatctaggcgtcgtcttccagttaactatggcaacgtggagatagttatctagttcaatttaaattattatcatttattttgtaagacattctcgttatgtaataaatattatgatattcatatttatacactaagtcattgtatgtgtggatcttattctggcgcatatatgagatgcatctaaatttgcccttaaatccaggtgtgacacaagacaaatgatgggaagacaccatttgagttctggtagtgtaggaagcctgcgattcatcaaataaagacatttgaatgtattgtctatgtcaaggaaacaacaccacaactcaagaaactagatgaccaaggcaggaagatgatctttgtggttatgagaagggaatcaaagcatatagaacatatgatcctatcaccaagcgtgtcacaatgacacgtgatgtggtgttcaatgagtcagggaaatgggattggagtggtgaagatcaagcgaagagcaacatggtgaatcacagcgatgctcctttaaccgtggagtatagagaagtgtttgtgcctaagatgggggacgaagaaagggtattagatagtgatgtcttggatggtagtccagtggtgtcggatgcaggagggcataatcacaatcctctgtttgactctagggaagatgaagtgtcccgatcctttgggactcaaatgtgatacaattactagtcccaggaggctagtaaccacattcctaacttcaaatagtacagagttcaaataaaagttattacaataccagagtacaagctcgagagagccaaaaatacaaagcgcagtaggagataaactagcccaagccacaggcagaactgggtgctgacacaaccccctcaatcaagcatagcagaaaagaagtcttcagctgctgaaaaacataaataaatctgggtgaatacactaggaattccgcatgcccatcccgctcctgtaaagagaaagggacctatatcatacatgctttatatggtggagttgaagtcactcttctttttctcagagaaaggcagtacttttagggtttttcccaaag

SEQ ID NO: 38770 - DNA, 1191 bp, Zea Mays
ccaatgggcaatgctccccgaagccgaagcggaacgaaacggtccacacgctggctagcccccgtcccgactccgaaatccgaatccatggccgtcctccgcgcgtcgccgccgccctttctcccccatccgctctcgcgcccctctcagtgcaagcggcgccccacctgccgcgtggtcgcagccacagccagacccagtcctgctccttccaggcccaggagcggcggcgtccatggaggccgccccaagagggggcttcttgcggcaaggagaaggccggcggaggggcgggtgccctgcttgcgggccacggaggcgggggtcggtgcggcaggcgtcgcgaaggaggaagacgagtacctggcgcgggaggccgggtggggcgtgcggcggatggcacgggttggggaggagatgcggcgggtggcgcaggtccaggccgaggccttccacgtccccgtcgcgctcttcaacgacttcttcttcgacttcttcaaaattaggccgaggtgctgtcggcgctcatctacagagtgaggaactcgccgcctgacagatacgcttgtttggtggctgaagaagctgaggcagccgaccagccgtcaaaggcaccatatgagaagatcgtcggggttgtggattgcacggtgcaggacgaagacggcatcctaaagcaccttcgaggcgcggatgaatacctctacgtgtcaggaattgcagtcttgccaccattcaggaggaggaaggtagggaccgcactgctgaaggcctgcgaggcactggggctccaatggaggcacgtgttcatggttctgagggcgtacgaggatgacgacggcgctcgaggcctctactccaaggcagggtacagggtcgtgtcaagggatccagactgggtctcctgggtggggaggaggaggcgagttgtcatggtaaaggagctgccggttcacgatgatcaatgacgccggcacggttttgttgaatatgtgtgtgtgtgtcaccagctaatttgtactgtttcttgtccatattcgcggcatcatgcatgtctttttggacaatagaggagagacagttgcctatcttcccaccaaacacaaaatgaaaattgagaagttacagttgacaagttccgtttcagagtctgccaccggcaagtgtacagtatcagctgtattttgcgac

SEQ ID NO: 38771 - DNA, 3635 bp, Zea Mays
ggatggacagctcagggctgcgggctccggcgccggttcacatggtcgggggatgctgcgaggactgaagactttggatgggtgttgcgtgtgctcatcccaccgagcgagagggagagacgagtcagaaaggcccgcccgtgaagctccatcccgttcttgcccagtgttcatcaggtgcagcttgcgcggatccccctcatgaactgagcaatcgatagaagaaacaaaaagggccatttccgctacagaaaataaatcatcaggaatgggaaaacgaggccacaggcggtctgcatcacaagacgacgacaatgtgggctgtgtgtggggcctcatgcgcatgctttacttccgccgagaccccaaacttttgctggatgcgaagcagttgagtgggaggcatgcgttccgggaggtcagcgggagggggcattcagcaaagaggccaaatgattttgacgggatagaagaagatggtaacatagaagatcgcactttgcagaaaccgacagtaaaaaaccttatggaggatgaattggaaaaattaatgctgctgaagaaatttccaaatgatgaggttcagagaagaaaagccgacctgggaattgatgtctctcttgatacgatttcagagcatacaaataaatcaacagataactcatatcaccaggcaggaatctctacgccttcaactccatcaatggattatggggttttgaattatactgaagaatataatcttgaatctgtgctggtgaattttctaggtgaaatatatagttgtcacaatgaatgcccacacagtgattgcaagaacaagaatgaattgtgtccttcactgaagtccctaatccataaaaaggtcaatgaattgaataatcttccccacaatattggccgtgggcaatctcaagagggcagtgatgctaagccatctgaccaaaataatctttataacaccatggcagcccaatccaaacaattcaaggatgcattggaaatactgggttcgaacagtgaactttttgtgaagctgcttcagaagccaaatcaacatatagctgatagtatccaacagcatgaaaacagtaaggtgtctgctggattagagcctgacaaaattcatggacagaccaattttgttggaggaagaggaagctcaaaacagcatcctttggctacaaaagagcaggctaaagagagaaaatatatgttcttctggaggaagagtaaatcaaatagaaggcagatgcttgacgcaacagatggagctcagactgttagcaaaattgttattctgaagccaaatccagaaagagggattaatcagaaagcagctactgcaagaactttacatcaacagccatgtacatcgaatgctcctggatgcagtggaagggaaaactcaaagttttcaattaaggaagtcaagaaaagattcagatttgtgactggtgagagaagtgaaagaaatttgtcacctgcagaggaccttcaaggagacccacgtaagatcaaagattctgttgttgcaattaataaatattttagacatctccctgaagggagcttggcaaacaagtctgcatcagacattgagaatggcatcaaaccttttatcagcagtaagcaaaagaatcaaaatgggagcataactgaaatcagtggccatatagtagcaccaaaaggtgcatctgtattttatgaagaggccaggaggcatttatcagagatgctaaaaggtaatgactgttccataaactatccagaagttcaaatatcaaaatccttggaaggcatactttctcttcctcatggcaatgtgtcaaccactgggagtagcctgaggggaaaggattaccttgacccctcacctggagaaacagatgtttacgatgcatgtgaggttgagagagaagaatgcacacaagagagaagccaatcacaagaggattttggaagcattgctcactgtacttgcacaacagttgatgatcaggtgacagttcgagaaggatattacacgaatgaagcacaagaaggaccaagacatgctcatgatgagccagacactctgtatattgaaggacttgataaattcatttgccgcgaaaacattcgcaacgaagagtccagtccagcagaacaaagcagagacgatatacgtcaagtaagcttaaataaatgcatatttttctttcttgtgattaatttttctaaatgtcccatgtttcataaaggagatactagaagaaataaatcagggaaaagagcatgttaaaatgtccctagcttctgttgagggcatagatgaaaagttggggcagcaagagccagaaacaccggaaccaagagcatcagccaaattaatctcagacggttctcctaatcaaagcgatgaaaagcaagagaggcccagtccagtatctgttcttgagtcatccttcgaagatattggcagtccagactgcataaacaagaaagagtgagctgcatggtctccaaaggaccctgtattttccagataatgaaccagacgttaatgtcctttgggaggacaagaatgtcaggttggactacataaagctggtgctagaactctcagaactgtgcgcagaacaaaatctagaggtatggtacctagaagacgagttgatcagcccctgcttgtttgaagaactacagagccagggtgatcagacggatgatcgaatgcttctgtttgactgtatctgtgaagctctaacagagatccaagagagatattttagactctcctcttggctaacttttctaaaacacgacatacggacacctccgacaggagagaacctaatcacagaagttgataggtacgttaacgggtatattatccagtacagtcttccaagtactctagagcagacaattaaaagggatctggaagttcagacgtggatgaacattagatcgaaaaccgaagggattattatggagatgtgggagtttgtattggatgagttgatagatgagactgtctccgatttgtggatttgaagttctgattaggcttcgtccatggtgcctctgtggcgagcatagtgagtaggatacaggagttctttcgtgctgaaaaataaccagttctatgcggcagaatagcatgggctaccgctagccaagtgtgtaactgcagtggagatcgttctcgtgtagtcgtgtggaggagaacagaagtctaggttcagcagatctccagagctgtgaagtttgcgtggatgaagttgggcacggtttgtctcacagccatgcctctgcacggcgaagtgtacagcagtctgaagcgcattgcgattttcctctttgcccgttgagatttgggagcttgtgtgtgcatgtgtgatgcgtgcacttttcagcgtgatcagatcgcgcttgtttttttataggtttgttttgtgtgtaaatgtgaaaaaaagagagaaagcaaacatacatgattaatcaaatgacatgttttatgtatgctttgttgaatggcgcaaggcacatctacccccatggggctgtgcatgtatttatagatcaaaagatacatgcagatatgtacaagcaaggcaacaacctgccgagaagggaggcgcagctccagc

SEQ ID NO: 38772 - DNA, 2902 bp, Zea Mays
agctccggcgtgtctctctgaggagtgaggacgaagaggccccaccgtcacgtacgcctgcatgtgtccacgagtcaccgcaccggcacatagttgtcttgttgttgtacacgacgcacgcatccccgccccgccctcggccctggtgcatataaacaagtgttgcgtgatcggcggccaggccactgccccttccagtctcgccgtcgccggagataggccgccgccgccagccggaacgcaacaccgcagcggttacctgcagcggacggcaggaacctagtcctccactgctctgcctaccctacaatcgggatctcgcgggcttcattaggggggaaaatcgaccagcgagcgagtgcaagaagctcctgttcgatcgatctcgggagctccgatactgcgcgcaatcccaaatttgacacagagtcacagcaatgtcagtgagccatgccgacgagcacgagatatctctgtgcgaccccagctccgaggacgaccggcggcgccggaagatcgggtccctgccgctcaaggctatccacgcgctacggaagaagcgcgcccggcgtcgcgtcactgacttccggttccccgcggccatctccatcgaggacgtccgcgacgccgaagaggagcgcgccgtcgccgccttccgcgaccgtctcgccgcgcaccgcctcctccccgacaagcacgacgactaccacatgatgctgaggtttcttaaagcaaggaagttcgattccgacaaggcaatgcaaatgtggtcagagatgctgaggtggaggaaagagtttggtaccgacacaatcttggaggactttgagttcgacgagctcaacgatgtactccactactatcctcagggctaccatggcgtcgaccgtgaaggccggcccgtgtacattgagaggctcggcaaagttgatccgaacaagctcatgcagatcacctcggtggatcgctacatcaagtaccatgtgcaggagttcgagagggccttcagggagaggttccctgcctgcacactgtcagccaagaggcacattgactccactaccactatactggacgtccatggtgtggggttcaagaatttctcaaagaccgcaagggagcttgtccaacgtatgcagagaatagacagtgactactaccctgagacgctacatcagatgtatgttgtgaatgcaggcagtgggtttaagttgatctggaacagtgttaagggattcctagacccaaaaacttcttccaagatccatgttcttggttccaactaccagagcagacttatcgaagttattgactcaagtgaattgccaaaatttcttggcggatcatgcacatgcagtgagaagggtggttgcctcaggtctaacaggggtccatggaatgaccctgtcatcatgaaggagagatatttgctttcagttcctcttcaggcatgaaagggtatgaaaatccttctatggactaacagaaattttcatttgtagctaatacacagtatggaaggtggtagtactagagaaataaagcaagtttctgacggggacgaaagaagtggctcttccctaagggcagaaaacctgaagggcatgcttagtgacatatcaaatgctgaatctgagtcggatgttgatgacgttggtttaacagttgtccaaaagagtacggaccacagtttactaaccccagttcatgaagaagtcaaggggtcagatacttcgatattttgtagttctagcagtaagcatctcctagatacaactcctggagctcctcaggccacccctcaaatggagatgcccattcagttgacttgccgtaaatattttcctacctttgggtggctaaataatttagggaatgcttacattagtttgcatggtacatccgctggaaggactctggaaaaccttgctaccggactgatcacactcttgatcaggatatcatctttcttccacctttccgtctaccggcaagaaagatttatagaaaccgtccaaccctgtgccgcggcacaggaaccagaacctcaaagggaagaggacatgagtgcttgtttacgacgcctcaagaagctcgagtcactgtgtgatcacctcatgagcaaacctccggatatgccgaaggagaaagaacttgtattgatgcagtccttcgatcggataaaatccctcgaggctgaactggaggcgacgaaaaacgcgctgcaggctgcggtggaaaagcagatggaactggtggagacggtagaagctctgcagcaccaatcgaccagcgttaggaggagattttgctgttcataggagtagggttgtcgtcgtcgcgccgaagctgtctgggttagcaaataatgaacctgacgctgcccttggcatcttgtttttgctcgacttctgaagcgtcatgacgccaaacctgtcgctggctcggcacactgtatgcgcggatgcgtgtgaaatcgatcattttttttgtagctacactctggcttctgtgatctccagagcttgcaaaatgtcaaagctttcgctgccctactgctgcgtattgttgagccgtgtcatttgcccttggcatttcgaaccatccatagcgctagctatttttgaccgctcccctcccatttgagttcttgatcgactcccgcccgcgtgcaccggcgccaacctctgcccacgcggccgcgcccctccgcctccgcgtgtcactcccgcacgtttctgctcgcctggtagtaacccgaacgcgcattgccgcgccgtcaagggtcgatccgatcggggaggaggcgtgacaagagatgggtccccacggaggcattgcgctccgcgcagccgtactcgccgccgtccgcttcgccgccgccgggttcatctcaagtcag

SEQ ID NO: 38773 - DNA, 884 bp, Zea Mays
cccaccttcttggcggcgcgcgtcacctgctcgacgaaattcctcggcaagaatactcgtggtggccacggtgggctggcggaggaggtggacgagaaaatcctgcacgccgcgttcgtgcccttcggtgaggtcaaggacgtcaagacgccgctcgaccagtccacgcagaagcaccgctccttcggtttcgtcaccttcctggagcgcgaggacgccgccgctgccatggacaacatggacggcgccgagctcttcggccgcgtgcttaccgtcaactacgccttccccgagcgcatcaagggaggggagcagggatgggctgcccagccaatctgggccgatgcggacacttggttcgagaggcagcagcaggaagaggagatgcagcggctgcaggcagagcaccgcgcagcgatgcaggcagcagagaagctgcacagggagaaactggccgctgaaagggaaggcgagaaagaagaagatcccatggctgccgcagaggctcaggctgtgaaacaaagttcttaagaaccggatattaactcataactcatgtgctacgttgctgcctgtttgtcagatatgactaaacgaatcttgtgaatgctgtttgttttgctgaaagaaccctatttctcacctgacgtgggattcttattggtttcccttttccctgtctgtcttagtatatatatgcacactggcgcaaagaacaattcttgtattatctgcgacactcatacagaagacctggagatgcacgcagcatttaccaaactggactagtggagcaggagatgcgttctgatcgtggccacacagtcaagcagagcttactaaaatgttgtggttcccaacgtgtgttgtttgggcttactcaa

SEQ ID NO: 38774 - DNA, 218 bp, Zea Mays
attttggacttgatgctggaatctttaccattattccattagcatcttcatactgcattacgtcattggtggggccatgctgtaatcttaattttctaccccttagaaaatttgtgccgacaggggaaaaagccgatgtaatcatttgcgttttgataaactaaccactgaagtcgcaacatagaaaatagcatagcctttaacatgtgtcaatctag

SEQ ID NO: 38775 - DNA, 1302 bp, Zea Mays
ccaacagtctcggcctctcctcccggcttcctcacacggcactccagccgctagccctcactcaaccagacaaccagtacaccaccgccaccaagcccgggccgaataactctgccgggcaaccgccgcccttcgccggcaaagaacgcccaccagatccaccccggcctgctatggagtccgcggtgaacccgaaggcgtacccgctggctgatgcgcagctgacgatgggtatcctcgatatcatccagcaggccgccaactacaagcagctcaagaagggagcgaacgaagcgacgaaaaccctgaatagggggatatcggagttcgttgtgatggcggcggacacggagcctctcgagatcctgctccacctccccttgttagccgaggataagaacgtcccatatgtatttgttccatcgaaacaagctcttggccgtgcttgtggtgtgacaagacccgtcattgcttgctcagtgaccagcaatgagggtagccagctgaaacaacagatacagggtctcaaggactcgattgagaagcttctcatctgatttacctaagatctttcagtgtgatgggcctcggcgacacatttttcagaggcttggactggtgatggtgtcttgtttacattacgctttccaaactatatttgaacactgctaagtcaatcatatttgaattgtgcttcactttatatttgtgattgtcatgtatcctcaagatgcctctgtatcgtggtggctggtttctgttctggatccgaccacatcattgtgatggctgattgctatgtttttgagtattggatcgttcccatcgattaacttctgtgatgacgaatcagcgcaaataaagtcacttatatgtgatcacgagcagcgcaaataaagttgtatgtgggggcataaataactgaactgaagaattggttcattagaacagccccagatcgcaggcactggttccggagcaatcaagcggggccttcggcagcctaggaactactgttccaggccgagattcagtgcatccgggtgtgtcactctttccaggcagagaactgttccaggccgggatttaaaggcctgttcggcaggctaggattgaagaaggctgttttataaacacagaacatatttgaacaatctgacactgctgctttataaacgcagtgaataatcaaccaatctgacagtccatcattctttctaccataggatagcatgctgccgagacaatctggcagtcttgctaccaaaataagacaatcaagaaacatagaacaatcttgat

SEQ ID NO: 38776 - DNA, 3408 bp, Zea Mays
ctacaattcgcccccttcccgcacaacgcatcccccttcctcctccccgtcgatggtgttgtcttctctctcaccctaggacaagggagacactatcgctcctctgccaacgatgtcgagtgctcccccacacgtacggagttgttccaaagactcctgtacttcccctgcaagcctcggcggtgaccatcatcgatctatggacctcggtgagtggaggtcacggatctactccaccggtgtcgacgaggtttgtttccccgtcctggagaagcgacgacgcaatagatcttcgtgcactgcagagtcgtctcccccaagccgcaaaggaatcactccactccatcctcgttctttgaatcgatctggtaaaccttggcctttcccccaaatcttcccgctgtccttccaccccctcgcctccataaccccacccactgtactgcttttgtttcacttgctttctgttgaatccatgctacatttgactgtgaattcaggaaatcattaagtataatcgaagtcccgttgatttctggttttgtaggacattatgatctgttttcttgatggtacataaactgagtttttatagttgttagatgcttgttgtattcgtttgtttagttcagactgcagaggttcaacaacagcaggcttagggtatgtgttgatcttaactccattttcattagcccattagaagcaatgtgttattttttggttacattattatcttttggccgtgaatggcaccaatacataattagttggtatgcacagacaactttgtaagcctgacttggtgatagctatggtattatgtaatccaccttagtacacaacactagctgttcatgcatttacttatctgtcatgatatactccaattatcctagtacatctaaataatctggtaaggtatattacatcattcatttgagttgtacactaataaacaaatgttatccatgtgtagagccttgtggtgaaatacttgtcacttgtgtccgtcatcttgtttgttggtttgtttatctatctttttgcaagctcgtccaagagccggccaaaagcaagcaagaagagatgttgatttacttataggttgtagttttaggtgtatctggtggttttgccagaggaactcttagtagtttgagctgagtgaaagcttttaagtttacaattactgaccacaccatgaattacaacgacgtgagcatcagttttgaaggtttagcaaactctggcattttctgactttcatgctgtccatcttccaaatgaagcccttttggaggcaaatctagttttatctgctctatgttatgtcaatactgattttgtatatttgtaagtgctgtggcaatactgattagttatgattattgaaaatatataatttaatggatatgatatacatatttatccttctttaagacactctatttttgtgtgagtgcagtggcaaatgttttcggctgttggccatgaatttatttagtattttatttgatctcatgagattagaacatacatctctagaagctttgaaggacattccttagtcgatatgcccaaatgatggttttcttgaccaggtgacatttgctattcaaccattaattactaagtaaccttgaagtataatttatttagtatgctattcagcctttactaagtaatcttgaagtataatttatctgcactgattgatttttgttctgtgctaccagctaaccagggtcattaaaatgtagtgttggccatttttaactatgtcagctcacctagaaaattttccttaaccaagcatcccatatacaacacaatgtcctctagagaaaacatttgaattctttgtcttggaacaatgtctcggtctgcaggtctggttctcaaatacaatcgtcaagtcttgcgagcatttctttgagcctcattctctaccaatgaagcactttcctgtcactagaactgaactatagtcttcatagtttcactacactcaatttgggaattgtatatcataattgtacttttcttttctttttctatatactaaattttcttgtttttattaacacaattgtgaaggcttatcattacacgtccatgtgtcattgtgctcacttggatcttactaaagacaaagtatgggctgagaaagttcattggcatttgagtttgcatggctggccttattttggtcgtattttctgatgtgtgttcttcttatcgagcaagtatgaacaagcttcattttttatacatatggaattgcactattacagttctgatgtcatactgaatgcattttcttgaaaaaatgataatatgaatttacaacaacgaatgttcatctcacagtatttacatagatgagaataatgtccatattacctcactatgacatggttaaataaaatttatcacaggaaatgaaactgtcagctatgaaaacccaaagccaactgctggaatacattgccttgtctttgtagtctcctgctagtttatccagcaaacagtttatgcataagggtcttcttttggttaattagggttcttttggtcagttatcatatgatcacttgttgctttattaggatcctgtctggggaatcttcatccttttcacccttcacctgtttttgtttcgaatacaaatttgtatgttttgaatgggattgctaaagtgatattacagttactttctgtcggtttaaagtctgatgataaatggagtgtggagtatggactactaccatttattcctactgcaaaatcatttaaaatggatatagttttggccatgttactacaattgcaacgatggataagttatccctgcttgttctttatgggtatgtgttctagattctagaagattaatgcttgaacccatctaacaatgttgtggctttaaccgatttcaggtgtggatctgatttgtaatggcttattaggatttaggccagattgaagaggactatagtctatagatcatatgctcatttcaacatcaagggcaatttgattcaattaagtctaggatgatgattttcagtacctaggatgaagtttcagagctgccacctaatttcagagctgcaagatttctacagaattggaagactatgctaccaaaaaagctttcctaatttacctaagatgaagttcagtattgtttaggacgagtcatatgtttatgtctttgtgtctccaaaaatatttgtacacgtatcaagtggtgattattttaagtttcgctactctatatattggctattttatttcaatgagaaatggtttgtccattgcaaccgtgtggagtttctcatttttattaatggcaaatgctgatgtatattcatttttgttgaataaatggtttatttcttg

SEQ ID NO: 38777 - DNA, 973 bp, Zea Mays
aagtccaaaccaacccatccatctccattcatccgtcttgacagctccactcctaactccagcgaccaccgcgtccccaccatggccgctcgccggagcactagccccgcccggcacggcgtcctccccgccctccttctcatcctatgctcgtccctcccttccctcgccgccgcataccgcccaggcgacatcgtcccgatgctccgctcgggccagtaccacggctcgaggtcggtgtggttcgacgtggtggggcgccattgcccggccttcgcggtcaaccgggaggtgctgatgccgatcccaaagcctacggggttcactggtgctgatccgtacaagataagtactctggaaatgatatacttggggtgacagctaaagttgtggacatgcctcaccactacgtggaagttcatcctgacataaagaagaatttctgggatccacagaattggccaaaatacgttcttgttagatatacatgggaggagcaatcagagatagatgttactggaggattttatgtgttatttggatccgggcttgttttgtccttcattcttgcaatatatgtcctacagtcatctcaagagaagttgacaaggtttgtgcgagaagcagttgcagatagtagcctcccagatggagttgcaaaggtcgagtgatgacctgtctacgatgagctgtcttattacccactaatttctacactgatcagaacctcaagttttttaacagtcaactttcttagctgcggaacgagtaatacaacagagtagcatacatatgaagagctagtggtttatttgattctcttgtgcatgctcttaaaccaactttgcttatatggtggaagtgcataatttcatttccaggcaggagttttggtgcttgctatctcaactgtgagaatttgggactgaataggtttattgtttgcatggttttaaagacggctagggagaac

SEQ ID NO: 38778 - DNA, 2010 bp, Zea Mays
ctcaccaagaaccttgttcttcatgatcgaagttcacctggcatgcaattacctatggctgcataccttggagagcttgttctaagcaatgatgttaaggtacttgtggcacaaaaggctggctccacactagtcaatatcatgaaaaaagggaatagagaggccagagaagcagctttgaaggcattgaaccaaatttcatcttatgatgttagtgcaaagatattaattgaagccggtattcttccgcctctcatcacagacctctttactgttggcagtaatcagcttccaatgagattgaaggaggtctcagcgaccattcttgcaaatgttgtggcatcgggtgcacgttttgagtccattccacttgatcataataggcagaccttggtgtctgaagacattgtacacaatctgcttcatctcataagcaacactggacctgcaattgagtgtaagttgctccaggttttcgttggtctaactgactcttcgacatctgtacaaaatatagttgatgctatcaaaagttcaggtgctattgtcagtttaattcagtttgttgaagcacctcaaagggaagtacgcatgaattccatcaagctcttgaataacatatcaccttatatgggtcaagaacttgctgatgcttttcgtggaaacttcagtcaactaagcagcttggtcaaggtaattgtcgataacaatggtatttctgaagagcaagcagctgctgctggccttgtagctgatcttcccatgggggactcagtcctcaccagacgtcttcttcaagatggggcattcgcagcaatcatttcaaaagttttaagaatccgacaaggggagattcgtggggggcgttttgttaacccattcctcgaaggtctggttagaatagtctcccggatcacatttgtcttggatgatgatccggatatcattgctgttgctcgtgattacaatcttgcttcactcttcactgatctgcttcagatgaatgggcttgacgtagtccagattgtctctgctgtttcactagagaaactctcgcagcagtcaaaacatcttacgaagatactgcctgctcccagcccagggctgtgcttttcaatatttccatgcctcagccagaagactgtagcaactggggtctgtagagttcactgtgggatttgttccgcaagggagagcttctgtctcttggaggggaaggcagtggagaagttagttgcctgcttggataataataacgagaaagtagtcgaagctgctctagcagcgctgtccactttactggaggatggagtggacattgaacaaggtgtcatggtgctgtgtgatgcagaaggaatcaacccgatactcgcggtattgtgcgagaacagaaacgaggcactgcgccagagagcggtgtgggcagtggagagaatcctgaggacggacgaaatagcgtatgagatatctggaaaccagaatgttggtacagccttggtggaggcattcaggcatggcgactctaggacaagacaagttgcagagcgagcattgaagcatgtagataagttgcccaatttctctgggatattttctaagatgggagcacaatgaccacgttccatggaagtactcgtgttctatttgacatgaggcaggcgcagatgaacacttgtgttcccagcaggccttcattggttttgctgactcgcactccagctagatgttgtagcgatctgattggtggaagaagaattaagtattgcacgtgttgtatagtgtgtatttgtacctgtagacttgtctgtactttcgagattggtcagattcatagaataggttgctatccctgttgtgtggagacaatacataatgcataaccgccagcactgggtggaaaaaaaagggaagaaatgtgaagtcgttgcgtcagatatgacatggttttctggtgtatgtcttaatgtctacagaggcaaagtgcaaaggactgtttggttcgctgtctaa

SEQ ID NO: 38779 - DNA, 397 bp, Zea Mays
tcggtataggcgcaccaaatttcaattcaacggctctacatgttgtggtaatcaaagcggacctgggcaaagtttccataccgggaattgcgtgtgcaggcgtgacgtccacggggtggagcagcttcatggcggaaggcaaggttcggcgaacaattcccggttgcctggtgattgattccacccgcgaacgccacatacaaccccccgatggcacgcacaagcccacgacccagcccaagatcccggccaacggcgaagaacagactggtggcggcgcggatgtttacttgacgcaggggcatggttctctctctccttctcagcttgggccctaataagttcgcgagaagctagtcccagaagcggcgcacgcgcttatatgcggaggaggttg

SEQ ID NO: 38780 - DNA, 5055 bp, Zea Mays
ctcgacggctcgagtaaataatacttcgtaaaaaataaactactaaaacgcgcacaaaaaccattccgagaggagaactaaaaaaatataaaaaatccccaaagctacctttcctcctgctctccctcccacgcctcttctcctcgccgccgccgccgccgccaccgctgagagaactaggactacgggcgggcgaagcacactggcttcctgcggacccgccgccgctccacgggcacaggcgttagccgtcgcgcggttgccctgtcagccctgatcggtgctgggcgggggtccgcggcgggctggtcgacgggcggtggcgggcgatggcgccggcgaagaggaagcgcgcagcagctgccgccgcggccgcggccgcggccaagtggaaggtgggcgacctcgtgctcgccaagatgaagggcttcccggcctggccggctatgattagtgaaccagagcagtggaagatgccttctactaaaaagaaaccgctggtttatttctatggtactaaacagattgctttctgcaattatgctgatctcgaggcattcaccgaagagaaaaaaagatccctacttgctaaaagacatggtaaaggggctgatttcctgagagcagttgatgagataattgaagtttatgattctctaaaggatataggtagcaacaaggttgacttgcctgccgaagaagtaaagccaggtgtagaaaagtttgctgaaaataatagccgcatggatactgaagatctggtcagtagctcctatatgcacaatgatagaaagatagaagatcattatgtcactaccaggagtcatgacatggtcaattctgacaggccttcagttgacgagcgatgtgttgtaaattctgctcctgatgagcctattgaaaatgtatccatccttgatgaaatgagggatatttctttgcgtactaattcattttcaaataagcaaagggatgcacagccacaaaattgctacacacgtactagggttccatctctgcggaagtcaagaagttcattaagtctggaatcaagaaaggctcaaggttctgataatgtctggttgcattctggtgaaggcacttccaaccaacctgtaactttgggggctagtaacggcaacagaatgttgaatactcctgctgaagtggatagtactagtaaccgtgaagcatctgaaaatggaactacagagacagaactgaaatcaaatggcacatcagatcttcccatgaacacagcagtaaatttcaagagaaaaagaaaatcagatagaaaacctggacctcattatagagattgtacaacaccaaataaagatgaccaattatgtgctgagtacagtgaaatccttccagattctccgaattcaaagaatgaagtaagcaagtcagatggagatgagcacttgccattggtcaaaagggcaagggtccgaatgggaaggtctcagttggaggattcaccagttgatgaaattgatgtttctaataagaagccagagcttgcaacagccttggaccaatgtgataggaatggtaaacctgcaagtcccgccaatgattactcagctgatcaggtgtctgcagtcgtaagttctgctcctaatctgtcctgcaaattggacacaactatcttgtcaaaggaaggtcatcttccttggaagaataaagaataccatccaaaaattttagcattagatgtggaagctgctttgcctccttcaaaacgcctgcatcgcgccttagaagcgatgtctgctaatgttgctgagaataccaagaatatacctgaagtgacaggaccaaatgaaatgactctaaatggctctttgttgacagcaagcagcctttctaataaatctgcagatgcagtggtcacagtatctaatagacctgtaatagttcaaagccctgaaccttctttagacacacagtttgtgcataacccatcaggcaaatgtacctcagaatcaattctacaaaataacagcattcctgattctgcttcagttccttcaaaagaaaatgatcatatcgtgttaaaaggtgatatttgtgaagaaaccctcatggatactaaaactgctaatggttcttgggattgtagtgaactaaataatgattcctgtgggaaaacttcagccctttgcatgaaattgaatcggcctgcacttaatgttacacaagccacatctgtacctgaccgattatcttcgtctttggagaaagccagtgaaaatgtggccgcaagtggtgtcaaagagacaaaaacatttggctcagctgtttgtgatgttgacagaagtgcagaaccaattgaccgttcaaacaacaatgtgacgagcaacacaatgcgacatagtgagactattgtagcggattcagtgaacaatgtgggggatacagcaagcaactcttcactggctactaaatcatccagtatacaatctgatgcagacacccggacgtctgaattgcatacattctcatctttggcattgaaagaactgaaccatagaaaaattaaagacaggagcacttctccagattcaatgccaatgaaagaacttatagctgttgcacaagctagaaggcccacacaggcagttgtcaccctcaaatcggataatcaggtctacttctggaaatgataatgttaattctaggagtccgtttgataatattcagcagaagaaattagcagcacatggagccaatgcagcgcgaaggtctttcaaagatttcctcagtacattgacaagaaccaaagaaagtatatcgcgcgcgacacgtcttgctatggaatgtgctaaatttggcattgctggtgaggcaattgacattatcgttgaacatctggaaaaggaatcaaatttgtataagagggtggatctcttctttcttgtagattcaataacacaatgctcccgcaatcagaaaggcggagctggagatgtatatccctctctcattcaggcagttctacctcgaatactctatgctgctgcacctcctggaaactcagcttgggagaatcgaaagcaatgtctcaaggttttgaaactttggcttgaaaggaaaacactttcagaatatatcatccgtcaccatattagagaaattgagactatcaacgaggcatcatttggaagttctcgccgtccttcaagaacagagagagctctaaatgaccctttgcgtgacaatgaaggaatgcttgttgatgagtatgggagtaatgctggttttcagctacccaacttaatttgcacaaaagtacttgaagaagaggaagaaaactcttctgaaggcaggagcttgagctttgaagctgttacacctgaacaggatgccccatataatgatgacaatgaagaatctcaaatgcctgttgagaagcatcaccatattctggaagaggttgatggtgagcttgagatggaggatgtagctccaccatctgatattggggcaaccaccaagtgccaaccagagcaaagtgacaccaatcgtgcaccatctgaccaacgcccttcagatgctggccctccacttcctgtggaccggcctccatctcctccgccattgccatcatctcctccacctgtccccgttcctcagagtgcacagatgcagcctaaattacaaatggcatctgatcccatggcgccacatcctcaaagagctacatatagtgttcaaagtcaacaacagcattctattgcagagcacccagttcaggatatggagggcaacaaaatcagataccacctcccccaccaatggcaccactcaatcctcctggtccccatggcagtttccctgctcccccagcaccttaccatgggaacaactatcatcggcctccaaccacatccatgcctaacgagggatatcatcagcaaccaccaccccctccaccgcctccaaatcaattcccttctgtgccaccagaacaccaacataggccacatcactggggtaataactgtccaccgtatcccgagagatatcggtacaatggacatgatcgaggtaatcacagacatgatagaaggcatcatggacatgacagacaacaccattatgatgatagaggataccactacgatgatagaggatatcactatgatgatagaggccattactttgatgatagaagacatcattttgacgatagaggacatcactttgatgagagagctattagggggccaatgcacaatgatgccgctgaccagggaagatattcttttcctccaggtcctcctcggattcctgaccattttgaagctccaccagccccaatgcactatgggcgaccatcagatcctccgccaaggccttgtgcaggctggtctaggccgcctaggatatctgataactattctccctcgagacattctgtggagcctccagtttcacatacagctggaggtcatggtggatggagacctagataacctttttcggtatcgaagcggtgctctgatgctttccttggtctgtgggggcttaacctgtgggagagtctgtctggtgtctctgcttcaggttgaaggcacccacggaggtggagcactccaggaaagtgggagctggtacctgcctccttgtacagatgtatctcatggattctacggcggtcgggctgcctgaactgctgtttgtaccctagtaggggtttagactgcgcgaccacacgcagagctgagttgtaggggtgtagggtgtcttctatcaaccgatcgtagtcttacattgtactgtttgttagtgcaacagtcctcgattccattgctgaattcctcctggcctcatcagacgacagccagctgctctgatgtcttgccgaaactgtttgagcacagcgtacatatatgcctaaaaaagagaaatataaatcattttgcccgttgcacctgcttatatataagagcatggtcgaactaaggggtgtttggtttctaggttcgctcaattttattttatttaatatggaaattttagttaacctagaaattagtctctaga

SEQ ID NO: 38781 - DNA, 1804 bp, Zea Mays
gtggactctccactcttcttctgcggtcggatcccccggcgggtcggactgcggagcacgggctccggcgagccgctgacgagggcctgtgcggcgaccgagctcgtggcgggagaagatggacgaagcgagcacctccgcgtccggcgccgcgacgaggcgcggcttcgtgcctgcgagatcgggagttttgcagttttctataggttcacccagcagaacctcccagcttggaagccagcaatgacacctggatgtataatagcaatgttcttgattatcggaataattttcatacctttcgggcttctttgtctccaaacttcaaatcatattgcagaaatcatctaccgctatgatgttgactgtgtgcctgatgcttacagaggaaataggcaagcttatattaaggacagctcgatttctaagaactgtactctggaagcgaaggttctggaatacatgagagcaccaatttatgtttattatgaacttgagaatttctatcagaatcaccgcaggtatgtcaaaagtagaagcgataaacagctgcgttttggggcaaaatacacggccgactcgtgcagtcctgttgagtgggataataatggttccccaattgttccctgcggcttgattgcctggagcttattcaatgatacatatggttttactcgtgggtccaaggaaataaaggtcaacaggaaaaacatttcatggaagagcgaccgggagcataagtttggcaaacatgtgtttccttccaactttcagaacggaaccttgattggaggggggaaactcgaccctactgtcccactgagtgaacaggaagaccttattgtgtggatgaggacatccgctctccccaaatttcgaaagctctatggtgtgattgaagacgacctgcatgcggatgagaccatagctattttcgtaggaaacaattacaacacctacacttttggtggaaagaagagcatagtcctgtcgactgcgtcctggctaggcggcaagaacgacttccttggacacgcttatattgtcactggttcgttgagcatcatcatatcgattctctttgctctgatccatgtgaagtacccaaggccgcaaggtgaccccaattgcctatcctggaacaggaaaaacagcaatagctaaggggccccgcctgtatctaccatctatgagggcgcctccacatgaatcagtattacacatctgtatctgaaacatgtcagacactgtgccgcaaggttaatcccagatgatgaaaagaaactgcgtacaccatgtccatcagaaatactagttccaattccgacacatgcgctgggcatcaaggtcaacaccgggagtttttattattattattccagaatgcgcacggtaatttgaaaatgaaattgtggtggaaactgtggaatccgctaatccggtgcggatctgcacagagaaactctggtggctgctgtgactaatgaaaagtggttattctggcttggccgttgtccatcgagggagatgtaatacctgatcagccctgaaatcttaaagggctcccttctttcctcatgctgggacaacatttatttacatcgggtgtgttcttggagttctctccatcaccgaatatatgtcggcgtgattgctggtatctactccgtatgttatccgataggggggtgtcgcgatcctccctgacgacgcactcgaggttgatggcatttgtcagcagcggccagcagatgatgaaagttgaaatgcctcccatgagtgagccgtgaaggttacgtctcgc

SEQ ID NO: 38782 - DNA, 2195 bp, Zea Mays
tttcactcatcacggaccgaccggcgaccgcacccaatgcaagcaatttttgcggacagggggaccttcctcttcttcttcctcgtccccggcccctgcccctctcccctgcggagacggagcgccaccttcctcaccttctagaaagaactagaaccctccctccagaaccttgaagaccagcccagaccagaccagccccgaagctctccgccggccccgcccttgacgacatgaagcaccagccgccgcgccgctggggcgtcgtggcggcggtcgtcgcactcgtcctcctcgcctgcctccagatccagtaccaccacctcaaggtggatctcggcaaggccggctttgcctctgccacgcaagagaataacgcgatccgcagccgcaatcgcattcgctggggccccgacaggaacggcgcccactccttgccgcgcgggattgtccaccgccactccgacatgtccctccgcccgctctgggaggacgacactgcttccacccacaagaataaaaacagtgactacagtgctctcctcgccatggcagtcggcatctcccaaataaaaaacattgacactatggcccgtaagtttctgaaggaaaactatgcagtcatgctcttccattatgatggaaatgtagatggatggcgtcatcttgagtggagtgataaggccatacacatccttgctcacaaccaaacaaaatggtggtttgctaagcgttttctgcatcctgatgtcatggctatctatgatttcatttttctatgggatgaagaccttggagtggagaacttcaaccctagaagatatcttgatataatggtgtccgaaggcttggaaataacacaacctgctctggaccctgatctatcaactgatatccaccatcgaatcacaatccgtaataagatggcaaaagttcacaggagaatatacgacaatcggcctagtatgaattgttctgacgagagcaaaggacctccatgtacagggtgggtagagggcatggcaccagttttttctcgcactgcttggaaatgtgtatggcatctaattcagaatgatcttattcatggatggggtcttgacatgaagcttggatattgcgctcagggtgatcgaacagagaaagttggtgttattgacagtgagtatgtagttcatcaagggataccatcattaggagggccatcacttagcagcaaggtgcttgacatctcagcaacaaactatttttttagaaacttggagtccggtaggaccaaggatgaagtgtactgattcatccaaactttgtttgaaaaaaaaactaccagagcatcgattttccttgtgtgcttttcttttaccctagttggcatatacctgcatgatagtaatgttaggtgtcatgaattcatgatcgttcaataaaatttgcatgtgccgctactgacatcttgttgacgcagacacctcgaagatcattggatttgaggacccacatacgaagacaatcatcggctgagctggagaagttcaaggagaggtggaacagggctgtaagggaagatgaaggatggagggatccttttgattcttgattacttggaaagcagagtgtgacacttctgataacaaaactggccagtggccacagtcacagcagtagagtttggaagcggagagcatcttctgcttcatgtcaaaaacacttgtttggttataggatgacgagacggttggttggttataggatgatgacttacatacacacacacacatcataactttatccacatgagttaaaagcgggaacattatcgtcaatacaaggagctgatggagaagttgaaactaacaaagtaacagggggtttccgaaagtgctgtaattttccgttggaaatatctgttcgggagagttgtatagtgtcatgatatacacacttgtgcagttatttgatgaggaaacttacatagcctagagcagatgtgtttcctatattattattgccttgtacaatgtaagatgaattccatgagtcagaaatagcatcaggtctctatgcttatacttggacaagttaagaggatggcacggcatattttttgtgtcaccgcaccgaggttgtcgctctctttatgtgtatcaaaaatataaaagctcttgtttatgtacatgaacgatgttttgggtgtc

SEQ ID NO: 38783 - DNA, 3824 bp, Zea Mays
catatttcgcaatccccttctcgtccccttcgcgaagaagcatcatcctccatacatcccctcgtccgcggtctcacatggcagtggcatgagctgcttctccccgaaaaaaacgtttaaataaaaaacaaaacataattataaaccaacacgcctgccaccgaccgatcagacgaccccttccaagaggaaatccaccaccgcggccggggcctcccaggagatctcgccggaggccgcggcagcggcggcggtggggggcgatggcgctcaacatgaagaccctgacgcaggcgctggcgaaggcgtcggctgtgatagagaagacggtgtccacgacggtgcaagaggtgacgggcccgcgcccgttgcaggactacgagctgctggatcaggccgggtccggcgggccggggctcgcgtggcggatctacacggcgcgaccgcgggatggcgccccctcggcgccctaccccgtcgtctccgtctgggtgctggacaagcgcgccctcgctgaggcgcgggcgcgggcggggatgtcgaaggcggccgaggacgcgttcctcgacctcgtccgcgccgacgcggcgcggctcgtgcgcctgcgccacccgggcgtgctgcacgtcgtgcaggcgctcgacgagaccaaggccgccatggccatggccactgagcccgtcttcgcctccgtagctaacgcgctcgggtgccttgacaatgttggcaaggtgcccaaggaggtcaagggcatggaaatggggctacttgagattaaacatgggctgctacaagttgcagagacgttggattttcttcataacaatgctcatcttgcccatcgagctatatcgcctgagacggtatttataacttctaacgggtcttggaagcttggtgggtttggttttgctctttcggttgatcaagcagcagttggtttgagtttgacttcatcacaactatttcattattcggactatgatgtcgaggatacagctttacctcttcaaccatcgttgaactatactgcaccagaattggtccaaagtagagattctaaagttggctctgcttgtgatatgtttagctttggatgtttggcttacaatctggttgctcgtagaccacttctggactgccataacaatgttaaaatgtacatgaatgccttgacatatttaacaagtgaagccttttctaatattccttctgatttggtattggatttgcaaaggatgctatcgatggatgcactatcacgtcctagtgctatggcctttacaggttcttctttcttccgggatgatacgaggagagagataatatgcagaagacagagtttttgaaggcattatcagatatgtggaaggattttgattcccgagttcttcgatataaagtgcttcctcctctttgtgctgagttacgcaacatggttatgcagccaatgattttgcctatggttctaactatagcagaatctcaggataaaggggattttgaactcgcaacactgcctgcgcttgttccagtgtttgcttcagcgtcaggtgaaactctacttttgcttgtgaagcatgcagatctcatcattaacaaggccactcaggaacatttgatatcacatgttcttccaatgctggtccgggcttatgatgacaatgatccccggttacaggaagaagttctgcgtcgaacagtaccactgtctcgtcaacttgacaccaagctagtcaataaagctgtgcttcctcgtgtacatggattagctctaaagacaacagttgctgcggtgcgtgtgaatgcgttgcgctgtttaggagatcttgtgccatccttggacaaagaaggaataatgggtatcttggagactgttcggcgttgcacagctgttgaccatactgcgccaactcttatgtgcacacttggtgttgctaatgcaatctataaacaatgcggtgttgagtttgctgcggaatatgtgattcctctcatcttcccattgctcacagcacatcaactgaatgtacaacaatttgccaagtatatgctatttgtcaaggacattacaagcaagattgaagagaagcgtggtgtgactgttacagataatgggaacacagaggtaaaatcatcaccttcattggcaaacgggatccattctgaacctatgtcaggacaaataccagttgcaaagagcagccctgcatgggatgaagactggggtcctactaagaaatccggtgttccatctctttcagttgattctagtgcacaaacaaagcaaccctcagtagacccttttgacttcggtactcaaacaaagcaatccacaacactcccctttgatttgagcacccaggcaaagcagccaccatcagtttctcatgttacagcagctacaatcccacctgcgcaaccacaaccatcactacaatctcttgcggctagttcaggacctaaaatttctggctcatgtgtccctgtcgacattgagtggcctcctcgaagaagctcgtcatccaacttcaatgcacccttgtctattagcaaggataatggttctggaaggctgtctagcgatggagttgatgatattgatccttttgctgattggcccccaatacctagcaatgttaatagcatttcagcaaccgagcattggccaagcataaatcaaaatatttcgggatttagctcaggcaacatagtttttggtggcagcgggaattctgtagggcaaacgaaaagcaaccaaatgagctggtcaaacacgtctaatctaatgggcacaaactcaactggcagctatttgaatcagggcagtgcagctctaggtttcggaaatccaaatggaggattgagcacaggtctctccaatccaagtagttccagtacaggcctgagcatgatgctaccaaaatctgattctggatcattgtcgacgtcggtcaacaatgccgcacatgggctactaagacttgcccctcctccatccacatcggttggaagagggcgcggtagaaatcaaggacagtccgcactctcccgagcatcaaggcctcatgccaactcggcatcaggacaacaacctatcctggatttactctagtaagagatggtcgcctctgttcttcgcgttcggattgtcaatgtgtacatcctcaaacctttgtaagggttttgaattgggcatcgaggccatcttcatactggtgacagaagaaatgttttgtgtatatttctgtccaaactcggctgtagctttcagagtttgtgaatagttgacatgtttatatgggctgtgaagttttgaaatgtttaatgggccttacaggactgggggttcaactgcagtggtgctgtgagccgtgcatgcgatggacaactctcctatcgagcattttcatcaattcgctacacggccctacatccctgtgcctgtgtgtgtaccactagcttgcattgcattgcatgcagagtgtactattgatgggtgatgcattggatggggcatgcacagcaggaatatttgcagttgatgagcggcaggaatcagtggctcagggaaaattgaatggcgatctggccttcactccacatgagtacgtacctatacgtacgcatgtatcatcagacggagtcaggaggatgcgggtagtgtccctgtgttgtctaccattttgtctcaccaatgtggtcccaaagtacatgatgtttttttacttttacacactttaaaccgaccgtaatatttaattcttctgtaaatacttattttattttatcattaaatatattttttaattacttaactattt

SEQ ID NO: 38784 - DNA, 3464 bp, Zea Mays
caattgtctccctctcctgatcacataaaggacggtaatgtgaagtagtcggtggcgaactcctcgttgtggatggcgaacaaggtctggttacagacgcccctgctggcaacgcgatccccgttggccactgtgactgtcaacccatgtcgatgcccgtcgttggtgtaacctgtaaacccaggtgagatactatagagtcacggatgaatgtatgtgtggagcccgaatctaccaacgccactaggggtacgccgttgatcacgacgcgcaacttcaacgtctcctccatgtcgatgcctgccaaggcatggagcgaaatgcctagtgcctcggttgcgtcctccacctcccgagcgtcgtccagctccatcaagaacaccccctttccagcacatttgtggtcgggggtgtacttctctgggcagtggtagcactccccatttgctctcttcgccaccagctcgtcagggcccagccgccggaaccggggtctggctgggaccgtcggtccttgaactaccggcctggagcggccagcaacgtgtgcggtcgcgccttgaccgcctgtagtcgcctccaggcgacgctcgtacgctcgcgccaaactcatatccgtctgaagattggcggggtactggagctcgacgtcggtcttgaggggctctcctagcccagcggtgaacagattcacctactggctcatcgtcaagtcggcacaacgacagaggagtgtggagaactgtcgttggtactcttccaccgtacccgtgcgatacagggcgttcatttccgccaagttgttggtacggatgggcggaccgaaacacatgtggacgaactcggcgaagcacgaccaggacaggatgtcgtggtcgcgttcgagggcgtaataccactcgacggccaccccctccaaggacaaagtggcgtgccagactgtcttcggtcatggtgcgcataccccgaaagtatgtctcgcacttatttaaccaagggaggggatccgactcaccattgtagctgggaaagttgggtcggtgttggggacgaccgccgtcgtcgtggcgctcgtggcggtggtggaagttgccgtcgccgttgttggagaggggcgacacggtggaagaagacgaacgctcagggtcgaggcccttgtcggcttccatgcgtaccaaccgggcatcgtgagcggttagccgcccgttgatggtggtgatttgcgccaacgccttgttctgttggtccaggatttggcgcagggtctccgcaatggagggctggttaggatcttcctcaaggccgaacattgatgtcgatgccagaggtgtggtctttgataccaaattgatatggcgctggtgcttgggactcttcaacggtgactggaggagatgggcttggggaatggaacgcagggggtatgggggtagggggcagctagtgtcacggctggctggatcagccagggtgacgaagtagctgtccactaaggattaacttcttcgatgattctctagtacaaacttttggctggctttatagatcatgagccaccaaacctttcctattatttagcctagatatttggaaatagaaatatcagatctaaacttcctaacaactcagctcttgattggaggaactgatttaacttcctaacaactcatcccttgattggaggaactgatttattcaatcaaaaccttccttctaacctcttatttctttcctgtgttggctccttcctttcctgcgcctgctgctggccttgggcgcctttgatactggcggcccacaaactggtccacaacatccgtacaggtggacaccagaagaaatcaaagctgccactgggaaggatgaatgcactttcatgaaacacagtttgaaattaaggagtgtatatactgacgtcgaggattttgaaggaacaaaagacgccagcaaggaaccactggtgacaagctacaacagaaaattcatgggaacagtagactacatatgggcctcggagggtctgcatactgttaaagtcttggacacatttcccatagagattttgaaaaaaacaactgggttcccgaccaagaaatggggaagcgatcacattgcccttgcctgtgaattggcttttacaaaatgacgccttttatcaggcggagagggcgcctgcatagttgctagtgaccaaacacacctcaagagaaagaatactgtctacaggacgattaactgaaccaaacctcgctcttttagagctcgttaatttatttcatttttttttcgacacacctttttgaattgtgcgtgagtatggagaaccggagtacatcatttgggtccaattttagagcattgttcctgtttgattggctatggagagtgtattttggtgtgctgccactctacctgcggccctgccatctactggttcaatgacttgtttgagtcagtatgccctgcacggcactgtttggtgatttaaaccctgcacgacaattatagagtacaacataattgccctgatacaccgaccggcgtctattgccatcaggatatagatggccaaatggaagtgccggaacctagtcacaatactaacacctcttagccgtgccgtgttggcacgatagaacaggacagcccatagtggcaggaccagctagagcactacaatagtacacaattacatagtacacagttaaaacattgaaaaatcaaataagatgcttaagcataaggtatgtggagctccatcggttcttcacagcttgcttaaaatagacaaacacaaaaatgagtagatgacaaatgaatcaagattagggccttaggggataagagcacaatccaccacaactagatctagagatgataagagcaccacaagtccacaacaaacatcttattgccttaccacaagtgtcaacctcgttagatgtcggctagaggaagaagacgtaacaccatagcagcttatcatctcttaccaaagccccaagccaccaaggtgaggagaagccagaagggggaacgtgaggtggaggaccctaccggaggtcggagcctagaggtgaggcggtggtagagtggaacagtcggtggcaatgcagatttggaggaatggggaatcgcccccaaatcgccaggcgccagagagcggagagtccgagagggttcaaaagagagcgtgagaacgggcgactaacgagatggggcctaggggagggggcgatgggttagggtttagatggagccgggcttaaccgttcttggggctaatcgggtcgtgcccgtgccgaaccagcgtgcttggaaacgcggcctagacacactactagccaccgggccatgttgtgccccgggtcggcccgattagccccacactgttggccatctatagtagtacctttgatttttttgagggaattgcatgactcgtgtttttttaagtttgcatt

SEQ ID NO: 38785 - DNA, 1635 bp, Zea Mays
gtctaccccaacttgcttggcactaaaaggttttgttgttattgttgatgatgatgttagtgcaccatcactaggagctggtgtgaaagttgaatgatcatattttttgttatcttatataaactcattggttcgtgtatggcaatgcaaatgtatggaagacatttacggatctttttgattattttcctctgacagctctggtggaatctgagattttctgccttcatggtggtctatctccatcaattgaaaatcttgatagtgtgcgcagcttagatcgagtccaagaggttccccatgagggacctatgtgcgatctcttatggtcagatccagacgaccgatgtggttggggcatctcccctcgcggtgctggctacactttcgggcaggtactacacatctgttttcatgttacctcttgtatacctttttagtttgaagttattcatttgttcctttgtttctccaggacatatcagagcagtttaatcacacaaacaatctcaaactcgtagctcgggctcatcaattagttatggagggatataactgggctcatgagcaaaaggttgtcaccatattcagtgctccaaattactgctatcgatgcggcaatatggcatccattttggaagttgacgactgcaacagccacacattcatccagtttgaaccagcccctaggagaggtgagccagatgtgacgcgaagaacaccggattatttcctttgagctgtcgatgttaccgtttcccagcctgtgtcgtgataatcgatgtcaacgtctgctggatcaagggccagacagaaataacaggggaatgccgaagcactatgcccagagtttcacccttttcaggcgacagagaagggcggccatccacctacaactctggccgccctctgttttatgcagtttttacagagtcgtggaactggccaaaaagaccggagtaccatttgcacctgtgtagcgtaagcttgtactacaaataggcgtgtgctaatctgtatcaccattcatcaattgcaaggaactgttgaactccttccatcagtaaagtaaattttggtaaaagaacggcttacagtgtcgggaatgacactatcagacagccacgatgtttcgtcagatttgttactgacgaccatcacagagttcattttgttttgaagtacaagcgcaagaatcaacagctcaacatggaggagagatgaacagcatggtatatctatctttagtgcaatgcaagcgcaaccttaggttgctgctacgtacgtagcagtagtatgaggatggaacgtacggcaagattggtcgtcggtcaccggccgtgtggtgtgacggcggcatggcaatggcatgtagcagcagcaacggtctgggcctggcagatagtgtacacgcccgccgtcgcgcatgccgggcggtcacacggaggtgctggcgagcagctggttggcggcgacgcccctgcccttcatgacgtgcttccggagtccagggatgtggacgttggtgatgtagtccgcccagtccacgccccgcacgtcgaagtggaaccgcgccctctccgccggcgacatggccgcgagcagcgcctccgtgttggcgttgtcgaagcggcc

SEQ ID NO: 38786 - DNA, 3706 bp, Zea Mays
gctaggccttacatctctagccacacccacacctgtacctgtttgctgctgttttttctcccacgcgatccaaccgtttgtttacgccgggctaggtttctcgaccgtacggggacaggacatcagtgcaactgtgcaagcgaccgccaccgcattacccggaactgcccagatcttcgtcgaatcgtcgggccctttgctggcgacgagcaaccacagcttgcaatggcacaatagtgacatcttgggaaacaatgaaacgttttgtctatatcaatgatgattcgtgccggtattcctactgtgacaaccggatatccaataccaagtatactctgtggaattttctcccgaaaaatttatgggagcaattcaggcgtttcatgaatcagtattttctactaatagcctgccttcagttgtggtcccgtatcacccctgtcagccctgcaactacatggggtccacttatcatcatcttcattgtttctgcttcaaaagaggcttgggatgattacaataggtatctttctgacaagaaagcaaatgagaggaaaatatggttggtaaaggatggcgtccgcatacagatcaaagcacaggaggtacatgttggagatttagtgtggctccatgagaatgatgagataccatgtgatcttgttctcattggcacttctgatcgacaaggcatttgttatgttgagactgctgctttggatggtgaaactgacttgaaaacaagaaccattcctccaatttctgctaacttgtcagtagagcagctaggaaaagtcaagggtgtaattgagtgccccaacccagacaatgacatacggaggtttgatgctaacatgcgcttgttcctccctataattgacaatgaaaaaagtcctttgactatcaacaatacacttcttcagtcatgttaccttcgatacactgaatgggcttgtggagttgcagtttacacaggcaatgaaacaaaatctggaataagtaggggagctgcggagcccaagttcactgctgctgatgtaataatagacaagctcactattgcaatattcatgttccaagttgttgttgtacttgttctgggttattttgggaatacttggaaggacactcaggggcttaagcaatggtatcttatgtatcctatggaggtagagggcccatggtatgatttcttgattatcccgttacgctttgagctgttgtgctccataatgattccaatctccataaaggttactcttgatttggctaaaggtttgtatgcaaagtttattgactgggatgagcaaatgtttgattgggaaacaaatacacctgctcattcagctaactattagcgaggacctcggacagattgaatatattttgagtgacaaaactgggacactcacagagaataaaatgatcttcaaacaatgctgcataagtgatactttgtatggaaatgacaacggagatgcattaaacgatgtcagacttgtaaatgcggtctcaagtaatgatcctgatgtcatcaaatttctgttggttatggctctttgcaatacagtggtccctatcaaaagcaatgatggtactgtgtcatacaaagcacaatcccaagatgaggaagctttagttaacgctgcagcaaagctgaatatgatgctcatcagtaaagacaccattacagctgagatttgtttcaatgggtctaagttttggtatgagttgttggacattttggaattcacttctgatcgcaaaagaatgtctgtagtggtaaaggaaggggagactggtaagatccttcttttatcaaaaggtgctgatgaagctctcctgcctcgtgcctgtccaggacaacaaatacagagatatcttgaagcagtagaaatgtattctcagttgggattgcgaaccttatgtttggggtggcgtgatttaaaagaaaatgaatataaggaatggtccaaaaactttcaaaaggctagctgctcattggacaatagagagtttaaaattgctgaagtttgtaatagcttagagcaagaccttcaaattcttggtgttactgctatagaggatcgtcttcaggatggtgttcctgaaaccattaaattgttgaggaatgctggaattaatgtgtggatgctaaccggtgataagcaaaatacagcaattcagattggacttctctgtaacctcataacttctgggcccaatagtcaattgttatctatcagtgggaaaactgaagaggacgtgctaagaagcctagagagggcattatttattatgaaaaatacatctgaaacaaagggtcttgcatttgttttggatggttgggcacttgaattaattttgaagcattccaaggagtcttttactaggttggcgatgctgtcaaaaacagcaatatgctgtcgaatgacacctttgcagaaagcacagcttgttgctatcctaaaatccgttggctacctaactctagcaattggtgatggtggtaatgatgttagaatgattcaagaggctaacattggagtagggattagtggtagggaaggactgcaagctgcaagagctgctgattatagcattgggaagttcaagtttcttaagagattgatacttattcatgggcgttattcatacaatcgaacagcatttatttcacagtactccttctacaagtcacttcttatgtgctttattcagattctgtttgcctttttgtcggggctatctgggactagcttattcaactcaattagcttgatggcttataacgttttctatacaagtttacccgtcatgactataatctttgacaaggatatctctgaaacaacggttatgcagtacccccagattttactgcattctcaagctgggaggcttttaaatctcactacattttgcggatggtttgggcgctcgctatatcacgcactcgtcgttttcttcattacgatatgcgcctactcagatgagaaaagtgagatgcaggaactgtcaatggtagcactgtccggttgcatttggttacaggcttttgttgtgacaatggatacaaactcattcacttgcccgcaaatccttctcatctggggaaactttgtggccttctacatgatcaacttaatactcagtaccgtcccaagtctccaactgtacacaatcacgttccgcctgtgtagccaaccttcctactggatctccatggctctgacggttgcagtaggaatgggaccggtggtggctttcaggtacttgaagaacctgtatcagcctagcgccgttaacatactccagcaggtcgagcagcgcaatggatctatcagaacttctgggaatctggagtcggcgggagccaatctcactaatctactgactggctcacgtaaaaacagggattctaattatcgccctctgctttcagagtctgcggagtctgtaagtgcaagcggcagctaagaattgtctaggctttccgtactagcatgacagtcatacactcatacagacggcagaacagtgaactgtaacagaatcatgcttgtactaaaaaatatttcgtcggggtcaaagccaataattgttttgttggcctaaatttgatcatttttctcagtctgcgctgtggcaccgtctgtgctgtccgctgtcgcacgtagggatggtaataggatctaaattttac

SEQ ID NO: 38787 - DNA, 596 bp, Zea Mays
ctcttctccgtccaaattcgtcgtactcatggtcgccctctataaattgagtgttcggcctgctccgctatcttgttacgaagctagtgcaccgttcctcgctcccgattagccaacacagcccccgaatttggaatttcccccaaatcggccaagaacgccgccgtgtgacctcgcgccgtggccagccatctgcagaaaacgaggaagaaactgtggttgaagaagttgtcactcaagctgagaaacctccagccgataacaacttctacttcgacatctgtggagtagacccggaacctcttgcaacgcaaggtgatgaaagagctgagttctgttgtttctgctccaaggtggtgcccaagcaaaaggaagaacgctagacttatttggggagggtgttttgcctcccagtaatgtaataataagtgccacactcgaacacccggttatgtaataactactctttctataattttatatgaatgtaaagtatattattgtaatccttttcgctcattctctactctgattatgtgtaatatctgtgtgatgggttaagcgctcctgggcgatatgatgaagatacagataac

SEQ ID NO: 38788 - DNA, 1207 bp, Zea Mays
ggtgcaaaaatgtgaagtctcgcaggccaaaacccaaatggtcccccatgattttagaaaatatgaccataaaaccctccgaacccactccgccgcaacccactagctgctctggctcccccgaggcaatcgagtaatcgacgaaggccaccaccacctccacaccactttgcctcgagaaggttccaccaagcctctcggctagggtttggggactttgggggcgatcgcaatggagggccgcggcgcggaacaagcacccgaggcggcggcggaggtgaaaaatccgaggtgcttcatggacgtcaccatcggcggcgagatggaggggaggatcgttgtagagctctacgcttccgtggtaccgcggacggcggagaacttccgcgcgctctgcacaggggagaaaggcatcggcgccgccagcggcaagccgcttcactttaagggctcatgcttccaccgtgttattaaagggtttatgattcaagggggagacacaactgctggagacggaactgggggagagtcaatttatgggtccaaatttgaggacgagaattttgttttaaagcatgagaggaaaggaatgctttcaatggctaattctggtcccaacacaaatggttctcagtttttcatcactactacacggacacctcatttagacgggaaacatgttgtttttggtagagtgatgaaaggaatgggggtagttcgctctattgagcatgtttctgtcggagaagctgactgccccactcttgaagttaaaattgttgattgtggggagcttcctgaaggtgctgatgatggagttgtaaactttttcaaagatggtgatacgtacccagattggcccaatgatcttgaagagaagcctgctgaggtttcatggtggatggatgctgtggagtctgctaaagcttatgggaatgacaatttcaagaaacaggactacaaggcagctctcagaaagtacaggaaagctctgcgctacttggatctttgctgggagaaagaagagatagatgaagataagagcacagcactgcggaagaccaagtcaataatactcactaatagctccgcatgcaaattaaagttaggagattcaagtggggctttattagacgcagattttgcactgcgtgaaagggagggaaatgctaaagcttttttccgacaaggacagtgcaggtctgct

SEQ ID NO: 38789 - DNA, 1085 bp, Zea Mays
gagccaactactagcttgtttgttaagccattcacttcccttgtttgttaagagctgagctacatttattctcttcttcttgagcccctggcctccccctcctgccaggctgcgcattctttctccagctctctgataagctagccagcgtcgtcgtcgtgtcttgttagttattagctctatctcgccgccctgcagctgctgatcgagtgagggaattcagcagcagcagcagcaggtagcatagcatagatatgacggcggcggaggtggaggccgccaaggacatcgccgaggagaaggccgtcgtgccgttgccaccgtcgcccgccaagccggccgacgacgactccaaggccatcgtcgctcttgtcgtcaaggctattattggaggctcaactgaaagagatgcttacctcgccaagatcgtgtccgagaagaggctgagtctgatcaccgcctgggaggagagccagaaggcgagagccgacaacagggctgccaagaagcttgccttcatcacgtcctgggagaacgccaagaaagcggagatggaggcggagctcagaaagatcgaggagcaactgcagaagaagaaggcggcgtacgaggagaagctcaagaacaagctggcgatgctgcacaggacggcggaggagaggagggcgcagacggaggccaggcgcggcgaggagaccatcctggcggaggagatggccgccaagtaccgcgccaagggcgagggccccaccaagctctttggcctcttgaaagcgtgacctctgctatggagaatgccctgtttcgtgcgtgtattaatttcgtattctcaacaagtgcacttggtgtgtgtgctgtttgttattttctctcttgtattccaaggcttgcttgacaatatctgttgtattgtatttgtataggagtgcagtgcagtgcagtgctattctttcttctcgcttctcttttgatgattggcaaccgccttcttctctgctgcattttcttcgtttgatggacggaaacaaaacgtactctctcgacacacaccctgtttctccacgctggaatctgattgtataggt

SEQ ID NO: 38790 - DNA, 1517 bp, Zea Mays
ggtctatcagtcatcctggtccttttattttctttcttctctcacccggttcttcctcctcccgagtcccgaactctcgatccactcatccgctgagggcgtcggccttctggcccttctccccccggccgacctcgcccctccggcgctccgtccgcttcctgaactcgtctccctcacggacgttctcctccctccgctcgccgcgccgcaacccggagaggagaccgccgctcggtcgagcaccacctggggcccagcgtcctcgcgaccagctctagcgcggcgtccgccctctgcagccctggtgtccccgcgactggcttcggccggcacacaactccacagttaggtctccgtctgcacagcgcggcgatcttctctctccttcccgccctctgcagtccctctcagtccctctccgtctgcttgattctgctccaacctcagactaccctcgctctgaaaatgtcattacgcacccaatgcgcttgtagctgtatgctgcaaccctactctgcctcgtcttcttccatcaccctaagcatgcgcgcaacccccactcaccaacgacgggcccggccgccgccgccgtcctgcctcgccacccgccaccttcgccggcgacgagcaccagcaggaattaatagagttccaaacctcggttctgcagtttctactaaaaaagcagggatgagtaaggatacatttattaatttggacgtctctcatcacagagcggttgcagtggtgaggttgctaagaatcgagaaggggaaagcatttgtagaccttttgaacgagaaagcaaatgattctggagataaagagataggatatgtgcagaggacactaggtttcagcacacgctatttggaggacagggatataagactggttaccgtcatagttgctggaacagtgcgctggaaacgctaccttgattatctaatcatgtcactatgcagtgaggagaaggttttcagggagatggagccactgcttctacagatattgagaattggctttttcgaaattctcaagcttgatgtacctgcttatgctgccgttgatgagaatgtaaggcttgctaaagtagctttaaggcctggtgctgggaatatggtgaatgcaattctgcgtaaacttgtattgctaaaggagacagactctcttcctcttccaaagatagaaggtgatgatcgtgcccaagctcgtgctctttctataatttattctcatcctgtttggatggtgagacgatggatacggtttcatggaaaagatgaagctctaagattgatgaattggaacaacagtgatcctcatttcagtctaagggtgaacacatcaaaaggctatactagggctgaccttgtaaaacgattggaaagtttacaggttcattatgaagaatcaattatggatgaatttgttcgcattcgggaagggatgcagtgcactcacattttgaatggtagaagatttacctggtccaatcagaggatagttcccac

SEQ ID NO: 38791 - DNA, 1182 bp, Zea Mays
gagagagagagagagagagagagagagagagagagagagtggagtggctgggcgttggggagagggcagagggagctgcgcgcgtagaactccacggctgggcgcagagaacggcgatggagagctcagtagagggatctccgagcagggcgagtgtcatggcagtaggcccgggcgggaggcatgtgccaccagtgcacaagaacagggccccctccctccaagggcccctaaaataatagttagtgataatttaatcaatacaaattttagtaatgattagaaagtctagctaaagtcagctcgataaaaataaaacatagtgtttgtcgtaacaagcgagtatcaatctctcataaaacttattttggctatatgacgaagtgtagctagcacatgctggcataatatccaaacgttaagatcattcattaccgttattaagccattttctacattaataattcaatcactgttaataaatgagattaatttgtatcatctattcttaacaaagaaaaaaagaaaaaaaatcggtacagggccttcaattatgaaggcccggcgctgcatggcaggcggccgatcagagaaccggcaggggcgcgcaggcacatgggcacgcggcgctgggaggagggagctccgcgagcgggatccaagcagggagccggcagcgcgtaggagctacagagaccggcaccgagggagaagacaggagcagggaaggcacagatgcgtgtgcagagagctcgacgatggccgtcagagggagctgggggccgccatggatgcagggcgcggtgaaatcgaagctgcgcgccatggagagagagagggagagaaaagcagggagggagccgaccgtgggagatgggagagacgcagggaactccacggcgcactgaagctccagaagatgagcgcgccggcttgaggagagccgcagggcacgagcaggaagaagaagctgggcgcagtggagaagaagactacgcgcgcgttaaaaaggaacatggggcggcggaatttttctgcagacctgagcggctgaagataggactgtaggatatttctgaaatgcaaatcaacggtggatgaggctaaagaaaaatatctgtgacaacaaaaatcatgtgctcggcaagaaacagagggagtccgtggtgaggaaatagaaac

SEQ ID NO: 38792 - DNA, 2876 bp, Zea Mays
acaacagcgacggaccaagaaatgccggggcgacaaggcatggagccggcctctgctgcggcgcgggcgccaaggccgccgagcttcgcgtcgcagaccaatgccctcctgcgcaaaaacctcatcttccagaaacgtaacaggaagggaaccattcggctaatcatagttcccatatacctctgcctcataatcagcgtccttcaaagggtcatcaacagcttcctagacaagccaaagttcaggtgtggttgcaagtgcatcgacgatgccaacggcagcacagccccctgccagaacgtgtgtggaatccagtactccacgctggatcaggcgcctagttgccccattccaaatcctccgaaatggcctgccctcgtgcaagtacccctcccggagtatcgcgccgtgcaggactcctcaggcttgtttacaggcttccctgacgcatcatgcagaaagacacaatcttgccctgccagtataccctttgctggagcaaatacaactctatctaatagtatcatgcagaacctgctcacaagctcaccactcttaaatctttctgattacacgagcatatcaagtcttttgcttggtacagatgttccaggatcttctacgggattcgttgaacctgcttttatctcggctcgacccatatatgttcttcaaccacagtgcaagtccggtgattcagttacaatcccaattaccgtcggttctgttaatgcccagaaagagataaaatgtgttcaaggtttacccttgtggcggaacagttcaataacaattaatgaggaaacatttcggggctaccgaaaagggaaaactgctaaagggataaatgaaattgcgatgggctatgattttcaagactcaaacgagaatcattttaatgtccttactttgtataactcaacgtatgagaatgcctctttcattccaatgccatttgcacttctgcgcattccacactcattgaatgcggtatcaaacgcctatctccaactaatacaaggttcgggtgtaaaaatgttgctcgacttcacaaaagaaatgcctaagcaagccacccgtctgacatttgatttttctgctgtggctggtgtgaactttttcaagataaacgactacagtatacagtttgttttctttttcagcttcattaatctgcagattgtactggccttcctagcctcatcattcttttcgaaagttaacactgctcaggcaattgcgtacctgtacatatttgggtcagggttgatggctggatatcttattcgcaattttattgaaggggggaaattcccaagacactggatcacagttctggagataatacctgcattttctttatatcgaggactatatgagcttggccagtatgctgttagatcttcagaaacaggaagccctggcatgcgatggagtgatttaaatgaccacatgaatggcatgagagatgtgttaatcataattattttggaatggttggttttgcttcctgtcgcatattatttcgactatgcttcttcagttggacacagatctagtcccctttctataatcaaacatctcttaaagaaggaccccacctggagaaggataactgctaatgaaatagatggtaaggatgttcacatagagatggagaaggtagacattatcaaagaaagagaggctgttgatcaagtgctacagcagcaacaaactagtggctatgctgtagtctgtgatgacctaagaaaagtatatcatggaaaagatggtaatcctgataagtttgcagttcaaggagtatcacttgctttgccttatggagagtgccttggtattcttggtcctaatggcgctggcaaaagctcttttattagcatgatgattgggtttgtaaagccaacatcagggaacgcttttgtacgggggttcagcatacaaaatgacatggaaaagatatacagcagcatgggagtttgcccacagaatgatatgctttgggagacactaactggtagggaacatctccagttttatggccgactgaagggcctcagtggttcatccttggatcttgttgtcgatgagtccttaaggagtgtaaatttgcttcatgggggtgctcctgataagcaagtgaagaagtacagtggtggcatgaggaggcgccttagtgtcgccatctcgttgatcggagatgctaaagttgtgtacatggatgagccaagcaccggattagacccagcttcgaggaagagtctctggagcgctgtgaagcaagcaaagcaggatagagcaatcattctcaccacgcattccatggaagaagctgaaactctttgtgacagactgtgtatcatggtcgatggaaagctccagtgcataggcactcccaaagagctcatagctagatacggagggtactacgtgctgacgatgacgacactgccggagttcgaacaagaggtcgaagatctggtgcgcaggctctcgccaagctccaggaaggtgtaccatctgtcggggacgcagaagcacgagctgccgaagcaggaagcgaggatctcagacgtgttcatggccgtagagagcttcaagaagagggtggaagtccaggcctggggcctcgcggacaccaccatggaggacgtgttcgtcaaggtcgccaaaggggcccagtccagcgaagaactctcctagagtcgtagtctacatgtaatggtgcaagggcaagggcctgctgttgatgctaggtgtatatatatgtacagcacgtaaaattttcttccgttgcaaagcaaatggtttggtttgctcacctttgattttggaattttgataacaaagattatttgattgaattgattgttttt

SEQ ID NO: 38793 - DNA, 959 bp, Zea Mays
tgtgaagtgcttgatgtattgcataggagaaggttacattacatatatatagagacccaaggaaccctaaccctaatgggctggcagcctagcagcggtgccagccccgtctacggatagtcggatacatataggaacacacactctaacacttctcagtcaagattgaagaacatctgtgttcgagttatgaatattacgagcccaaggaaattctactctgattaaatggggtatttttccagcaggatctgataatgctatgtccaacgcaacagcgatgggtatcatctatcggttaactcagcatcatgttcagttgcctgaaaatcttggcaattatcaattgctcgagtggaatgtgcagcccttgtcaagaaggtcatggtttcaagagcatgcagtttctatattgcttgggattttattagctattttggtcactttgtcagcctttttagtagtacttatttggagaaaaaaatttagtggtcaaactgcctacagacctgttgattcagtggttcccgagcaagaactccagccactataattcaaagctgtttggcggagcaacatatatatgattctttggtagagatacccttgtgcggggttacatatcacagcggcacgcatctgctgctggagtaagcccttctttgtatgtaacacaagctagaagcttacagaagaagcacattatgattacgtgacttcattcaaaacttagaagtgttgttcataaactgtctagtgattcagatcaagagctcctctcttatgcttacagtagaaggttctgttcatgtaatgtagattaagtaggggtagagaagagactaagcacacctgtggaacgaaacgatgtaatatctatttgataagtgctgagggtatttggcttcttaaaaggttttcagggcatgattgattctcttgcctactattaagaaagt

SEQ ID NO: 38794 - DNA, 1833 bp, Zea Mays
aaattagcacaaagcgtcccaaaggaccgaactgtaaattcttaaaatcacgtgcgttcttcagtgttagttctccaccctctccttggcggaaaaccctaaccccctttctcggcgacgatccgacccctaccccatctcccggccgaccccacggcgctctccgccatgccggacgtgcaacctctcgtcagcgacttcgtcctcaagctcaagcgccggaaggtggaggggtcgcacgcggtggcccggcagacggcggagctgctacggtcggttgtgtcgcagcatcggatgggtagcagcgccaaccaggcggccacacttgccgatgccgtacgggctgtgggggagcagctcattgccgccaatcccattgagcttgctgttggaaacattgtgagacgtgttttgcatataataaaggaggaagatatatcttccacagcagttggtatcgaaggtctttctgttactgttgacagtgatgatgaatatgacagcgaacatgatgatcgccctgcattatctgctgctgttcttgctgcacatgctagaaatgcccttcgtgcaccttcattgcagactctgctagaagacattcctcagctggagataagagctcaactagaaaactgaagcatgatgtcatcgcagccattggtgatcttattgatgagattgactcatgctatgagccgatttctgagcaagctgtggaacttattcaccaaaatgaggtaatcctaactctaggtcgttctagaaccgtcaaggagttcctgtatgccgcgaaagaaaagaaacgatcttttcgtgtatttgttgctgaaggtgctccaagatatcagggccatgttctcgcaaaagagctggttgagaaaggtgtacaaactacagttataacagattcagcagtttttgctatgatatctcgagttaacatggtcatcgttggagcgcatgctatcatggcaaatggtggagtcattgcaccagtagggatgaacatggttgcacttgctgctcaaaggcatgctgtgccttttgttgtggttgctggtagtcacaagctgtgtccgttgtatccacacaatccagaagtgttgttgaatgaactcaaatcgccgtctgatttgctcgattttggcgagttctcagattgcatgaatttcagtactcaggatggcagccccttgttaaatgttgtcaacccaacatttgactatgtgccaccgaagcttgtgagcctattcatcactgacactgggggacacagtccatcttatatgtatcggcttattgctgagtattactcagctgatgacctggtagtgagacggaaggcaacatcttgaaggaagacaaaagcgctgcgaagtctccttggtgttctgatcataggatttgcgatcttattggaatcctagtgttcttgtactcgtcatgatctgttgcctgtagagcggtgctgctgtgataagtggaatcacctgtttgtggatccagttactgtcaaactgcaggaaatcgatgcaagcattctcgcgcatcgttgtaaccatggcggcattttaagtataaactgttgaggaatggagcgttacgtcatggaagaattgtttcactataggagaggttcaaatatatgattgactggttgtgtagagggtgtctgtttcttttctggtcataggttaatctgggccttggctggtccaaattttgaatgttataaactccagcaagctgttcgatatgtctatgaagtgttaccatgcacactgatgggtatttgctgagccattttgttttctatatctatcgtatata

SEQ ID NO: 38795 - DNA, 2595 bp, Zea Mays
atggaggtgagagtgtgggcactgaagaggggtgcaaagtatcgcatgaagctgaagccgaaagccgagctagaagctgaagcattacacaaaatcagaagtgctggtccgagaaaccgcaatacaatttctcaagctgagactggaagtgcaaaacagagaaaaaggagttgggattttaaaaatcatgagcgtgttgctttcatggcatgaccacacgagggagctgcaacggtaccaaccaagaagggaaaggtgcagacgagggggaacctaagctagaaaccaatagtggcaattattgttcggaggccatcgccgctggtgggcggtggcttccccttcccctgtattagcagcgaggaggcagcagctgaagctctcgtctctgcctctccggacctccggtgaactccaacagagaccacctcctccatccgtcggtcatccatctgtgattccttttgcgtgtgcaagttgttaaatcggcacacggcctccgcttttggagtggagaggggcatatacggtttactggtgcgcccggggccgccgcttttcccgctggcctctccccggccgtcccattggagcgcgcaaagctgggcggcaccatttaaagaagcaaactgcactccaccattagcagcaccaaggcaccaccaccaagcgcaccgccacgccacacgatctataacgcgcaggcaggcgaggatcagaccggccggagcttgccttctccgttggggttcctgcttgccgcggcgcgagaacagatatattggatcggatttgtgccgggttcttggagcagtaggcaccaaactggtccaggttgggcaaaaatgcagtttaaccagtagctaacggagctctctcatcttgtactgtggcatttcttaagttgtctggaagctgaatctccaaggctggaagatccaacatctgttcttgaaaatttactgtacctgcaaatggcagacgatcctaacatgaattttggggcattctcccagtcactctgcaaccagcatgtagtttcatttcagacaagcgtagccactagcggctcaggaggcatgccaacatacctggattgttccactgggatggatgccagcgtggggatgctgaccacaccttcagtggttgtttccactggttcatctaatatgccagcagattccgggcagagcctcaaatatggagggccactggctgcggattggacacaggtcgagcttgaaattctgagagatggcatggagaaatatgttcatgaacaaggcatcatgaagtatataaagatagcagcatcgttaccgaacaagacagtaagagatgtcgcaatgaggtgccagtgggtagggaagaaagtaaatacaagacgaaggaaaccccaagaacaccatactgggagaaatacaaaagaaagaaaggataaatttgtagagcctgcgctgtggggaacaaatcatcctcttcaaacaggcatgacagcctcttcatttgtgccgcataatggccaaaacgctatgtttatatctggaggatatataaatactgctgccaatactagagtgactgaactacttcattttattaatgactccattgccaagtttatcgcagcctcagagatagatcgtccagtgctgcatctgctggaggaaaataataggcttcttaatcaaatcgaaacaaatattcagagatttcagcctcataacaacatcgatctcttccatcgggcaagaaggaacattaatgatcttgtacaaatcacgacccaactgcctgggctgaggaccaagatgcctccacttactgtggcaatagatgaaaatcttgctagcttcgtgcttcctggcattacaatggatcaagttcttggaagcaacgatttgaaggaggagccaagaggatggtagatccactgccagcatgtttcagtttattggtagatggatggaccatatggagaactactgcttcattttgcacaccaagtggcggtgaatagggtcaccattcaccaaggaccccctgctttctctatctgaaagcgaaaggagaggtggatgaaaccgttcagctgccctgcagctacccttagacgttggtggctacacagcgagggttttaggaactgcagtttttgtggccttgctgcacctgtaaaaaactgtgattctttctggtttccccttcagacagtagggtaaatagatgtagcggaggaagctcacaagaactagctaaatagttctctctagaagaaaaaaaatgtcgctacatagcaagaaggatcctttttgcctgtcgccatttgctgctagttcttccttcatgtgaacgtgatctaagttcctagttctctcttatccgtgctccgcctttgtatccacgaactggaaatatagatttctgagtatcctacgtgatcttggagaaaatctcgtcgagagcggagacgatgttgccgtagtgctcctgcacctggagcgcgtccttgtctctggcggcgtaatccagctgcggtcaagagcagaacacacgatgagcgttgagcaagcgcactatgccattgcccac

SEQ ID NO: 38796 - DNA, 886 bp, Zea Mays
gccgaagcagcagcactggagccaactcaaagccctcccatctctgcagaagatggaaccgtggatggagggagcattcctgcggcggatggagcagcgggcctaactgcagagttttgaagctttgaaccccagggcggttactgttgtcgtagaccccatatagagtgtgaaggggaaagtagttattgatgtattccgcctaattaatcctcagaccatgatgcttggccaggagccacggcagacgacatcaaaggtcgggcacctaaataactcatcgattcaggctcttatccatgggctgaacagacactactaatttgcaatcaattaccgcaaaaatgagctcgagaagaaaatgttgttgaacttgcacaaaaagaaatggatagatgggctaattttgaagaggtttgacactcactcaaaaaaccaacgagcaaactgtccaggttccatccgtcttgtatgggaatgaccattgagcaagccaaaaaattacatgtgctcggattgtgctaaagaaaatggtgcaaagagaccctcaaactcatacccagtttcaccaaactctgattctaagatatggacctcggtggttttctccacgttaggaaagctggaagagtcttttctactcagttttatgataacagtggtgttatggtcaaacaaagtcttgcgtgtatgtaccaacagctaaactgtaaacacgacattaccatagttgattacatgaataattatcttttatatcttattgtaaaatctgaaacagttgtcatgtagatggttagcttgcattttacgctacaattacttcaaatcacttcttgtttcattttacaccaatttacgacatttattgatgcgttttacgtca

SEQ ID NO: 38797 - DNA, 1217 bp, Zea Mays
tttttaagttatttcagggtgggtgatcatcacctgggggctggggtgacaaatagcgctgccctataaacacacaagctgcaacactgtttattctgaaatgtctagcattcaagctgcaacatcctatcacttgatgacagaatctaagtgtactgaacttcatgtagtcttgttggatatattttcttgctcctggtgctaacccagcattattttgcatgttcatgtggatcatgtaacttggcacatgaaggcttttttaacttggttgcgactgcagccttgttcctggcagcaaaggcagaagaaacagcatgccttttgaatactgttcttagggcttcatgtgaggtttctcaaaatcaggaattcaatcttcttccttacatgctatgtggtgtaagcatactttatcgatcaggactggtttgaacagtacagagagagtgtaatacaagcggagcaaatgatacttacaacacttgattttgaactcgaagtagcccacccatatgcttccctatcctctgctttgggcaaactaggactcacacatactgttctgtttaatgtggcttggaatctgatcaatgaagggctacgaagttcactttggcttcagttcaagccccatcatattgctgctggagctgcattccttgctgcaaagttcctccactatgacatcacattccatccaaatttctggcatgaattcaagacaagtccatatattgttcaagatgttgtccagcagttgaaggagctactttaggatacaacattcaatgtatttacataatactcagagatcctcttggtttatacgctgtagtgagtagtgatcactgccaaaagtacgtacacattagcatgtggtcactttcatcaattactgaacatctttcatgtaggtttttacaaccacagtgctatgtacaaaaggggaagatgttattcaaaagttgcccttttagttttggggaggtaaaagcaaacaatctttagaagagatgtgacgaacaacaagagataaaaaaggcaaaaaggtgtaagagatgtaaaaagttgatgaaatgttggatcccttaattggttgtccggttgtgattatctgatatatatagaggatggtttatcccaacaataaacgagtcgaaatcgtaaccttcacattatctttagtccaaaattgatttaaaaaccgatctaga

SEQ ID NO: 38798 - DNA, 4197 bp, Zea Mays
accacggcatccaccattccagctccaggccaggagaaaacgttccgggactgggactgcgttcaccttgctttttcttcccacgctcaccccgcaccgcgtgccctctctggctctctccctctcgtggggacgactgggcgaccgccgccgccgccgccttacgccaggtgcccaggtcttagtcggccccttcgccggcgacgaggacctaccagctgtgaataaggttgtctggaacggccgtgggctctgcggatggcaggttctgtggtaacggatgattcagctgctagcacaactggaatgagggatgatgaaaacagtctctctggcgagtccttctctgagtggaggtcctgtgatagggcagacagcgataccccttcaacatccccacccttctgggatagcgatggtgatgatgatgatcctggcccaaagccttcagaattgtttggacatcacacttggaggattgaaaacttctcaaaggagaagaaaagagaaatgaaaagtgagccatttgaagctggtggttacaaatggtatattcttgtataccctcaaggatgtgatgtctctaatcatctttcattattcctttgcgttgctaatcatgacaaacttctcccaggatggagtcattttgcacagttcactatagctgtagccaatatagatcctaaaaagatgaagtactcaggttttggaagaaggaacatgattggggatggaaaaagtttatggagctgtcaaagattcaggatggttttcttgttgacgatgttcttgaaatcatagctcaagttcaggtcatcagggagaaagtggatagaccttttcgttgccttgatcgtccttatcggagagaattaatccgcatctatatgacaaatgtggaacaaatctaccgacgtttcgttgaggagcgaagaagtaaattaagcaagctcattgaggacaaaatgaaatggtccagtttccgtgctttctggtcagcaattgacccaaacaccaggcatcacatgtccagggaaaagactgagactatattgaaaattttagtgaagcaattctttgtagagaaagaagttacttccacattagtgatggactctttgtatacaagtctgaaggcacttgaataccggatgaagagcaagaaatgcaaaacaaaattagcagatttggaagaactacctgcgcctatggtccatgttgacatggacatgtttgttttggctgatgatgttatagctttgcttgagagggcagccttagaacccttgccttgtcaacctgtagcccccaaggatgacaaaacttcccaaagccgcatgaaggatggaagttctggcgaggtttacaaagtttctatggagcgtgaggaaagacgcctaactgagcttgctcagaagatactagagacatttgtgctatctcatatatttagcggaattgaagttgcataccaagaagctgttgctttgaaaaggcaagaagagcttattcgtgaagaggaggaggaggctggacttcttgaacatcagatgaaggggaagcgtggtggtggtgcaaatgaaaaggacaagcgtgccaagaaaaagcagaccaagcaaaagaagaacaaccgtaaggctaaagacaaggaaagagatgtgaaatgtgaggttaaaattctggaaaggcttcatgatgaaactgttattgataacagtgatggcttaccagctaaggtggaagtgatagccaaggttgatgccttggaagaaggttcttcagatgggtcagacatgccaaataggtggttcaggccgcaatagttctggctgctgcacagctccaaaactggatcaggatactgttctgcttaccttgagagataaacttcgtaagctagggcagcgtctgcaagagaaaaacattgaggggcagaaacttctcaaagctcattttgaagctagggacacaaaagtgaaggtagaagaatcttctgactcatctaattctttggataggccacctgatgttccagagagctcgatgcattcttcagaagatacagttgatcttaaagttaatggaacaccaaataaggatgcctctgtggtcaaccctgtcctggaggaatctgtttcaggcataccagtcactgcaaagaatgaatccttgccttctgccagaacaaaagaaggcccagtttcaaacaaagataacgcatcaagtttgaaaatgaaaaccatggcatcttgcttgaaattgcatccagctgatgtggataaagatgccccttttccttctaaatcaccacgaatcaatagggctgctccagttccctcgaagttaccttcggctgataaagctactccagttcttccaaaatcatctctgtcagtaaacaaagcagctctggtccgtcccaaatctccagcagttgacaaagcaactccagtttgtcctgaatctccagcagttgacaaagtaactccagttcgtcccagatctccagcagttgacaaagcaactccagttcgttctcaatctccagcagttgacaaagctactcatgtttgccctcaatctccatcagttgacaaggcaactccatccattgacaaagcaactccagttcgcccaaaatctccagccatagataaagtaactccaattcctcccaaatctccaccagttgacaaagcctctccagcaccaccaaaatcactatcaggtgctaaagatgtgcctgttccttcaaggtcgctgcaaattgataggttcattccagcccccccaagattatcgcaagttgataaagctgctctgccttcttcagaacagccacatatatctccagctactaattctgaagcccaaggggcaactacttctaggaaggtcacagccagctcagttttggaggttgctgcagcatcgaggccttcaagtgctcctgtgttacccacaccaagatcaactgcaccagttgcttcacatattcaaacttccacgttgctttcccgctcgatgagtgaggcagctgggagaaggtcagtaaatgatccttccttttctgccccatcttatactccccagacctaccgaaatgcaataattggtaagactggtctggctactacctctgcaaaccttgcatatcagtcctattctctgggtcaagatactgctccttcacagcctctatcagcatatgcatcaagcacagcagtcatgatgcctcctgctggaagatctgatcaatcatcagctaggcatggattcaagtctgggtctggtaagctagaagcacatgacagctggcagcagtggaaaggtgataataatgttgatatgcatctctggagggatcacactacctatcaacaaatgaccaggggtcaagcgtatgaccaatctcggagggacgatacttatcagcaaacatgcagcagaggaacagaaaagttcagcaggcacgcaggactgcaagctaggcagttccaaaccgagacacccgccagccatgtctggcaccaacaacaggggcaagtggcagaagagtttccacaccttgacatcataaacgatttgcttgaggaggaccagatcaacggcagtataccagagtcatttcatcaagattacaatgtgtttggcctgccattttcaccaagaggaaacgtgtcagatatgggaatggcttctgttagaagtcctgctcggttcaattcaaccaagtatgagtatgacggtggattctcgggggcttatgacataaatgcggtcaatgggttgagggaacggcagtttccctcgttggatagttactctaatggcctgtctgacgtgagtgcatcaaagccttggctgaatggctctcccagtccatcggtgatgagccttggggttaacacaaatggataccacccccaggttgcggactaccccagtctgggaaatggggtgaacggagtctccttgtggcgccgccatgctaacgggcgctggtaatgcgaggtgcctgtatacaatcatacagatggaataatgtttgttgtaacaaatggtttcgggcctgagctgatgtgccatgtaattaaaagttttaagttttaaaagggaaagaaagcgatacatgctgcaaaatctgccccgtgatttggttaatttgattgcttttctggttaaactctgttc

SEQ ID NO: 38799 - DNA, 5252 bp, Zea Mays
aaaagaagcacatatgccatttgtctcatgcattatcaagtgacgatatatccttaatgcccctatgtcctaataaaaatatggagccaaatgatgaatcggcaccaaattatcaaaataccttatgatctgctgaaaaactatggaattcacatctttgacttcaatgacttgtatactttgacattgattttggatttctatggcaaaatactttatgatcagctggcaagctaaggaattcacatccctgatttgtatacttgacattgattttggatttacatggcaacataatttctccatctcttatgtcataaatgactgactaatgttgcaaagaatggattttaattgttaccgttttcacatgaaaattccctgttgcattgtgggtacttttgaagaagccacagacattgaagaatcctttgttcaacacagttatagagaaaaaattggtacgccatataggaaagggacatggcagaattttcaccttagtcatatcttgtatctttgatctgctcttcatatttacatttatatccatggttgaagttcattataaagtgtacgaggatgaaataatgaccactggccagtgtttgtctgaaatgaattcccaatctttctagttcactgggtggtgctatatctgatgaaacagtctggaaggatgatgattggttagccaagccaaaggttacttgcatgcgtgccttttctgatctgcaacattcacaatctgtactgtgtactccatgcccactagtatttaactacatgaaatcaccggcatttgtcatcatttatctggatgacctttgttctatagagacctgtgagaaccacataatgccatagaggtaatgtcgttccagagtttagccagagtttttagcaacagcaaaacccaaaacccatatgtaggatatttagaaacacggatggggaaatcaacatatattttattaatcatctacttccatgtgatgtagaagttcccttgcagttcctctctctctctctctcagaccaagagtcaaataagagcttacaacaaattaatggttgcaatgaagtttaacagttcagttatgaaggcctgaagattactgttgattgaagcaacactgttacttgacagcttcttctgttgcttgtgtttgcgctccattaaaatttggcattctttgacttgcctatatatttctttaattcaagtaaaagtagactatatgccccctcgttgaacagataagatgactgcatatcgttttattaagaagaaaggtctgaaacaggaagaaatcccaaaccacattcacacccacaacactctagaagactagaacatactttttctctctcgaaaacacaggagagctgcgcttcattatttaagaagcagcaaacaaggtcccaaaatgggccagcacaaagggtggcactttacagtagccagcacctgacatagacaaacttatccataaaaacacgtcacagcactcaaacacctaaatcaggcccatatcccggctaactcagtagccccagcaagggccaattcctggcatcctctccgatatctcgcagcacctgggacacatccgccacgccttcttcgaagatagtaattgcgatgtttccacaaccaccaagccactaaaatcaccacagaattgaactcatttccctgcggtttggggactcttctctctgcttgattccaccaatcctgaaaattgacctccctgggcattgggctaaggtgctgtaagttgattagagaaagaacttgaaaccagacctgtctaccaaacgcacaggccaccaacaaatgctgaactgtttcctctttctgatcacataacaggcaaagttcaagatgctcaagtcctcttctagcaagccagtccacagtccagcacctattgaggctcgcaagccaaatgaaaaacttacatttcggagggccccaggttttccaaacccttttagccggtttaaaggctactgaccctacgaagaacctttcatatgctgacttggaagagtagcacctggaagcagaaggggtccaaagatgcacgtcttgtacacccggagccaaattgaactcatttaggatgacctagagctgtagaaattccatctacgtttgagcattactgcacctcttatatgtctgacaccaacaaccattgttcatagtgtcctgtactgtttgtatctgctgaaccttactggggatgagcttgataagagagggtgccaagaccgacaaggattgcccatggagccacctgccataccaaaacgtgctgctagcaccatctcccaccgcagttacaagcgaagcagtgaacatagcaagaccagaacatactgaaaagaaagaccaaaagcaacatgaccaaaactaccacactattgcctgtgcccctcctaaaggtctcccaataagcttcaggaggccctttgctctagctgagtaccaaaggatgcactcataagttacagcttgcaacaccgttgtaaggcttggagtagagccgttaaaaacacagttgtcctgtcccaagccaccaatattgccagtgaattgaaccccttctgtagtccattgttacctctttaactgcctggtaggctggtaccactagcttgagaatctatgggttgatggttgggctgcaatggagacaaaagcaattttctgcaacctgcaaaatggtgaactagattttccaggcgaaaacacatgaaatcaataggtgctgtgtggtcttctcttcttcatcagaaggggcaagcagctgggtgggaagtcctcttttagtgatccggtccgcatttcaagaacggttctttactgcaagccaaatggagagcttgcagcaaagaggagcccaggacttccaaattcgtttccatggagcaaagcggatggaactaaggaaaaaggtattgtaggccgactttgctagagtaagaatcgttcctagtaagcctccaaacaagctgatcagcatcattctgcttcagcgagaaaccttccatcaagtctcataagcggagatattatgtaagaacctggacagagagctcctcttatgtcagctacccaacgatgggggtacatcacttgatgatcctcttgaattccctagttgatcatttttcagtttattgccaaatctagctgtgttcttgtggctgtgaaattatatctcccatgctgatacttgattcccttatctttgcttcattactacaccacagtaatttggatctgccattatgttactatgtaactctcatttgatatcaatcacagctgccacatacaaaatacaagctgcagcacgtgtaatccgcatcggttcaagaacagatttcatgcttggtgatattttgcatcctgcgataaattgggctgataaagagtctcatctggatcctgatgaaatggccaagatgaagtctgcttttattggtaacctgccagaagatgttaatgaggagtacttgagaaagctttttggacagttcggtgaggtagtacgggttgctatctcaagaaaaggacaatgtccagttgcttttgttcacttcgccaaacgttcagagcttgagaatgctatagaagaaatggatggtaaaacggtgagaggacctggtcgagggccgtctttcaagatccaggtgtcagttgctcgacctacggcagacaacgacaagaagcgatctcgtgaagaagtgagaactagaagatcaaatgcatcaggagataggcgagattattctcatggaagatatggacacgattcacttgatcgtcaagtgaaagctccaagattatctaattatgtggccgatgctgctgacccctatgaatcagctgttaattcattaccttcagctgtcaaggaagtcttgcttcgaattctacgtctaagaattggtactcgatatgattttttgatatcaggtggagacaaacacaacaaaggagattattttgcatcgttggttgctaaggctgagacctttggcttaacacatgcattacacggtaccacttatttgtcaagaaatccggaaatgcatagcaagcgatacccacatgaagattatgattttgtgacacccagtaggtacgattcgtcagcccatcatccttcaacatactacgaagacgatccaccagtgtctgagtcaagggttagaagatatgctgaagaaaggtccaccattgtaagaagcccagaaccacgtccgcgatatgacgaaacagacataagaataaacccagaaccaagattaccatatgaatcaagacacaacgccgaaaagcatctcgatcgaagatacatacaagagcatagttcaaatattgaaagaccagctgaagaagctctcctttctagggaaaggagatttctgcctgctgcagggtacatgccgaacccaggcggctcggatttccgctccaggtcgcccgccgaatattcagcacaacgccaacaaatgaggtttgatccattcacaggtgaaccttacaagtttgatcccttcacaggggagcccatcaggccagatccgaaccagcgccgctcaggaagcctgtactgatcagattagttggagcgatatgccagataagaccctgaaacaaagctagatctggataactcttcttcttgtctgccaagtgtctctgtgattttgcttgtgggctacagatcatgtaccccgagcaccatgtgtgatccagtcggactaatcatttcggcattgaaaagtcggactaactttttttgtgcccataacgctacgtattgtttggtagattaattaaaaattcatccggtgaaaagcaattttctggtatttttctggaggtgcagtaggcgtggtaatgcagaatttcaactgctacgtacactgcaagcgctgttttacccgattcgtctttacgtgttgccaaatgtttcattgacttcatagaactgatttcgactactttggatgctgagcaagggaccatgcctttctcacatatactcatctggagaatgtcaagcaagacggcccatctggacacatggcaagaagagataaactagctagctgcctcccaatgatgctactaccttctcttcgactgcttcaacgttcacatgcccctcccttgcatggcgtagtaaactgggttgcttgaaaaaacgccacttctaagcgta

SEQ ID NO: 38800 - DNA, 1776 bp, Zea Mays
tttttttttgagaaggtctctaagaatgtttatgcaatgaaaaagctcaagaaatctgaaatgcttcgtaggggccaggtagaacatgtcaaagctgaaaggaaccttcttgctgaagttgatagtgcttacatagttaagctctattattctttccaagacgaagagttcttatatctcatcatggaataccttcctggtggagacatgatgactttacttatgcgcaaagacacactaacagaagatgaagctagattttatattgcagaaactgtgcttgccatcgagtctattcacaagcacaactatgttcatcgggatatcaaaccagataatcttttgttagatcacagtggtcacctgaagctttctgacttcggtttgtgtaaacctttggacagcagtaatttccctaatttgaatgaaccagattatatgtctggaaaagttaccacacctttgcctgataccactcggttaagcaacccttctgcaccgaggcgtacacagcaggagcaattgtcacactggcaaaagaaccgtcggatgttggcatactcaacagtcggtacacctgattatattgctccagaagtgctactgaagaaaggatatggaacggagtgtgactggtggtcccttggtgctattatgtatgaaatgctagttggttaccctccattttattcagaggacccaatgtctacttgcagaaagattgtgaactggagaagtcacttgaaattccctgaagaggcaaagcttcctcctgaagctaaggctctcatcagcaagcttttgtgtaatgttgagcatcgacttggtacaaaaggagcccatgaaataaaagcgcatccatggttcggaggtgttcagtgggagaagttgtatcagatgaaagctgctttcataccagaagttaatggagagttggatactcagaattttgagaatttcgaggagattggaactcaaattcaaagttcatccaagtcaggcccttggagaaagatgcttccatccaaagatgcaaactttgttgggtatacgtacaagaactttgaaattgtgaatgatgatgaagtggcaggaattgcagagttgaagaaaaagagttccaaaccaaagcgaccaaccatcaagacaatgtttgagaggatggacgaagaggagcctgttcaagggagtttcttaagtatgttgcccccggagggccaaccttcgtcccactccagcgttccacaggaaaaataccaacctcgccgtaaataggatatggaggtttggaaagtaaagcataggaaagtaaaacaagaaaaaaaatcgtctgctgccttttgatctgttccctgtctaggttttgtaaatcctaaccaatgcgttctttagtcaaatgcttaaaaaaatctctccggcaaaatagtgtattgcatttgatgtgaacatcagtgttcggctgtatattgtgtcaccgttctaacttcgaagtgatgcttctcagccatattggcaaaaacttgccataccaggagcaggcaagttgtgctgctgtgggcctgtggcaagcatgggctatgtgtatgacctttagatgtttctttggggtcatggttcataggagcttgatcaacttgcacttgtagcatactccctctatacccaaaagctcctatgaattgagggactgcattcttttcggacagattttgacttacctgggattaaaacccactcaatccctctcaattcatatggattggagttgaatcgaac

SEQ ID NO: 38801 - DNA, 855 bp, Zea Mays
gatcgagaaggcgctactgttttccatgtggaattatccaggtaataaacacaagccgaagaatgcacagtatgcagaagtttgcggatgtcaggtggcactttgtaagaaacaagaatccattatgcattgcagggctatggaatgagttgaaaacaggaaccccacacagcatcaaccagaagagacgcatttcaggcattaaaatagccccagagaacaggtcattggaagaaccttaagcaggcagtccatttgccgcctaatcacagatagcacaagattaacattgcatataaaagttcttgacaacatggtcaattcattcctggtgacatggccatccaacagaagaaaaaaaattgatattgctgatcaacgaaacagttctggacccagattggtcagggaatcagttggtttgtttattctacacctggaagggcatcgaagaaaatctctctttatttctcaccagaatcttcagttgtcagaaggccagctaaagaagggcaaagcttcagatgcatacgcgcataaactaaaagtaaatcatgttcctgtttttgtacaggagaagggatctgattgggcagtggacctggctacctagattttcttgaaatttaagaagcctcagtatcgtgtatttacatgttctttttccagtacgatagatttacttttccgtaaagtggcgtaaaccgtaagtattttttcctcccaacagtcctctcctaacgactaacaaagttcaattcatgcgaaattcggatgtttcattttaaaaaaaggatcttcagtgtgtgaacaaatgtatggatgaatatcactgccctgaagagaccagagaag

SEQ ID NO: 38802 - DNA, 2025 bp, Zea Mays
ggccactcctcatcagccatccccaaaaggccaaaacccgcgcacaccggcgacggcaggagaacctcccgccggccgccgccatgccgccgcctctacaggcccaccgcctactcatctcccaccgccgcctacccactccagctcgccgccggttcaccgccgcctcttccgtccaatccgctcccgccacaaccttggccccgggccccgccacatcctccatcctctccatccgcgagtcgctcctctcaggcgagaggaccgcggcggacatcacctccgagtacctctcccgcctccgccgtaccgagccgaccttgcgcagcttcatccacgtcgcggacgccgccgccgagcgggaggcggaggaactcgaccggaggattgcctccggggagaaggatgcggtgggtccgctcgctggagtgctggtgggagtgaaggacaatctttgcacagccaacatgccctccacgggcgggtcgcggatactggacgggtaccggccggcgtacgacgccactgccgtgcggcggctgcgggaggccggcgctattgtgttggggaagacgaacctcgacgaattcggaatggggagcaccaccgagggctccgcgtttcaggtgacaacgaacccgtgggatgattcacgtgtgcctgggggatcctctggtggttctgctgctgcagtatctgctaggcaatgcgtagtgtcactaggtagtgacacaggtggaagtgtgagacaaccagcgtcgttttgcggtgtagtgggattgaagccaacttatggccgggtttctcgttttggtctcatggcctacgcttcatcgctggatgttgtgggatgctttggttcgtcggtttttgacactgcaaccatcttatctgttgttgctggccatgacaagatggacgcaaccagcagttcacaggttgttccagagtacgcatcggagttggtctccctagatttactagaatcgaaaccattaaatggtgtgagaattgggattatacaagaaactcttggagaaggtgttgccagtggagtcgtatcatcaatcaagggtgctgcttcacacctggagcagttgggatctgtggtggaagaggtatggaggacaggtctcggcggatgacttgaatgagctttatggagagtcccgggctaatggttttggtcatgaggtcaaaatgagaattttgatgggaacctatgctctttctgctgggtactatgatgcatactacaaacgagcacaacagtaggtcaggacactggttaagcaaagcttcaaagatgctttggaaagatacgacattctaatctcaccagctgcgccatcagcagcctacaagataggtgaaaagataaatgacccgttagccatgtatgcaggagatatcatgacggtgaatgttaatttggccgggcttcctgcattggttgtgccttgtggatttgttgaaggtggagctgcagggctcccagtgggactccagatgatgggatctccattctgtgaggggaatttgctgagagtaggccacatctttgagcagactctccagaatctcagctttgttccaccgttgttggcagagggccagttgtaacagataatccactcgctgctcaacaagcaattacctgagttacgggttttggggtggctttctgtcattcgcatgcggaggaaattggtagcacgcatgacgcatttagaaaatagaatgttttgctcgtggggtcgctgataattgtgagagagcaacgacacccatgtgatgtacaccagcaaccagcacattgcataccacacagcattttacatgccttcagaatgattgatgattttgtatcaatgctggttttctcaagtgtcaaattttgcatagaaaatattagtgtccctggcagaggtgagtattccagcacctataagcagttgtggccttgtggggatccgatgagaaacagaacagaaagcagagaaacaaaacagaaaggacccattt

SEQ ID NO: 38803 - DNA, 2811 bp, Zea Mays
cgagcgaccctctgcgctcgcgcgaatcccgcccgagatcgccgccgatccgaagcaacggcaccgtgcccctccccctcgcgagatccgcgaccgccccatcccggcgccgcgggatccacgcctccgccctcgcccttccccacccccacccgctaatctcgcggtcgatccgcgcccggtcctgaccccgcctccgtcctcagcaccgccactccgtcccccatcttcggcgccgccgtctcccgctcccctggcacgcattcggggtccttgcgggcgacaagcacctccgtcccggaggcatctgccgctgcagcatagaccaccatgtcctcgctcggcagcaccgatgttgacgatggcaacgaggaggaggacggctccgcgagcacccccgagatctactgctgccactcccacgcagttcttgctcacgagatctgtgtgcaggttgatgtcctcgtggtgccacgccgacctcgccgccaccaagcgcgccacccatgtcctcaccgacctcgccaaaattggacggatcgaagcaccataataagtgtttagctttcctccgcgcctcgggcggccgcggcacaggcgccgccgcgcccgctcgccgcgaagcacaaggacgagccggaccccgacgacggcaggcagagggtcactgtcttcttcggcacgcaaaccggcaccgctgagggctttgccaagtgcatgactcgtgcccgcgccaggactcgttgccaatattgcactcttagtgcaaagaatagctgagcttgttacagataatatgggtggacctgtcaaagatgctaacgacatgctcacaaggtggctggagaagagtactgagctgagaacatcgctacaaacaagtttgttgcctattggttgcatcaagatagggttatcacatcaccgtgccctacttttcaagatccttgcctatagtgttgggattccatgcaaacttgtcaaagggagcaattatactggtggtgatgacgacgatgctataaacataattaagatggacaatgaaagggagtttttggttgatctgatggctgctcctggtgctcttattccagcagatatcttaagttggaaaggcaattcgttaaattctaatcgaaaactcggcctgaatcgaacagctggatcatcaagtactgttgatgctaatgtggatcctactgtattgccacttgaacctaaaggtggccaactgcctttgttcagcagtggtgattggatgtcagacattgattctggatatgaggcagcagaaattgcagcttctactcaaacctcttcgggtgtcacaccatatctgtgttctgctggaagtgtttttggcagttcatggatgctggttaatcatgaccaatcagatggaccatcaacttctgctggtacatcatcgcagcagaaagttgtacctcaaagcgagcatcagcggaatttaaaccgccttccagatctgcaggaaattccagagtcaaaaaacctttttgctgaccttgttccttctggggataataagtccaagaaaacttcagtaccattcaaaggaccagatcataggaacaatgagttgcaaaagcgcagagagaacattgtccctaatgctggaagaccacatcagcggttagttatgaagaattggtctccttacaatgatgtttccaacaacaaacagtacaattatgtcgaggattcgtttgctcgtagaaatgttggtaataatgctgcaccatcatcatcccagatgccacgaccagccgcaagatctaaccttaattctagattgcataatgatgcatcatatcataattatgatagcattatggctggtacctctgccatgaacattacatctacagctgagaccgggaaggttcctgaaagggttatgcgtggtgatttggacaaaggccaaacaaattatagattggaggatcaacatgtcatagttcaaccaccacagggaagacttccatggggtattcctgcagaaggaagcgttccaatgaatagagttcagagtcaagcaaaacaacacttggaaaacatggatgcaaagcaagaccataagaaattgctccctgatccaaaaaaatctccccttgacaaattcatggacacatcattgccttcaagaaacatggacatgaggtcacagaggcttgacttcgatgatgtctctgagtgcgaaattccttgggaagatcttgtgattggtgaaaggattggcttaggttcatatggagagatttactgtgctgactggaatggaaccgaagtagctgtaaaaaaattcttggatcaagatttttatggcgatgctctggatgagtttaggagtgaagtagattcgaattatgcgtcggctgcgccatccaaatattgttctctttatgggtgctgttacacgccctccgaacttatctattgtatctgaatatattccaaggcggcgaccagaatatgcatcaggcgggaggaatggggcggtcgctggagctgctgctgatccagtttttgatgccggataacgacacacgtcggcaggcggaggagcagatccgacggctggcccgtgacccgcaggtggtccctgcgctcgtccaccatctccgtacggccaagacccccaacgtccgccagctcgccgcggtgctactccgcaagaagatcacctcccactggcccaagcttccccctgactccaaggcatcacttaaacaagcccttatcgattcaatcacactcgaccacagcgctcgatgcgtccgtcgcgag

SEQ ID NO: 38804 - DNA, 1943 bp, Zea Mays
ggcggccggcgccaattaattgtccatcacatattttctcacgtatatacacgtcacctacggcctgatatgacgcagagccttgcagctcatgacgtgtaccgtacgtgtatatccttgccatcgatctcaacgtcttcttcctccacaacgtcaacgtgttgtcctccacacactcgcttgcttggccctgcaggaacagtacacacgctcataatatataacccattccgtttctaaagttgccacgtcgtccagtcctcatcagtggtcctttcgataatggaggtaccagcaccaccagcatgggcgtcccccctcgcgacgacgacgacgatcctgctggtcacggccgccctcgtcctcgtgacgacgaccgtcctccgccggcgtgcccaccgccaccggaaacgacaacgacaagcgccgccgggccctcggccctggccggtgatcggcaacctgaacctgctaggcgcgctgccgcaccgctccatccacgagctctcggcgcggtacggcccgctcatgtcgctccgcttcggctccttccccgtcgtcgtgggctcctccgtcgaggtggccgaggtcgtcctcaggacccaggacctggcgtacctcgaccggccccgcatggcctgcggcaagtacaccgtgtacaactactccggcatgctgtggtcgcactacgggccctactggcgtcagctccgcaagttgtgggtcacggagctgctcagcgcgcgccagctccgcctcacggagcgcgtccgcgcgaggagttcgcgcatgctgcgcgacctgcacccgcacccggtcacagtaccacagcacgcgggtggtgctcagaacgctggtcattacgtgggcgaggacgacgccggcgggccgggcgccgcggccacgcccgaggagttcaggtggatgatcgaggagatcttcttcctcaacggcgcgctgcacgtgggcgacatggtgccgtggctcggctggctcgacgcgcacgggtacgtgggcaggatgaagcggctggcggggaaggcgccgcgttcgtgcccggggacatggtcgacctgctgctgcagctcgccgacgacggcgacggcggcccggggggcctcctcgaggtgccgctcgaccgcgacggcgtcaaggcgtccgtgctggagctcgtcaccggtggcacggacacgtcgtcaccgaggagctggaccgcgtggtgggccgcgaccgcctggtcggcgagggcgacatccccggcctgccgtacctggacgccgtcgtcaaggagtccatgcggctgcaccccgtggtgccgctcctgatcccgcgggtggcccgcgagcacacgacggtggccgggtacgacgtccccgcgggcacgcgcgtgctcgtcaacgtctgggccatcggccgtgatcccaacgtgtgggggcccgacgccggggagttccggccggagcggttcctggacgggagcaagcgtagcaaggtggacgtcaggggccaggacctggagctgctgccgttcggcgccggccgccggatgtgccccgcccacggccttgggctcaggatggtccagctcgtgctagccaacctgctgcacggctacgtgtggaggctccccggcggcatggcgccggaggagctgagcatggaggagaagtttgggatatccgtgtctcgcatgcaccagctcaaggctatccctgacccaaggcttccgcatcacgtctacttcgggccgtgatgctgcataatatccgtgtatgtggtggttggtaacgaagaagagtacgtatagaagccaaccaacgaaataatctttgatgttgatgtatccgtctcagtttattcatggcgtgtgagttgaactgatttaagtataaaattcaaagtgtattctacatcaaacttttataactataaagctcgtacta

SEQ ID NO: 38805 - DNA, 2074 bp, Zea Mays
ccaccaacccgggctcctccattgaaccgccgtctcctccattcctggcttcccctccattgaaccgccaccagtctcttccattgaaccgcggtcgtaagacgcctcacccaacaccgcgcccaccaccccaaacgacgcctacattcctgacttcccctcctacgcgcagacgccgtcccaccgccgggatgccgccggcgatcccaagcctggtccacccgtcccgtgtgcggattctccacccgggcggaagccatattcacgggccggtggtgtactggatgctgcgggaccaacgtctcgcggacaactgggccctcctccacgcggccgaactcgccgctgcgtccacccccgcggcgccgctcgccatcgctttcacgctattcccacggcctttcctcctaggcgcgcacctccgccagctaggtttcctcctccgcgggctccgccgccttgccgccgatgcgcacgcccgcggcctcccgttctttctactcgagggcggacctgcggagctgccgtcgttggtgcggcggctcggggcttcggcgctcgtcgccgacttctctccgctgcggccggtgcgggaggcattggatgctgtcgtccaggagcttctgcgtgacgccgccaacatggccgtgcaccaggtggacgcacacaatgtagtgcctgtctggacggcgtcagggaagctcgagtactcggccaaaacctttagaagtaaggtgaacaaggtgataaacgagtatctggtggagtaccctgaggttccgcagtgggcgccttggtgcatggagcagccgaagagtgttgactgggatgcactgatcaatagcatcttcagtgaggctgagaatgtgccggagattaactggtgcgagcctggggagtcctcagcgatggaggtccttcttgggagtaaggatgggttcttgacgaagaggattaagaactatgacactggccggaatgatcctacaaagccacatgcattgtcgtgcctttcaccgtacttacattttgggcacatttctgcacaaaggtgtgctcttgaagcaaaaaaacgccgtcatcttagtccaaagtcagtggacacgttcttggaggagctgataataaggagggaactagctgacaatttctgctattaccagcctcaatatgattcactggctggtgcatgggagtgggctagaaagacgttaacggatcacactggtgataaaagagagcatatctatacgagggagcagctcgaaaatgccaaaacatctgatccactttggaatgcatctcaattggagatggtgcaccatgggaaaatgcatggatttatgcgaatgtattgggccaaaaagattctagaatggaccagtcaacctgaagaagcactttccatagcaatatatttgaacgacaagtatcatatcgatggcagggatcccaatggctatgttggttgcatgtggtctatttgtggcctccatgaccagggttggaaggaacgtccggtatttggaaagatacgttatatgaattatgctggttgcaagagaaaatttgacgttgatgcttatatttcgtacgttaaaagattggttcctagggccaagaagaggaaaactgaggaaggtgaatccacggtcaaagaatccaatgtctgagttggctcagcagttcaacattgtctaaaacattgtttcaggatgaatatcttttctcatgacaaagacatacacgatgtgaagatgtagcctgaaggtgataagaatggacgctgaagctatggccgaagagctttggtttaatatggtgacgaagaccaagtacgatgctgaccaaaaggagaaaagactacttagtcttaatgatttgtgttatgtttataagtaaatgtcagggacatgaatgtaattttacctaggctgcgtcccgtgcctataaatagatgaacaataccaccgtattgttcacgctaactgtaatagctccttcgcgtcttcaccttcgagcaagtcaaaggtatcaatgtaatatgaatttcattgatattcttatatgtctt

SEQ ID NO: 38806 - DNA, 1131 bp, Zea Mays
ggaagctgcggtttgagctggtcgctcgcacagaggtcgattgcatggcttcccttatatggcgtcatcagcggttttgatacgtaccggccattcagatatttaggatatagtttgagaagtttcctggccaattcagtgtcgtagtgttttttatttgacatctgtgtacctaaatcttacaccatttctcaaaacacagccagggccaagggagagaccaatgcagtgctttatcaagaggaataagaacaactctacattctacctctaccttggcttcacaagttcacctgtggataaagggaagtttctcatggctgctagaagatttaggcgtggtccccataccgagtacattatatctcttgatgcagaagacttatcacaagggagcaatgcatacatggggaaactgagatctgatttctgggggacaaacttcaaaatatatgatagcaagccaccatatgatggtgctaaagcatcaagtagtcgatctagtcgtcgtttcggaagcagaaggattagtccccaggtatcggctggcaattatgaagttggacaggtttcatacaaatacaacttgctcaaatccagaggccccaggagaatgtattgcactctcgaatgcccttcagcccaagagacttgggaaaactcactcaagacaaagttcaggcgccccctgggccccacaactttacgaaataaagcaccccgctggcatgagcacctgcaatgctggtgcttaaacttccatgggcggtttggtaaggtcgatagcgatatgttcacaatggattaccggcaaccactctccgcgtttcaagcatttgccatcagcctcagcagctttgggaccaagctagcctgtgaatagcgatgcagtttgatgctcttcgtgtggctatatggtttgtgttggtggttgcttgcttgtttcttgttgttacgatgtgatccgttcttcgttttagttgagtatttatgtactatttgtaccacaagagatgtaataaactattgtattgtcaaacggatttgttcaaggaaattatgtgtaatgaacttttgctctagttccatgcaaaagacaaaaaaaaatgctaagcaacagtaagaaaaata

SEQ ID NO: 38807 - DNA, 3095 bp, Zea Mays
atggcgtcgcggcaccggaatgcttctccggtgacggcagggaaggactcgccgcagcctgcctcggcggcaacctcgctgcggcttgtggcagagttcccgctcgacgcgcccgaggccaaggagagcgtgaccgttaccgtccgcttccggccgctcagctcgcaggaggttcggctgggggaagagatcgcttggtacgcggatggggacaccattgtgcggagcgagcagaatcacagcatcgcttacgcgtacgatcgggtcttcggaccaactacaacaacccgacacgtatatgatgctgcagctctgcatgttattagtggtgccatggagggaataaatggtacaatatttgcatatggagttacaagcagtgggaagacacatacgatgcatggagatcaaagatccccggggatcatacctttggctgtgaaagatgcatttagtataatacaggagactccaaagcgagagtttcttcttcgtgtatcatacttggaaatctataatgaggttgtaaacgatcttcttaatccttcgggtcagaacttacggattagggaggatcttcagggaacatttgtcgagggcataaaagaagaagtggtcttgtctcctgcacatgctttgtcccttattgcagccggagaagaacatagacatgttggatccacaaatttcaatttgctaagcagcaggagccatacaattttcacactgaacctcatcgatctggcaggttcagagagttcaagggctgaaactacaggagtacgccggaaggaaggatcttatatcaataaaagcttgctaactcttggaacggtgatatcaaaactgactgatggaaaagctactcatgttccatttcgagattccaaattgacacggttactacagtcatccttaagtggccagggacgtgtttctctaatatgcactgttactccagcatcaagcaattcagaagagactcgtaacacgttaaaatttgcccaccgtgcaaagcacattgagattcaagtgtcacaaaacaagattatggatgagaagtctttgataaagaagtaccagaatgaaatttgccaattaaaggaagagctagaccaactgaaaaggggtatactttctggcactccttcgaaagatgccacagaagacaatgtcattctttggaaacagaagaagatggtaatgtcaagctccagtctagactggaacaagaagaggcagctaaagctgctttgcttgcaaggatacaacgtctaacaaagctaatcctggtttccacaaaagcaactcagactcctagactgtcccaatgtcctaggccaaggagaagacattcttttggtgaagaggagttggcatgtctcccacacagaaggcgagatattgtattggatggtgaaagcaatgatttatttgttgctatggaaggatttgatgaaacatttgaagtttcttccaaaggagagaacaagaatcgcaaagggcttcttaactggttcaaacttcggaaacatgacggtggttctaatgctccaagcttaggtggtgaccaatctagcctgaggaaagcattggctgccccttggacacccgtagaaattggacttaattctcaaacagagcaagagatgtctaattctcccgagaatctatcagctaacctactgagcattgaccatgaagaatttcattctgatggactttatggagaagaagcttctttggtcaccagaaaaacatcagatcatgttgatttattgagagagcaactgaagatcctatcagaggaggttgcattacataaaagtgttctaaagcgactcgtcgaaggagctggaagaagcacaatgaatgggcatgtcgagatcgaaatgaaaaaggtcagtgacgagattaaggacaagcagcagcagatagcacatttagaaaggcagattaagggggagcttgaccagttagaacatacaccgtctcatgctacgctcctggagcaggtcaacgagaaagcatttgaacttgaggtgaagacagcagataacagaatattgcaagaccagctacaacaaaagacgagagagtgtcaggcattagaagaaacagttgcccacttacacgaacagctttcccaagctcttgaagctaatgatttattgtcagaaagcatcatatttcagcagtacacagacaacaaccttcaaactggatcgcaaattcacattgaaaatccagaatctatagatatctctgatgaactgcatcagaaggcagagcagtcagagattgatgaattgaagcaaagattgtgtgagcttactgaggccaaaactcaactagagacccacaatcagaagctgcaagaggaaagcatgtacgcaaaaggcctggcctcggctgcaggtgtggaactgaaagcactgtctggggaggtcaccaaactcatgaaccacaacgagaggctcgcgaacgatttggctttggcaagaaattcaacacgagtgagaagtggtcatagggttgggaggagggatagctatactaaacggcttgagccagcgagtagaagagatgttcatgctagcagtgagagggaatcagctctggaggtcatgcttatggcgaaagaccaaagagaggcagagctccaaaagaaaatcgaggagtccaagcagaaggaagccttcctggaaggagagcttgcgaacatgtgggttcttgtggcgaaactgaagaaaggtcaggtaattgaccaagatgatgtctcgatgccgtacccaatggatcgtgattcatgaccctagacaatgacaaaaacaattattgaatcggctatgcttcggcattgcactttccttgtctgtggactgtggtggtttgcaccagtgtgaatccgtgtatctatattgccggtagttgtaattagctggattggaatcttgtaatgtatataacaatcagattttgccttgttctcaggattgtcatgcctgtctagtttgttcagggctttcaacaattatactgtacatagattgtcgagtggaaagaaatgaaagcctgatgatgcatctccccca

SEQ ID NO: 38808 - DNA, 788 bp, Zea Mays
aaaacgtggcgggcttcaccgggcccgggccgggctgccggtttggccatctctacccacatctgctgcagactcgaggcgatcgaagcgtcattggcggcggctgcggcaatggcggggctgtcgctactgtgcggtgactgcggcgcgcagctgcgtagtgtggaggaggcgcaggcgcacgccgaggccaccaaccacgccaacttcgtcgagtccaccgaggccgtcctcaacttcgtctgctccgactgcggcaagccatgccgctcccagaccgaggtggacctgcacaccaagcgcacgggccatacggagttcgcggacaagaccgcggaggcagccaaacccatcgatctcgaggcgccgcttaagccggcctccgaggatgtcatggacgtagacacgtcggcttcggcgagtggggagccacaagagatggttgtcccggaggtgaacaaggagatgctcacggaccttgagggcatgggtttctcgacagcgcgcgccaccagggtgcttcacttctccggtaatagcaccattgaaggtgctattaactggctttctgagcaccaagaggacatagatattgatgagatgcctctggtaccagccaactcaaaaacggaggataacaagcccagcctgactcctgaggaaatgaagattaaagcacaggagctaagggatcgtgctcgtaaaaagaaagaggaagaagagagaagaatggaaagagaaagggagaagatgttaagtagtgtgatgtgcggccgcacatacaccag

SEQ ID NO: 38809 - DNA, 3353 bp, Zea Mays
cgtgtctcaaatcccgtgaagtgcctcgccgcgcagacaaaaaaaaaaaatccccaaatccccttgagaggcctgcaatttttagcctcctgaaccctgcgattggagccggcggtggcggcgccagcgcccgcggtcggatcgtcgcatggccgagattcgcaagtacgccatgtccaaccagcccccagatattcctcagatactactggaagctcagagtaggtggctgcggcccactgaaatctgccaaatattgtcaaactacaagaagttttccattgcgccagagccaccaaacagacctcaaagtggttcgctgtttctgtttgaccggaaaatattgagatacttccggaaggatggacacaactggagaaagaaaaaggacggaaagacagttaaagaagcacatgagaagctcaaagttggcagtgttgatgtacttcattgctattatgcccatggtgaagagaatgagaacttccaaagacgaacatattggctgcttgaagagggtttcatgaatattgttcttgttcactaccttgaaatcaagggtgccaaacaaagtttcaatcatgctaaagaagctgaagagactgcaggattatctaatgccgatagtcctgcatgctcaaactctttcgctagtcagagccagataattctcgagcaagctccagataccaccctttcactgagatgcagcagcctgtggatggtaccgtgatgggtaacttctttggcgcttcatctccaagtgtttctgtaaataatctagctgcaggttatcttggtgaaatgcaacctacgggagctaattttaccagtcattttgccactcgcaatgacatagctagtgtgttcaatgatactggctctgagttaggaggtggtcccaaaacttcaattgattcagtactgttgggtgaaccatttccagaatatccaggcggcttcatggagtcgacactctattcttctgttgcaacattgggtaacagtctggaagatggtttgcagacatttatgtctgaggctctctacaccaacaatctcactcaaaaggaagttgatgcacttggtgcagcaggcataacatcctcgaagacagagaatgatggttatacagatcaaagtgtcaggtatccacttttaaagcagtcatcatcagacctctttaagatggagccagatggtttgaaaaaattcgacagcttttcaaggtggatgagcaatgagcttccagaggttgttgatttggatatcaagtccagctctgatgctttctggagtactactgaaaccgtgaatgttgctgatggatctagtatacctattaatgagccattggatgtatttgtagtcagcccctcactttcccaagaccagctcttcagtattattgatgtatctccaagctgggcatacaatggcacaaaaaccaaggtcttaattactggtacattcttggcaaaaaaagaagatgtggaaaattgcagctggtcttgtatgtttggagactctgaagtctctgctgaagttttagtggatggctccctgcgttgctatacaccagtacaccattctggacgagtcccattttatgtgacatgttcaaatagagtagcttgtagtgaagtgcgagaatttgagttccgtgattctgagacccattatatggatatctcagataagcatactacaggcataaatgaaatgcatttacgtatccgccttgataagttactttccctggaaccagaagactatgaaaagtatgtcttgagtaatggaaataagtctgagctgatcaacactatcagttcattaatgcttgacaataatttgtctaatctggcattaccatctgatgagaaggaattgtgcactgtacaggatcagaatcttgagaaacaggtgaaagaaaagctatattactggcttatccataagatacatgatgatggaaaaggtccaaatgtcctaggcaaggaaggacaaggtgccattcatttagtagccgcacttggttatgattgggctatcaaaccaatagttgcggcaggagtaaatataaacttcagggatattcgtggatggactgcgcttcactgggctgcatgttgtggaagggagcggacagttggtgccctgatagcaagcggagctgcatctggtgctttaacagatccaacgcagcagtatccatctggaagaactcctgctgatttagcatcagaaaatggtcacaaaggcattgctggttttcttgcagagtctgctttgacaagtcacctctcagctcttacattaaaagagtcgccaagtggcaatgtggaagaaatatgtggattaacagcagctgaaggttttgcagcatcaagttcttcccagcttgcttgtgttaattctcaggaagagtccttaaaagattcacttggtgcagttcgtaaatcaactcaagcagcagccagaatatttcaagcttttagggtggaatcattccacagaaagaaggttattgaatatggagatgatgattgtggattgtctgatgaacgcacactttcacttgtttcccttagaaacccgaaatctggacacggtgattcacattctgctgctgttcgtattcaaaacaagttcagaggatggaaaggaagaaaagagtttatgcttatccggcagaaaattgtgaagatacaggcccatgtacgtggacatcaggtaaggaaaaactatcggaaggtagtctggtctgttggcatcgtggagaaagtcatactgaggtggaggagaaagggaaggggtctgcgaggtttccaacctgagaaacaacttgaaggtccatcatggcagatccaacctgcaaaggctgaggctgaggatgaatatgacttcttgaaggatggcaggaaacaggctacaggcaggttggatagagcactggctcgtgtgcgttccatgaatcagtatcctgaagcaagagaccagtaccgcaggctgcaagcctgtgttaacagcctacgagagtcccaggcgatgcaggacaggatgctggctgattcagctggcaccgatgggggtgatttcatgactgaattggaggagctatgccgggatgatggcgatgccccgatgtcgactatttcttgacatggagcttactatagatcagttaggcagtgacatgttctttaccagactagatgtaaattgttgttactaaatggtctctactcaccgttgaacaccataatataatgatatataccagctaatacatggacttctacagattatgataattgatcagtataatttgtggaattattatattttaaagc

SEQ ID NO: 38810 - DNA, 2739 bp, Zea Mays
cgacaacaataaaatacgtacacttggaggcgaagtcaccaacaaaacaagcgtctccctccaccggtccaccccccctctggctctctgcttctgcacctgcgtgtgctagcgcgagcgcgtgcgtcccttccccggcacgagcggcgcacaccgtcacatccgcgctccgttcgccttccagaaaatttaaaccccagcggagccggccacggccagtcagccgccacacggtctccgacgcgctgcccgctcgcctgccaaacccccaccccctcggcggcgatgctgacacgtcgccgtagcaaccacccgggctgctccttccccctcccgttcctcgtctgcggcctgctcctcgctgcggccgtcgcattttccccagctgcggccgccgaagcagctgacggcggcgctgggcacgagggccgcgcggggaaaccggaggtagaggccgaggcggaggcgcgcggggatggggttgccgtggcggaagccggcggcgaggtggtggctcagggcaatgccacggaggccaaggagggcagccttgccgacatgatcgaccgcgcgctggagaaggagttcccggagtccgagggcgagcagggcggtggagagaccgaccctggcagcttcaacaacacggtagctgagaagcagggagttcttgaaactgtagctagaagagtaacaaagaagaatgaaaccaaagataacaagtcatttccttttaaggaggttttcttggatcgaactgagcaagaggatgttcccacgttgatagatcggaaggataatgtttttatcatctcaaacccaaagtcaaaataccctgtgctgcagctggaccttaggttgatatcagatcttgttgttgttatcgtatccgctacatgtggtggaattgcctttgcttgccttgggcaaccggtgattacaggttatctacttgcaggatctataattgggcctggaggttttagctttgtcaatgaaatggtgcaagttgaaacggtagcccagtttggtgtgatatttctcctgtttgcattgggacttgagttttctactgcaaaacttcgagttgttcgtgctgttgctgttctcggaggattgctccaaattatgttgttcatgtttctttgtggtattttggctaccctatgtggaggcaaaactaaagaaggtgtttttgttggtgttcttctctccatgtcttcaacagctgtcgttttaaagtttctgatggaaagaaatagtatcaatgctcttcatggccaggttacagtcgggatacttatattgcaggattgtgctgttggcctgctgtttgcgcttcttccaattttgagtggtacatctggccttcttcacggagttgcatcaatgatgaagtcgctggtggtattgataacattcctgaccattctctctatcctctcccgtaccggcgttccttggtttcttaaactgatgataagtctgtcatcacagacaaatgaactatatcagctggcagcagttgcattctgcttgttatttgcttggtgtagtgataagttgggcctgagtctcgagttgggttcttttgcagctggagtaatgatatcaacaacagaccttgcacaacatactcttgaacaaatcgaacccatccgcaactttttcgctgctcttttccttgccagcattgggatgctaattaatgtccatttcttgtggaaccatgtggatatactccttgcagcagtaattttggtgatcaccgtaaagacctttattgttgctattgttgtaaaagggtttgggtatagcaacaaaacatctcttcttgtcggcatgtcacttgcacaaataggagagtttgcttttgttctcttaagccgtgcttcaagtattcatctaatcgagggcaagctatacctgcttcttcttggaaccactgcacttagtttggtgacaacccctctgctattcaaaatgatccctgcaatggtccacctcggggttcttttgagatggttttctgtcgataccaatcaggtggaggtacacgatcataccactgggcctgaaaaatgatgtcctccgcatcgatagcggcaagcgcataaatctgatagtccaaggctcacatgactcatgacacatttgacacactgcaagctactttttgtatggcttaagtttacaagctctgtaaagtgttttcacctgtactgaagagtttctagcagatatacgagggtggaggcaagagaactcaactcagatcttgctcctagtgcaagatcaatcctcccccgtcatgacggctgcaagggcaaagtcgggttttgccgttcttgagagcagtgtgtcttggatgattggtgcagtgagtggctgtcgaccccaaatgagggtctcgtgtaacatatgaatgtatggtgattaattaattggattagcatgataggatgtaggcctgatcctcagtaaaggttatgcccttgtgttctttcaccaaagttgtgtatcctcactacacgaaagtgtgtacgacatccatcagatcacgaattttgttgtgtagccatatatgtcagtttcttaacatgtccaagttcatgagtttttttttcctcacgggaagcttttgagtaacctttgttcagatatcactttgttggatcgagtccaggatctcaatgatgggtgtgtttcaatgaatttgttcactttttattataccat

SEQ ID NO: 38811 - DNA, 1914 bp, Zea Mays
ggacgccctaccggccgctataaaggctccccgcgaggctggcggacagccctgctgagtctctcacctgctggcggaggcggcccccaaaagccaaattccccaacccacaccacctccacactccaggttagggtttgctgtcggcgatgtcggatcggcagccgtcggaggagccggaggagcaggtggacctggagggggacgacgacggcatggacgacgacgacgccgggtaccgtcgccgcggaagccgggacgactcggaggagcccgaggaggatgacgacaatgacgagcgccacggcgacgccgacgacgacgccgggatggagccggagccggccggaagtaaaggcggggatgacacgggcaaggggcccgacgtcgccggtggcgggcccgaggacgaggaggagaggagcaagtgggatgacatgctcgccctgccgccccatggctctgaggtcttcattggtggcctgccccgcgacatcacggaggaggacctccgtgagctgtgcgagccgttgggagaaatatatgaggtgaggttgaccaaggataaggacacaaaggagaacaaggggttcgcctttgtcaccttcatggacaaggaggctgcgcagcgcgccatcgaggatgtgcaagacagggagttcaaggggaggactttgcggtgctctctgtcgcaggcaaagcacaggctgtttgttgggaatgtgcccaaggggctgagcgaggaggagcttaccaacactatcaaggggaagggtccaggtgttatcaacattgagatgtttaaggatcagcatgacccaaaccgtaaccgtggcttcctctttgttgagtattacaaccatgcctgcgcagactatgccaggcagaaactttcatctccaaacttcaaggttgatgggagccagttgactgttagttgggctgaacctaagggttcaacagatgcttcatctgcagctgctcaggtgaagactatatatgtgaagaacctacctgaaaatgtttctaaagagaagataaaggacctgtttgacaaacatggagaggtcacaaaaatcgttctgcctcctgccaaggctggtcataagagagactttggctttgttcactttgcagaaagatcaagtgcattgaaggcagttaaaggaagtgaaaaatatgaaatcgatggtcaagtactggaagtgtccatggccaaaccattggcagataagaaacctgatcattcacacaggcctggaggaggccctaattatccccttcctccctatggtggtggtggctacatgggagatccatatggtgcttatggtggcggcggtcctgcatacaaccagccaatgatatatggcagaggaccagcaccggcaggaatgaggatggtgccgatggtgcttcctgatggccgccttggctatgtcctgcaacaacctggtggaatgccgcctccgcccccaccgcggaggggtagtgaccgaagagacagtggcagaggtggcgaagggcacagccggcgatatcgcccttactagcttttcccttatgggctctactcccatcatgtggtatgaagcgtttaacttatgagacgagataggagcctgtgttcttgtcccagtataagatctgcgatggcacgatgcttgtaccatctgtttacttatttttatcatgcagtgcatgtgacttgaaactgtgatggacttgtattgctttctgccttatggcacctgtagtagtgaactgatgaaggaagttcatgcggactctgaagctttgttggcttagaatgactgaagattagaacaaactggagccaaaagtggtgcatggacgacacagggccagctttcaaacttttctctctctctctctctctctctctctctctct

SEQ ID NO: 38812 - DNA, 1667 bp, Zea Mays
cttgactttactgtattggatataatggtgtaaagtcaatcggtccattttctgtccctaagtggagtgggtgcgcttactctgttcaccaggtttttgcctcagggcatgtggatctgttagttcacctgctgcaagcaagtatagctatagggttgaccagtgcagaagtatgaatccttactttgttgggattcttgtccccgtcgcggtctccctgctgctccgcaagaggagaaaggcccaaaggatgaggggagtgccagttgaggttggtggggagcctggatatgcagtccgtaactatcgttttgaacaacctgttgagacacactgggagggggtgtccacacttgctgatctgtttgagcaatcttgcaaagagtatgtatacatgccactccttggcacaaggaagctcatttcaagggaaactgaagcagcacctggtgggagatcgtttgagaagctgcatctgggcgagtatgagtggaagtgttatgcagagtgcttcaagagcgtttgcaacttttcatctggactaattagagtaggtcaccagaagaatgaacgtgttgctatttttgctgagacacgggctgagtggcagattgggttgcaggcatgcttcagacaaaacattacagttgtcaccatctatgcctcattgggggaggaagctttgtgtcactcactaaatgagactgaggtcactactgtagtttgtggtcagaaagaactaaaaaagttgattgatataagtgggcaacttgacactgtcaagcgtgttgtctatatcaatgaggaaggcatctcaactgaagtttctttagctcaaaactgcactagctggatagttgaatcatttgaggaagtaactaggttaggagctgaagcacctgttgaagcaaacatgcctctaccttccgatgttgcggtgataatgtacacaagtggtagcaccggattgcccaagggagttatgatgacccaccgcaacgtcctggctacactctcagcagtcatgaccattgtgcctgcacttggcagtaaagatatatacttggcctaccttccacttgcacacattcttgagttggcagcagaggcactaatggctgctgttggggcctcaataggatatggatcacctttgaccctgattgatacatccaataaaataaaaaagggaactctaggtgatgcttctgcactaaagccaacattgatgactgctgtacctgctatacttgatcgtattcgtgatggtgtcaggaaaaaggtggatacaaagggtggtatagcaaagcaattgtttgacattgcctataaccgtcggcttgctgcaatcaatggaagttggcttggtgcctggggactggagaaactcttgtgggatacacttgtgtttggaaaggtgcgtgctattttgggaggaaagattcggtttgtactttcaggtggagcacctctatctggagatactcagagatttatcaatatatgccttggggctccaatagggcaaggttatggtctgactgaaacttgtgctggagggacattttcagagtatgatgacacatctgtcggtcgtgttggtgctccactaccttgttcgtatattaagtgaatgagttcttactgttgacctcccacagttcctg

SEQ ID NO: 38813 - DNA, 3052 bp, Zea Mays
ccccaccacccgtgtctcgtatcgccattctacccaaccgcaacgaaaatgagcccaggcgataaaggctgagtccgtccgtcgaaaagcgagcgcagagtgggagagagaagggggtcgattcggagagatcgagaaagaggagggaggcggagggcgacgtggcggtgggtgctgaagcggagcctgcagcgcccgctcgagtactcgccggatcgcccgacctgccggtacagcgctgcagacagcctgatccggccgatccggcgggaatggcggcgcgaggagggatctagcggaggtggtggggtcgcgcggcaatggcggaggcagagccgcggcgccggtgggcggtgtgggcgctactgctgctgctccaccccgccgcgctcgtgctcgccaacaccgaaggtgatgccttgcatagcttacgtaccaacttaaatgatcctaataatgttctacaaagttgggatcccactctggtcaacccctgcacttggtttcatgttacctgcaataatgacaacagtgtcatcagagttgatcttggaaatgctgcactatcaggaactttggttccgcaacttggacagctctaaaacttgcagtacctggagctctacagtaataatatcagcggaattatacctagtggatttggaaaccttacaaacttggtcagtttggatttgtacctgaacaacttcactggtccaataccagattcattggggaagctattgaagctgcggttcttgcgtcttaacaacaacagcctttctggttcaattccaaaatcattaactgctatcactgcactccaagttctggatctgtcaaataacaatttgtctggagaagttccatcaactggttccttttctttattcacccctatcaggaagtagctcttctagtactggagcaattgctggtggagtggctgctggcacagccttgctatttgctgttcctgcaattagttttgcctattggcagcgcaggaaaccacaagaacatttctttgaagtacctgccgaggaagatccagaggtgcatcttggccagcttaaaagattttcactacgagaattacaagttgcaacagatggcttctgcaataagaacattcttggaagaggtggatttggcaaagtctacaaaggacggctggcagatggatctttggttgctgttaagagactaaaggaggagcgcacgcctggtggggaattacagtttcaaacagaagttgagatgattagtatggctgtacacagaaatctattgcgtcttcgtggattctgtatgacaccaacagaaaggttgcttgtgtatccatacatggctaatggaagtgttgcatcacgtttaagagaccgggcaccagctgaacctccgctagattggcaaacaaggagaaggattgctttgggttctgctaggggcctgtcttatttacatgaccattgtgacccaaagattattcatcgtgatgtcaaagctgcaaatattttgttagatgaagacttcgaggctgtggtgggggattttggtttggccaaactaatggattacaaggatacccatgtaactactgctgttcgtggaacaattgggcacattgcacctgaatacctttcaacaggaaaatcctctgagaaaactgatgtatttggctatggaattacacttttagagcttattacaggacagcgggccttcgatctagcttgccttgctaatgatgatgatgtcatgcttcttgattgggtaattaactatgccatttcctctgttcaaattgcaacttaaatgttcatgccttttttgtggcttccatactgtgtaggggttggtggtcaatttttcctatgtaaccgttaaaaaacttgctaatcatttgatccaatgacaaagagcttttgataatgtctaaggaataaatattttaactgaattggtgcattgtgataggctgacagctgaacaagtagtgacatgctcctgtccctgaaagtcaagggattgctcaaggagaagaaactggagagtctggtcgaccaagatctagaacacaactacgtcgacgttgaggtggaatctctggtacaggtcgcactcctctgcactcagagcaaccccatggaacgccctaagatgtcagaggttgtgaggatgctcgaaggcgatggtctcgccgagagatgggaggagtggcagaaagcggaagtagtacggcaagaggtcgagctaggccctcatcgaacttcggaatggatcctcgacttgaccgacaacctccacgctgaacagctgtcagggccgaggtgaaggcagctttggactcactgattcttgtatcttgcaagggcaatagcgatgtgtatcaatcatcctagtcaagaatcccccatttgttcataccaatcgttgggtgaagcgaggagatgtggtcagccatgatgtgcattggatgtatgttgctgaggtgacatggctgagttcatatatgcgagggcagcagagctcgacaagctagtgtcgtgcgctgtcggtgcatgcactagtggtcctggatttgcgaaggttggaaggaactgacgcgaaccgttctgactcccctcctacaaaaggatcggatgatataggtgtgcctatggacctgttctgggtggcaaggttaatcagaagtttccgtgctgagtgttgtaattatgtctctagactgtactctgtagtggcgaacttaagagttagtttgatggacaggaaaatgaaggggattcctctcctatggatcttctctatttttctgtccaaactaaatcagccctaatgagggtgggacgttagggtggggatgtatagacgtcatgtaatggaggaggtgcatatttcttagggtacatctacacatcctaaactgaatatagcttcgcccccctatttatatcgatgatctcaattttcgtgcatgtcggttaaccagtcagtactccagatggtaccgtgcatctcgccccaacttggcgtaacttcattctag

SEQ ID NO: 38814 - DNA, 3367 bp, Zea Mays
cttgaccggaccctgcggcccagcttttttcttcactctctgcaacccattccccccctgcattctctctctgttctcttgtgcgtgcctgcgctctgtagtgacgacgactgggcggcggccgctgccgccgacctacgtgcgcaggtctccatcttccggaccttcgctggagacgagcacccaccaccaggtgcttctagatgccaatccattaaggtctttagctccaatgttccctgcccccatgggagtcaatgttaatcagtcaagtacaccaccattggtttgtgtcactccggttggtcaatttccaattgggtttggtgcagggaaccttcctgcctttggatcgttcactactttcagcgccactacaaacggtgtttcttatacgggcaccagtggtaatggtgccattgatgccactcctatctctgcatacaagacaagatcaagcatatcacttgatgatgatgatgatgagccttactcgggcaaccaaggtttggcatctgaacggaaggctaggagaggccgtcctcctggttctggtcgtgatggatcaaatggtaagttaaagcgccctaagcctacatacaagaattttgttgctggcaaagagcttgtctttctgtcttctacatccgatcccagggagtttgtggaatcagttcacatgacttttgaggccctcaggcgaagacatctgcagatggatgaaacacaggatgctagcagacgtgcagacctgaaggctggtgccatcatgatggccagtaacatcagggcgaattcaggcaagagggtaggaactgtacctggagttgaaataggagatattttctattttaggatggagctgtgtgtcattgggttgcatgcacctagtatgggaggcattgattacatgactactaaatttggaaaagatgaggattctgtagccatatgtattgtctctgcaggaggttatgagaatgaggatgatgacacagatgtgctcgtgtacagtggtcaaggtggaaataataggaatactgaggagaggcatgatcagaagcttgagaggggtaacctagctcttgagaggagtttgcataggaagaatgagataagggttgtacgcggcttcaaggatccattttgcctaactgggaaaatttacatatatgatggtctctacaagattcacgagtcctggaaggagagaacaaagtacggtgtcaattgcttcaagtacaagctgctgcgggaacctggacagcgtgatggagctgcattatggaagatgactcagagatggatagataatcctgctaccagaggcagggtcctactagctgatctgtcatctaaggctgaaattttgcctgtttgtctcgtcaatgaggtagaccatgagaaaggacctgtacatttcacttatactaatcaggtcaaatacttgaggcctctcagttctatgaaaaagttgcagggctgtggatgccagagcgtttgcttgcctggcgacgccagttgtgcttgtggacaacataatggaggcgatttacccttcagttcatcaggattgttgtcatgccgcaaaccaatagtctacgaatgtggtgaatcttgcaactgttctacaaattgcaggaacagagtgacccaaaaagggtccaggctacatttcgaggtcttcaggaccacaaatcgaggctggggtcttcgctgctgggaacctattcgtgctggttcatttatatgtgagtatgccggtgaggttattgatgagctcaaatttaatttgaatgatagtgaagatgattacatttttcaaactgtatgccctggcgagaagacattaaaatggaattatggacctgaactgataggtgaagtaagcacatatgtatcgcctgatgaatttgaaccactgcctgtcaagataagtgcaaaaaacatgggaaatgtctcccgtttcatgaaccacagttgctcacccaatgtcttttggcaaccagttcaatatgatcacggagatgatggacacccgcatataatgttctttgcactgaagcatattccacccatgacagaactgacttatgactatggtgttgctggagctgaatctagtggttcaggttctcgtagaacgaagaactgcgtgtgtggatcacaaaactgcaggggattattttgatgggttgagagacgtgctcttggtggttaatcatgcaaaccactttctgctagatcctttctatgaaaccaaatttagtctccggataatatgacagatgatgtcatttgccatgtgtactgtgaagacagtaagttgtcgagcgagctgtagaatttctgttgctctgaactgcatggtggtcgctttcccaccatttcctcggatgtttatgtgggcgtggattgctgcattgcttccgctaaacttgtccaccaattgcaccggcttttgtagacttgttatcagccccgcttgcgttggacgcctggttgttaggatatggtcttgtaaattatcctggttaaggatcatgttgctttcgactcgaattttcgtcctcccttgcccttatgttcagcaatgttcaggtgtatgctgagtgctcaggtagggaccaaaggatgcagttgatgcaatttggaaccaggttttcttgtgggcgccggccaagggaatttgctgcgagaggtacagatctgtttgcggctggatggtttgtgtgtagcgttgttcattattgatccgacggggacacacaaggctgcgctatggcccttgccaccgcgatcggtgaggggcatggtcgcccatgccgactgagcgtgcaagtgggcctatgcccatgtctcggcccgtcagctgggccccgccagcactgctcacgcgagaatggagaaaacgaaacgctcgctgttgaagaaaattggagggctgggcctctagaatcaacaggaagacacatgctctccatcgacgaacagcaagacgaggccagggaatcggagatcctcacgccgctgcatgcttgtagtaggatactctgctgctttggatgcactaaaagtttggaagtcaaggcgctggtggccgtggcgctgcacagacgtcaatcgcgtccgcggcacctgaccagcgcgcggccaggatcgcgggagtccgctgggatcgggcacccacacccgaatcctgtgtcgtggctgatcgtcgcgccccacgctggggctaccagcaccgccgatggggctgccaagtctgcgtcctcgacgggaccgcggggcccacacacgccggtgctgaggcatcgcgccggaggctgagcccgcaccggggcccaacctgataagaggccatcgc

SEQ ID NO: 38815 - DNA, 341 bp, Zea Mays
ctcaactttaacctttatttattggtcagccttacacctcacatgaactcccacctttggcatgttcatgcacattattccacgcaacttgttgagctatgatcttttgtgagctcagtcttgcgatatataaccccccacaggtgaagagcaggtggtcgaagaggagccgcacaacgaggagtttgacttgatctaggtgacgtctcccagttagctttgtggtgccagggaaataataattagttcgctttatcattaccatttatgtttgtaagacttccgctatgtaataattacatttatgatatttacgaaatttatctcgatacactttgtca

SEQ ID NO: 38816 - DNA, 2263 bp, Zea Mays
cagctggagcaaagcaaccagagggagcgcgagccggccactcccctccgtctctctcgaccatggcgaggctcccgctggccgcctgcgccgtcgccgccgccttctacctgtgcctccaccttgcgtcgtcgtcctcttccgctcctcgtcttgcgcctgccccgagcgacggcggccgccgtgcaggcaggaccgcctaccacttccagccggccaagaactggcagaatgggccgatgtactacaacggcatgtaccatctcttctaccagtacaacccgcacggcgcgctctggggcgttggcaacctctcctggggccactccgtttccggcgacctcgtgaactgggccgccctggacacggcgctggacccgacgtcgcccttcgacgccaacggctgctggtcgggctccgccaccatcctccccggcggcaccccggccatcctctacacgggcatcgacgccaacggggagcaggtgcagaacgtggcgttccccagggacccggcggacccgctccttcgccggtgggacaagcccggctacaaccccgtcatcccgctccccgccgacgtcccgggcgacaagttccgggacccttcgacggcgtggctcggccgcgacgggctgtggcgcgtcgcggtgtccgccgaggtccgcggcgtggcgtccacgctcgtgtaccggagcgcggacttcctccgctgggagcgcgcccccgccgccgcgccgctgcacgcctcgcgcgccgcgggtatggtggagtgcccggacctgttcccggtgaaggaggagggtgacgacggcgacggccaagggctcgacgcgtcggcgagcggcgccgggctgcggcacgtgctgaagctcagcgtgatggacacgctccaggactactacatggtggggcggtacgacgacgcggcggacgcgttcgtgccggcggagcccgagcgcggggacgacgtgcgcggctggcggcggctggactacggccacgtgtacgcgtccaagaccttcttcgacgcgcgcgggagccggcgcgtgctgtgggcgtgggccaacgagtccgacagccaggccgacgacgtcgccaagtatagatgcccaaacggcccggcccgaccggcccgcacgttcccgcggaagctgtggctggacgaggacgggaagcagctgcggcagtggccggtggaggagatcgaaacgctgcggaggaagcgcgtcgtcctgcgccgcggcacggcgctggccaccggaggcatgaacgagatcgtcggcgtcgcgggctcgcaggcggacgtggaggtcgcgttcaaggtctcgagcctagcgggggccgaggcactggaccccaactggctgctggacccgcagaagctgtgcggggagaagggcgcctcggtgcccggcggcgtcgggccgttcgggctcatcgtgatggcctccagcgacctgcgcgagcacaccgctgtcttcttccgcgcgttcaggtaccatggcaggtacaagcttctcatgtgcactgacctgacaaggtcgtccacgagggcaggcgtgtacaagccgccatacggaggattcgtggacgtcgacgttgaggagcacgagaccatcaatttgagaaccctgattgatcactcggtggtggagagcttcggagctgacgggcggatgtgcatcacggctagagtgtaccctgagcacgcggagacgagcaacaaccacatgttcgtgttcaacaatggcacaggcacggtggaggtgtccaagctcgaggcatgggagcttgccagtgcgagtgtcaatgttgacgacgatggcggtctgatggctggtggatcgttcgcgaacatgtgccgcgctgaggagtacaattctagctaggttaaaaaactgaacgggcatggatttgtgctatttatgatccatgacccaagataagtcgagcgtggcttgtggtagtgtttggatgaaggtatgaagaaggatgaagaggaatgggatgagatcaatctaacttgacctgtgtttggttggaggtccagagtcgatcgggatcaagaaatattcttcaaaaatggtggatgaggtcatctctcaaaaaataagggacagagttagcctagggttgatcccgtcctatctctcgttgacatcgaaccaaacactagttagtactattctgtgttgtatggagtgtgcttgatgttgttttgaccaataagcctgccaaaaaatgaaacaatatgatgttg

SEQ ID NO: 38817 - DNA, 202 bp, Zea Mays
ccggggcttgcctggaataaacactaggttagtgttgttaggtgacgtccacttgaagaccatcctttgtcctggcacgcactcgttcagattatccatcttccggttcgtccatcaacatcatcttgcggattagcccgcggttggggtggacttgggtcgtcttttgtatcacgtgattaattatcgtacctaaatgaaa

SEQ ID NO: 38818 - DNA, 1048 bp, Zea Mays
gtttcatgtaaaagcgacatctatttgtgattttcgcgtttcttcgtgcatggcgcgcgtgctattcgcgcacgtcatagcacgtcggccacgcgctgttttcaagcattgtcgtgtgtcgcgcgcacgatccacacacattagttaatcgtttcgctatagtcgttcatgcttattaattaattcttgtttaatcgttgactaatcgataattctatttatctaaaatatcttacgcaaataattttgtgcgtttaatcacaatttagtagtattcgttggtagcgtcgtttgttagccgcaaatggtcagttatttgatatataatgcgtcgtaaacccatttctactcgtcttggtcgcgtgctgagtcgctcgtcgttcacgcgtgccgcgagcatagtttcgtgtgtcgtcagcgtgctatgtcgcgcgtgtccgcgcgtcatttgcacgctgtcgtgctgtttcacgcgtcataaattcatctcgcttagaatctatccttttaattaaattatttaattaacagacatttgttagcgtatcagattaatcgaaactaactgatgtataatatttatgtttgatcatgttgaactaaaagttgttgttaatacttgtttaacgttaacgcgctaacttctcaaacgtaacttcgagttcgacgtttctttccctcgcgtgactatagaatcgagctctattttatgctgcatgtttttataacaatttatcatgtatggtgtaatgttcttatgcatatacatatgtttgtttgtttgtgcctgttggtattcgttgtgcgtcgcaaataatttgcgatccgtttccgagcttcgagagatcgaaggtcaagctttggtgaccaagtgatcaagctcctcaagctctacgagattgaagatcctgagcatctgtttggtgaaggcaagtgtactctgacccattatgtcctatttactttataaatcactattctgcattactcaattgaaacctaaggattgactagctttgtatttaccttgtccttgattaccttttgg

SEQ ID NO: 38819 - DNA, 1927 bp, Zea Mays
ctcttggagtcatgtcggatctgacgcctgttcaccacgtgcctttcttcctccttggttcttcacagctctcctgccggatcagagtttactgctcaccgcacctccgttcctctctcctgagtctcctctcctcgtcaagtcaacagtcgccactgtccactgtccccacccgactgcctccataaaaaaaaaccgaggtccaacaaacaaccactgcaatctccatgcccttccttccttccttccccacacaccatctctctttcacatgaggatttctttcccttctttctttcccacaaatattcccaaagaatcttctgtgttgcttctctcctcggattcctcttcccctcctcgcctcccactccaattattcctctccttactgacttgcttcgcttctctgttatctctgtcctctcctcgtgtttgttcttcctaccagcggagcgcgagctacgcgctgtgcctcgtgcctagacgaacggcataggcaccggacggtggcgtcatgtgcgtggaggagccgaaggacgccgaacggtttggttttggagacccaggggtcgaggagcccgctaagtttcccttggctcaggcagaagttaagcaattttgtcccagtaatccgatcgggggattggtctgatattggaggtcgccaatacatggaagacacccacgtgtgcattccagaccttgctaagaactttggtttcccatcattagataatgaagttgtttcattctatggggtctttgatggtcacggtggaaaagatgctgcccatttcgtttgtgataatttaccaaggatgattgtggaagattcagatttccctcttcagcttgaaaaagttgtgagaaggtcctttatgcagattgattgccagtttgctgagacatgctctctccatagagcatcgtcctccggtacaactgcacttacagcaatggtttttggaaggtctcttctggtcgctaatgccggtgactgtagggcggttctttcccggtgtggcaccgcagtcgaaatgtccatggaccacaggccttgcagtctcagcgaaaaactgcgcgtagaatcgcttggtggctacgtggacgatggctatctgaacggtctgctaggagtcaccagagcacttggtgactggcatctcgagggcatgaaaggagctggtgagacaggtggtcccctgagtgctgacccagagctcaagatgaccacgctgacgaaggatgacgagttcttgataattggcagcgacgggatctgggacgtcttctcgaaccagaactcggtggacttcgcccggaagcgcctccaggagcacaacgatgtgaagttgtgctgcagggaaatcgtcgaggaggcgatcaggcggggggctactgataacttgactgcagtgctggtctcgttccacctggaggccccgcctcggatcagagtggaccgtcctggtagggtggagaggagcatatctgctgaagggctcaatagcctcaggatactcctgggaaggcagtagctgcgttcttgtcgcgattttaggtgctgtgccgcattgccgagctgtaattgtttgtagtcatctcggctcctcattgtcgttagctgttacccgttgctgcgactgcgacacgtgttacgattcttgttggtgattgaaccaacaaacctgatattattcttgttggtgattgaaccaacaaacctgatactattcttgttggtgactgaaccaacagatttgagctctgtcctgtgagagattttaagcagatgaaagtatatctggcaaagaagctgtgagttcccagctcactgtgtaatgtttgccttccgttatgtaacaaaacaaaacaattcattgactgaaatgtgtcaggactgggtcaaatttcctgttctcgc

SEQ ID NO: 38820 - DNA, 270 bp, Zea Mays
ccctgatatactcaaagtgcataacttattacaatagcaggaaggtaggaaccctccaaagcttatacacaagcctaactaatcctcttccagaactggaaacgccctccacccacaggaacacttagagtactcatcatcacctacaacaacatgggttcgaaaaccctgagtacggagtgtactttcgcaagtcttacccgactaaggaaaaatgactctcaaggatatgctggttaagtaggaatcaaggaaaaggctttagcaaga

SEQ ID NO: 38821 - DNA, 336 bp, Zea Mays
gtttcggcccattaatcctcccaaaccctagccgcctccctcctaaccccctccccccttgtgcagccgcccctcccactcctcccactccttggtcgccgcccccctgcccatctcctcctctctcaatttttgcagccacaccccataccctagccgcccccctcaatctcctcctcccaaggtgccaatccttgccgctcggatcatcgtctcgtggtgtgattctccaatcgttttggtggagggaagaagggaggaaggaaagggggagaatccaaggtgatttttgtgttcatcccttgttcttttgcgctgcgattcaattgattagat

SEQ ID NO: 38822 - DNA, 852 bp, Zea Mays
accatggctggcatcgggcatctccactcccactccaccggccccacctccgcgaggggcgacccgagaacaccaccacgcccgccatgtggcgccgcctccaaaccctagccccctcgctccgccgcgccgccgcatcgtcgtccccggcctccgcccgcgccgtgcccttgtccacggtgccggtggccgcgttccggcgcacttcgaccctcctctcctctcccggcgacaagccggcgcccagcaaggtcgaggatgtcatgccgatcgccacggggctggagcgcgaggagctcgaggcggagctccaggggaagaagcggtttgacatggatcctgccgtcggccccttcggtactaagccgtgattgaatcctactataacaagagaatagttggctgccctggtgccgaaggagaggatgaacacgatgtcgtctggttttggttggaaaaggataaaccgcatgagtgcctagtctgctcacggtactttgtgctcaaggtcattggtgatgggggtgatccagatggccacgatgacgaggatgatcatcactgaggccttgtgtcgataatgataataagaactttgtgaaacatggttttgtcctatctttgcagcatcagactgccctatagagtattgtaattgataagtgtttgaccatgaaccaggtcgggtggtgttttacacctacgaattttgttcagatcttttcgaccatacggttgcttctgtttggaatatagatttttttttctggagtgcaacatcaaataaaggatgagtgcatcggtttcactctattgaccatctatttttgggttatattttgttcctgattg

SEQ ID NO: 38823 - DNA, 12020 bp, Zea Mays
acgacacgcgcatctccctacctcgatacgattcttcgtcttctcttccccgcgatcgcgccagcgcccccgaaaaaccctaactacctggagcctcgacggcacctgccgcaggcgacggcgagcgaccccaggcggtggtagacggcgcagcgggttgccccttgtggaggcggacggcacggcgcaggtccttgccttcccggctatgcgaattgcggtatgaagctcaagcggcgacgcgcggtagaagtgcctccaagtataaaatctttcatcaacagtgttaccactgttcctcttgaggatgtagaattgccgctgaaggattttgcatgggaatttgacaagggggattttcatcactggttggaccttttcaatcattttgattctttctttgagagttatatcaaatcaaggaaagatttgcatcttgaagataattttcttgatgtggatcccccatttcctcgagaagcactacttcaaattctccgtgtatcaaaacttatattggaaaattgtacaaatagacacttctctagtttttttgagcagcatctgtctgcccttctagcatcaacagatgcggatattgttgaagcaagcttgcagacattaatggcatttgtagacaagtcagttgggaaaagctcaatacgcagtgcatctctcgcttcaaagttatttgccttatctcaaggctggggtggaaaagaaggtggtcttggattagtagcatgttctctacccagtgtatctgatccagtttccactgaggttggatccacactccattttgagttctatcgtgctgctgataaatcagagaaatcccagtgtctagagaaagagaacaagttggaagtaattcatttatcgaatgtcaattcgtgcaaggaggcagatcttgaaatattggacaggttggtcaaggattacagtgtgccacaagctttaaggtttcttcttcttacaagactgagatttgcaagggcttttgactctttaacatgtcgacaccagtatatctgtatccgcttgtatgcttttattgttcttgtccaagcaggccatgatctggaagttgtatcaacatttttgaacaatgaaccagaattcattgatgagctgttatcactacttagctatgaggatgagatacccgaaaagattcggatactgggagtcctttcattagtcgcactgtgccaagatcgacctcaccagcctactgtattgtcctcggtaacttctggtggtcatcggggtatccttcctattctcatgcagaatacagtggattctatcatcaatggttctatgaaatggtccataatatttgctgaagcacttctttcgcttgtatctatgctggtatcatcaacaccaggttctctagctctacaagaagcaggttttataccaactattttgcctcttctcaaagacacaaacacgcaacatttacatctagttagtaaggcagtgcatgttattgagagcttcctggattatcacaatccttcttcagcagtgttcagagatctaggtggactagatgacactattgctcgtcttaagctagaagtatctcaagttgaggttgattcaaaactaattgaccattctaccaatgaaggaaacgaggttgaaagttatccacctgtgcaagatatacaaccttcatgttctgaatccttgattttgtatcataggaagaacttaataaaagttttattacgtacaatatctctggcaacatatgtgcctggtagttctgctcgtgttgatggttcagaagagaatgtgttacctccatgtttatgtgcgatttttaagagaggcaaggacttcggtggtggtgttttctcacttgctgcaaatgttatgagtgatctcatacataaagatccaacatgctatactgttcttgattcagctggtttgccacaagcatttcttgatgccataatgtgtggtggactttacaactccgatgcagtctcatgtataccacagtgtttggatgcattgtgcctgaacaataatggtcttcaattggtaaaggaccggaatgctttaagatgttttgtgaaaatctttacgtctagatcatatatgaaagctcttagtggtgacacagcgggagctttatcaagtggacttgatgaattaatgcgtcatgcaccatcattacgatcctctggagttagcatgtttattgaaatcttgaacactatttttaaagtgtggtgtggtgtagactctatcccctataaggaatctgataattactctgcagttattcccatggatactgatgtggtggttgctacctcacagagtgagggtgtacctcctgaggtaggatgctcaggcgaaacagttgatgctcctttagatgctgtaacatcatcatccattgagttatttcttcctgagtgcatatgcaatgttgctcgcctgcttgaaactgttctgcaaaatgctgatatatgtaggctatttattgagaaaaaaggcatagaagctgttcttcaactgtttaagttgccatcaatacctgtatctgtctcaattggtcagagtatttctgttgcattcaaaaacttctcacctcagcattctgtttctcttgcacgagcagtgtgctcattctttagagaccaccttaaaataaccaatgaactgttgggttcgatctctggaactatgctggttggtagtgaacctgcaaagcaatcagctcttctgaagccactttctacccttgaagggcttttgtctattgccaattttctcctgaagggaactaccattatggtctcagaactggcttttgctgatgccgagatattgaaggaattggggaaggtttatattgaagtcacatggcagatatctttactcagtgattctaaggtggatacgcaagatgcagatcaagatgatttggctgaggaagcttcaatttctgaaagggatagtgatgatgacacaaatacagcaccactttcaagatatatgaatcctgtttcagcaagggcttctatatcaccgtggagcatggagcaagattttgtatcaactgtgcgatctgtttcccacatgcaccaccatggtcgacactcattatcaaggataagtgggcgcctaaatggagtgttgaatgcaacaagtactgatttggatggtccttgttttccagcagagacatcaaggcgtcatgatgctctaaagagaatccctgatgatgttgtttctgaacttctgaagaaattttgttgtaccatgcgttccttcctttctacccttgtcaaaggattaccggctcatcgtcggcctgactctaaccttaacccaaattcgagaagtcttgtgactgcactagctcaatttttccttagtgctcttggtttctctgggcattctactgctggttttgagatgtctttatctgtgaaatgccgttaccttggaaaggttgtggaagacatggctgtgcttacatttgacagtagacgtcgcttatgcaattctgcactcgttaatagcttctatgttaatggaacattcaaggatgttctaacgacctttgaagcaaccagtcagctactgtggacacttcctttctctgtccttgctgctgccacagatcaaggttcctctattaatgagaaggtgtctcacaattcctggctgctggatacgttacagagttactgtaaatttctggaatattatgtgaactccacgttcttattgtctccatcctcttctcataatcggcttcttgtccagcctattgtaactgagctgtcaattaatctattccctgtgccttcagatccagaatcatttgcgcgcatgctccaatctcaagttcttgatgcagttcttcctgtttggaatcatacaatgtttcctgtgtgcaacccagcttttgttacctccctggtgtcaattatgaacaatatatgctctgttgttggagatatgaagcaaagccgcagtagtgttggagttgccaatcagcgtgttactggcccccctcttgatgaatctgctattgctacaattgttgaaatgggattttcaagggctagggcagaagaatctcttagaagtgtgagaactaacagcgtggagatggcaacagattggttattcaaccatccagaagattctgtccaggaagatgtgcagcttgcacaagcgttagctttgtcacttggaagctccattgaaacacccaaggaggatggaagcaataagaatgatacagtcattgctgaagaaaaaggtgtatttgtgcttcctttggatgacatccttactgtatcgaccaagcttttccagtctagtgattccaccttggctttcccattgactgaccttctagcgacactgtgcaaccggaataagagcgaatactgcaagcgagtagtattgtatctttttgagcagttaagacatttttcgtcagatgccacggatatgggtgctttgtattctgttgctcatgtgctggctttgcttctgagtgaagacagtggcatacgtgaaactagtgctgaaaatggtgtcatctcccaagttcttaacatattaggaagtcttaaatcaaggacagaccagacagatcatacttggaattctatcagtgctctgttgcttatattgtataacatgctacaatttaatccaaaactcagtatggaaacaatggatggtatatccaagtcaatttctgatgcatccagtgctgacagcgaggaaaatccattaccaactgctgaacatagaactgaaattattgattcagcagatgatgcaagtgcaaatgtttttaaaaagattttagggaaatctactggctatttgaatgatcaagagagccaaaaggcactggttttctgctgtgaattcattaagctatgtgtgcctgcaacagttatgcatgctgtgcttcagctcagtgctcgcttgacaaaaacacacgcgcttgctgctctattctttgaaagtggtgggttagcatctctcttaaatctcccaggcacttgcatctttcctggctttgagaccttagcatctgctattgtgcggcacctcattgaggatccccagaccttgcagagtgccatggaattggagatacgacagtcattaagtaaccatggcagtcgtactccaagctcatttcttacaaatatggcaccactgatatctagagatcctgtgatcttcatgaaggctgcaacttcagtctgccaattggattattcaggagggagattgaatgtagtcttgttgaaggacaaggagaaagacagagagaaacagaatgttcctgtaacagaaagtggtgtgccatgtaatgagcctgttcgggtgactgctgaggttaagacggttgatacaccaaacagatgttcacggaaccacaaaaaggttcctgctagtcttcctcaagtgattgatcagcttcttgagatcatcatgagctatccatctgcaagcaaagaacatgggtttgatggttattccctgttgactccaatggatgttgatgaaccaaatacaaagggcaaatctaaagttggtgatggccaagaactggatggtgatgctttctctgagaggtctgccttgctatcaaagtttgcatttgtccttaagttgatgagtgaaatactccttatgtatgtgcatgcagtagggataattctgagacgggatacagagatatcagtgtcacgaagttgcgctcaaggtgctggacacagtggtttactgcatcatatattctatctgctacttcctctaccttcagtcaaaattgctgatacctcagatgattggattggtaatttgtctgagagagcttcctggttcttggtagctttatgctgcagatctgctgaaggtcgtagaagggttgtttctgaaattgtaaaggcacttaaccaattcattggttcagcaagcaacacctccagaggatctttaatacctgacagaaaagttttggctttctctgagcttgtgaattccatattgtcaaggaatagtcagagcaatttgcctgttcttggctgctcacctgatattgcaaaacctatggtagatggtggaatggtgcaatctctttctgttttgctgaaagtaattgatcttgaccacccagatgctgtaagggttgtcaacctgatattgaaggctttggatagcctcactaggactgcttacaccaccgatcaagtcctcaattcagatcgatttaccaagaacagattaccagggtcacatgaacaaacacatgaagctgatgacattgtaatccctgaacaaactacatacgattcacatcatcatactaatgacatcgaatctgcaagtcagcaagctcaagaactgtctcatgttggtggaaataataacgaaaaccttgaccaacctgctgaacaagaaatgggagttgatctagcagacaatagtacttctaatggcaatcctccaacaagagctgtgcagttcatgcgggaagaacctattgaaggtaatgtaatggctcctagtactgatattggtttggctttctcaatgcaacatcaagttgatggaatgggtgtggaagacgaggatcttggggaggaaagtgaggacgaagaagatgaggaaatagcagctgagggagctggtttgatgtccatagctgacacagatatcgaggaccaggagaacaatgcaattggtgatgattacaatgatgaccttatggatgaagaagatgacgactttcttgagaaccatgttatagaagtaagatggagggagagcttaactcgaatggattatgatcatcatctgagattttccaggggtcgtgcagactccagtggttttattgatatatcttctgagtcatttcatggtgtggggacagttgattcatttaatctgcatcgttcgtttggtcttgaacggcggcgccaaatcggaagtaggtcgcttcttgatcgaccaaggaccgatgtgaatgcctttcttcatccactgcttgtcaggccagcacagtctagggagggaactaattcagcgtggccctctggaggaacttcctcaagagattttcacatgctgtcttttgacatcccctcgtacatgttagatgctggcttttcaccagaaactgctcccccagtgtttggtgaacgtgttgtcagtactgctccaccacctttgatagatttctcacttggtatggattcccttagaattaggcggggccctggagataatttgtggaccgatgatggtcaaccacaggcaggtaatcatgcagctgctattgcccaggcagtggaggatcattttgtgtcacagttaactgtggctaataattcaaatagtgctcctcaggtgcggcctgaacagactggcaacggtgcgaatgcgcactcagagttaccagatacaggaaatgctgaacctgttacaaccgatccactttctcaacctgttggtcggcatcagctagtttgtactgttaaccaaggacctgtccctgctaatgatgtcctctgtcctacagatgtgcacgtaaatcagcaccttgttgattccatttatgatagccgcgttgtagaaccggtgcagcaaacagcagccggtgatcctaacactatacctcagagtgatgaaatgatgtgtattgctggtacacagcttggtggtcatcctgaaagagattccttgtctggtaatggaagttatggtaatattatgcaaaatgagattgaagcacctcaacaagttcacttgggtaatgatcctagggaacccccatctgatctggagtcaagttgccatgcacttgtcacttctgcaagtgctgctcctgagctgagtgatgctcatgtagattcttcagcagtcaatgctgatgttgacatgaacatcgttgatattgctgaaaatgaagttgggaactcagctcctgcttctgatggcaatgatttgtcttctaggagatatgaagatgctcttcaagagcctcagacagtgcaaactaatgctattaatgaggcctccagcgctaatgaaattgatcccacatttcttgaagcattgcctgaggatcttcgggcagaagtccttgcttctcagcagaaccgttctgccccagctgcttcctatactcccccagctgcagaagaaatagatcctgagtttttggctgctcttccaccagacatacaggctgaggttctagcccagcagcgagcacagaggattgcccactctcaaccagctggacagccagtagatatggataatgcttcaattatagcaactttccctcctgatttacgtgaagaggtgcttttgacctcatcagaagctgttctgtctgcccttccttcagctttacttgctgaagctcaaatgctacgggacagagagttgagtcgctatcgtgctagagggagcctttttggtggaagctacaggcttggagggaggaggctgccaactgataatcagacagttatagacagagctgttggtgttactgtgggtagaagggttatttctactacatgcagttcaaagggtaaagatgtggaggggaccccacttctagactcagaagctcttcgggcacttattcgccttctgcagcttgctccaccactcagcagaggccttcttcaaaggcttatgtccaatttatgtgcacatagtgtcacacgtgtcaccttggttggccatctgctcaacatgattaaacctgaatatgaggggcttagcgtatctgattgcatggctacatatagattacatggatgtcattggaacattgtttatgcacaatcttgctctgcaaatggtgtaccaccacttgtaacacgccgacttcttgaaatattgacatatcttgcttcagctagtccttctgttgtggatcttttgatctatttcaatccttcagctagtccaaactgtttgacattacagcacaataaagagacatctcaagaaagttcaatgcagaatatgatgccaccatattcaaaggcttatacacctattatattgcttcttaagcttctaaataaacccttatttctgcggagtcgagtataccttgagaagataactaacaattcagatattgaattcgttgatgggacaccatatcaaacacaggtggaaccatctactttggaacaaggtcatatcccggataataaccaaagtagagatgttgaggtcccaccatcttgtgctaaactggatgttaatgtgcatgcaatccttacccaacttcctgatgctgaattgcataatctgtgcaatattcttgcacttgagggtcttccagataaagtgtactcacttgcggcagaggtggtgaaaaaattggctagtgttgcagcatcgcatcggaaattcttttccattgagttagctggtgttgctcagagtttaagttcttctgccgttgaggagcttgtaaccctgaagaacactcaaatgcttgggctcagtacttgctctatggctggagctgcgattttgcggatactgcaagtcctatctacactaacttcgtgtgtgatggatagtagacatgagcaagatttaggacaggaagagcagtcttttttgtgggatctgaatgctggtcttcaacctttgtggcaagagttaagtgattgtataagtgccacagaggcaaaacttgtacacaattcatcattcgcttcccatgccccatcggtggatgctttagcagttagtgcttcatcatctgtttcttcaccgcttcctccaggcactcagcgcttgttgccgttcatagaatcattctttgtcctatgtgagaagcttcaaacaaatcaaccagttgcacaatcagattacactgttattgcccctgaagtaaaagaatctgctggaagttcatcttcaccttcactgaagactggtggaacttgcaatgttacttttataaggattgctgaaaagcatcgacggctgctcaacgttttcattagacaaaacccaagcatactggagaagtcactttctatgatgttgaaagtgccaaggctgatagattttgacaacaaacgtgcttactttcggtcacgtatcagacagcagcatgatcagcaccttccagctcctctacacattagtgttcgcagggcttatgttttggatgactcatataatcagttgagattacgtcgtacccaggatctcaaaggtcgtttgactgtgcaatttcaaggggaagagggcatagatgcaggaggactaactagggagtggtatcaactgctctctagagttatttttgacaaaggaactcttcttttcactacagttggaaacaatgcgactttccagcctaatccaaactcagattttcaaacggagcacctttcttacttcaagtttgttggtcgagtggttgctaaagcgttatttgatggccaattgttggacgtccacttcacccgttcattttacaaacatatcttaggtgctaaagtaacatatcatgatatagaggctattgatcctgattactacagaaatttgaagtggatgctggagaatgatgtaagtgaccttccctatttaacatttagcatggatcctgatgaggaaaaacatattctctatgagaagaccgaggtattgaaaagccatcacgggttttagccgaaaccttttctgcttgcgtcagctattatcttagctgtgcagtttaacaaattttcaattcaggttaccgattatgagctaaaaccgggtggaagaaacatcagggttactgaggaaacaaaacaagaatatgttgaccttgtagctgaacatatactgaccacagcaattcgtcctcaaatcaatggtttccttgaaggcttcacagagttagttccaagggatctaatatcgctattcaatgataaagaacttgaactgctgatcagtggtcttcctgaaattgacttggatgatctgaaggccaacacggaatatataggatattcagctgcatctcctgttatccagtggttctgggaagttgttagagcattcagcaaggaggacatggcgagactactacagttcgttaccggaacatctaaggtaccattggagggtttcaaagcgctacaaggtatctctggcccccagagatttcagatttacaaggcgtatggatctcctggtcgacttccatctgctcatacctgctttaaccagttggatttaccggaatatacctcaaaggagcaattagaagaacgactgcttcttgccattcatgaagctagtgaaggttttggctttggttgattggttcctcgggaggttgtaaagcgtgcactgggtcattggttttctgcttgacatgtacagattttgaaggcaattgagatggtcagtgctatgcataacatagatcgatccattggtctttttaggagtgctcatgctgcagtagggatctaatttattattccggatagtcgatgagtatgtcgatcgggttgggtacagtagtagagctctgcgacaagagcgctgatacaactagcttccttttgccttctaattaaaaggttgaatgtaaattcgtttaatgctgataccagttctgatgatttttgtactggttcctccgattctggaggccagtgcaatttctgcaaataaataagccttctggtgaagcaatggttcttatcggtgcgcgttctcataaagctaaagtgttcagcattttctctttattatcttgggcggaagaggttacggttcgttatgtttgaatcacattatgaattcgtatcctttatttggtattttttttgtcgagaggaactctatttgttgtttattcggcgcttttcttcgaagatgggacatgagatgaaagtaaattggatgcataataaagggtccaagtgagaaatggtaaaaaa

SEQ ID NO: 38824 - DNA, 432 bp, Zea Mays
ttttgttctactacttaattgggttgatatttacttatacttagtaattgctaataaaattttgaccaactttaaaagcaatgcgcagcttcaaccatctcctttggtaagccttacacttcacataagctctcgcctttagcgagttcatgcacattattccccacaacttgtttagctatgaacgtatgtgagctcactcttgctgtctcacacccccccacaggtcaagaacagataccgcaggatgaggcgcatggaggatgctgtgacgagtacgtgagaggtctaggccgtcgtctcccagtcaactttgggttgctggatcgtgtcttcatatgatgtaactatttatttattttgtacagaactcctattatatagtaaagatgtgacattcgtttctgtaccactattcatcatatgtgtgag

SEQ ID NO: 38825 - DNA, 3026 bp, Zea Mays
gtcaagagcagccgtcagccccgtcaccagcaagactcgccccccactactcttcctcctccaacctcccctcctgtctctccctccctccctggcagcgactactccccaacccgcacgcacgccgtgagcataaagccgtcgcgcgcccacacgcccgttttcatttccatcggttccctttccaaactcaacggccgcggcagggagcaggcacagtcacctccctgacccgttgagccgtcaattttatcccgccccgcgatttcctacagctgccgatcgaggaggaggcgcattgcccgcattcttctccgcttccaccgagagggcctcgcctgatcggcgccgccttggcccccatgacgtgtgtgcgcgccgaggacgccgtctcgcccgccgccgccgacgacgtggcggctgccctggtttccaggggcggcttgatccagaaggtggctgccggcggcgggcggagaccggcaggctcggcgcgctcgctgcagcgctcagcacatctggccaccggggacggcaacgctccggcgccggcggtggaggccagttgctcctggtccgggcgagattttaacggcaagcgtagcaaagttggtgtcctttcgctggtgctgtgccgtggtgcggagggcactgtcggcctcagctacaccgcgtgctcccctgcgctgcgcacttcatgtgggggacctggatgaactgtccctaacctccctggtccctacttcccattgagtaccacagtctgatgggataggtaagagcaacggtggtgggaagagagatgatagacacaggatgcggcagtacaggtcgcagctcgaacaggaggtcaagaaattgcagaggcagcttgaagaagaggttgatctgcacgtggcgttggcggatgctgttacacaaaatgttgcgcctatactgaagtcttctatgaagcttccacacaaggcacaggagctactgattaacatcgcctccttggagattaccgtttcaaaccttgaaaagaagctaaatgatctgtactaccagctttgtcacgaaaggaacgaaaggttacttgctgaaaataatcagggatgcttgccatctacatcctccgatgagcaccagtcattgtcaacttgcacgtgtacgtgggaagagcacatatcatcgttgagagatttgaagtttgggggatctgaatcaatgagatcaatgagacaggacttattccccgagcttgaagatgaccaggatatgggagaagatcctgagggtcaacagatagtttctttaaacaggctgctagaaaagcaccgagattcttctttgaatagacttcttgaaaagcatcgagatgaagagatgcaagaatctggctccatggaaaatgaaggcaatgaaaatgagcagcctgacacgttatcctttgaacagtctattctaaagataactagcataaaaggagggaatctttggagcaacccaaatgagctctctgaggagatggttcgctgcatgagaaacattttcctacgcttgtctgaatccttgaagatatcgccgaagacatcttctgattgttcatcttcctccgtggagcgtctatcaggctccacgttagcatctttctcagattcatccataatgccctcaatgctacggagtccttcagttgattctaatcacaatgacgagacgatgaaggaagtcaggaactttgatccgtataaagttaatggaaaggaaacccgaagagatatcggaaactatcgttcagcagctgaagtatcttggatgtctgttggaaaggatcaactagaatatgcatctgaagctttaaagaagttcagatttctagtggaacaattgtcaaaggttaatcctagctgtatggatcgcgatcagcggctagccttttggattaacttatacaatgctttgataatgcatgcgtatttggcatacggagtacctcgaaatgacatcaagcttttttctctgatgcaaaaggcttgttacacagttggcggccagtccttcagcgcagcagaaatagagtttgtgattctaaagatgaagactccagttcatcggccccaactttctttgatgttgactctgaataagttcaagattactgaggatcacaagaagtactcaatcgatgaattcgaaccccttcttttgttcggacttagctgtggaatgttctcttctcctgctgtacgcatattctccgctgcaaatgttaggcaggagctccaggaatctctgagagactatattcaggcgactgtcggtacaaatggcaaagggaagctgctgatcccgaagctagtgcagagctacgccaagggagctgtcgaggactctctgctcgcagactggatctgccaccaccttgcacctgatcaagccacggtcatccgggactcttcctcgcagtggaagcagcggctactcggagctcgaagcttcaccgttctcgccttcgactccaagttccggtacctcttcttgccagacagctgtggctcccagagccagaagccagaggcaaagcaatcttacaaacttcctgagccgtgttcagaatcagaatagataataagagctcagtttggtatatttggaccatcatacattcttttgcatagcgggccatgtgattggcagttgtatatgatgtaaattttgaggaagcttgaattgctgtgtttgcaaaaccggatcctctccacggagttggtggcaatttgggggtcgtattggttttcttttgtattcacttgtcttccatactgaagataacattcttttgttgtttttgttttatctgcataccttttcctttttttcccctctccttttctgtaaacctgtatggtcaatttgatctgtaacttctgcacaaataaaggtggtgagcagtctttacttaggtttttctgcacaactgattagggacgaagccagtcggtggggcgagcggggctcgacccccctacctcctatactaa

SEQ ID NO: 38826 - DNA, 3569 bp, Zea Mays
cgcccgcgccccaccaactctgcccttgaacccgcctgccaccaatctcgtcgccgggtatcccgcccgccaccaaaccgcgccccctgtcctcgccctcgacggcgctgccctttgtgatggtgcccttccttccccagctcccccaaatgctgccaagtcccccaccaacgccgcccttccttccccggcagcccgcccccactagctccgcgctccgcgtgccccaccagccacgctagctgccgccgggatactcaccacctccgcgcccccaccaaaccgaaaggcgagatccgccgccagttccacgctccgcgcgtcaagagcagccatcacagtgatgccgcgcgagggagaggaaggaaggccgcgtgagtcgccgcagggaaagctgccaggcatcaccgtaaggtgagatccggttgcgcgtgagggagaggaaggaaggccgcgtgagtcgccgccgagaaagccacagggaaagccgccagtgtgagtcgccgccgggaaagccgccagtgtatgatggttcggtcatccagatgtgggtggcgtacaacgttgtcactcatttcctcctgcactgtaccgactgcaaggcgcaagctcactggcgtgttcgacctcctgaagattatgctatacaaggtgtgcgcaaatggctcatcggcgcttcccgattgggagatggaggccagcatcatggagttctacgctgttgcatcttctaagtggcatcaccgagctggacgacaggaaacagagaaaattgtgcctgaaaaaatttaggagcagggatgagcatttatcagaagtggacacaaagagggagcttgagtgtgggctctgcatgcggtgctttgagtattggctttgtacagtcttttttttgtttgctgacgccttcctaggaaaggggatcttctgcgacgatagcgatgaagacgaagacagtgaccagggcaatgaaaagcaggagacacatttccataccattgttaactgcatcacagagtctctgaagacacaaattattggtagaacttatgatgaagtcgcaatatgtctctttaacactatgatgctccagttctgcaacttctttccgacaaaatgtccactcatatatttacaactctataagggtttagtgtgggcgtccacaccccttcaccatgcccccgcctcagcccccgtcaaccacgcaaggactccagcgtgaaagtcgggcccgtcgccggccttgcatcgtcgcgacacactccgtgcctcccttccatcatcgctcgatcgcggtttcgtcgcactccttccttcgatggcactcctttccatcctcgattcctcctgccccagcaccggccagcctcatcaggtcattcctcctcgctgtgccccctccaccgtattcaaccacctcttcctcggcaccaaacgtagacgcctcctccgcgatgccctcagaccgcccgtcctcgcccaacatctccttgccgcatatgcccgcagcggctgcctcgcatcccgcccgcacgccacctccttgcacccgcgcatggatgccactgcacgcctactatggaagggggacgcctactattgaagctcccatccacgatcccattccaaatccagcttcaaatttgccccaatctgcagtcaaccttccacccaacatcttccccttatatattgttgtctctgctataaaagacttgacagaggcgaggcctccaaaccactaccactctccaccgattcactggagtcgcgagacgttggaggccctgagacgttcaagcctcatctgcagtctcctccaaagaggccatttaattacgcctatttgatttgagagctcgagtagacaagatcatgtaggctctgaaatctatcttctggaggaccaaggccattaaagtacaggtactcttgctctgtatatatcctacgtttgggttacttaatcggtgattgtgtgatcttgtagttatggtccaaaattgtatatggcacaaagatgagtttgttagttcctaagttcatataatgtaacagatctatttctgttaattggaacattgcaaaaaatgatattttagctaatgagggtgccagccgcccaagagaccaaatctgcattgatttcaaatgtactttgatattcaatccttgtggtcagtaaagcatatgtttcaaaagcaggccttgttatttgcccgacaattctttttggtgaacacgtccccttgatgtggtgttgaatgcctcactgattagatattgacgtgatcttgtttgaattaaggagaattattattgatagttctgagatgtctgttctggtttgatttagtacttattaacaatttggtgtctatagctttgctaacttgtgggttttctcttagggttctttcagcagcaatggcctcactatttcttctaaattaccaagattctcggacatgtacactctcacgatagcaagtgtagacccacagtttatcgtagcaaacaagccaatccatttcactaagagcgtgacaaagtgtcacagagcccttcttcttcgctctgccacccacaccgtggcacctcgccgagctccgcatcgaaactgcgttgttgccttctccgtgctctgcgttgaagacatgcagcgcaagcgtcgctgcctcatcccggcctcctctagacgcaagacgacaagaggatgctgctcgagctgtccccttggatcccacgccgaacgccctgtcacctccgtcgacaacatcaagctcctgtccctcccccacctcactgcaatagattcttcggttgtggaacttagggagagttttgagtcgtggtggtgtataaagcagtcgtcaagcacaagctcctccaaagtaccatcaggatcctacagtagaagagttagccaaaacactcgattgttggccatcaatgaattattatatcacgggttgtaaatatgttcttatgccatgaaaattcaacgaatgtcacgcccttttcgtaatagatcatgttaaaagcatgtgacttttatcgactttacaccgactcaagattggtgtaaacacatgccatacaagaggtttgcggaagctattatcatggcctcaaagaaatataagattgcttacaacaagaaacgttctggatgggcggaggatatctttaagtgggaacatacaattcagactggtgttccaattgacttaagagggtttaataccagctacctcgttctacaagttatgaccatgtgggggaatgacagacgaatgaaatttgttgggaatgcaaatattcttcgaaggaactttgtgattgatctgttaagttatgaggacaattcgtgccgatatgccatccctgcaaacatacaacagagacttatcgatatcgctaaaaaggattagctgattagtgtacggttgtcgacacatttgtctgtaattaaaaattctaaattatctttttagaaataatttgtgtgatattgataatgaaaaacacggattttgcatattatatagtgatgtttgtcgttc

SEQ ID NO: 38827 - DNA, 3067 bp, Zea Mays
gccagatctcgcatatcttcgtgagtcgtgacctccgctcgcgaagtcgctggctcaggcgctgctaccgttcgagacaagtctcgccgcccacaccgccactaggaaaccttcttctctcctcgccgcccgcggccggccccttctccagaaccttctagaacccatcggggctccgggatggagcccagaagacgagagcgcagggtcatcgccatcgccggtgcggcagcgctcgttgccgtgggcctcaatatcgccttctccgccgtcgtcgcccaccgtcggaggaagcgacgagagcttccagggtttactgctcaagtcaacctatcagcagctgcgattaaaagaacgaccgaccgtatcatctctaagtcaagggaaacttatgattcagtggctgcagtgcccctagataaagtcagttttgctaatgtcattgcaccattggcagaattagatgcgctgcaattccctctggttcaagcttgtgttcttcctaggatggtatcaccatctgaggatgttcgcaaggcaagtgctgaagcagagaagctattggattcccactttgtgctttgcaggcagcgtgaagatgtttatcgtgtcataaaagcatttacagtgaaaggcgagagaataggtcctgaagcaacaagatttcttcagtttttggtgcagaattctttcgctacatataaatttgatcgtaatgttctgattctgaccgacaactgaatgtttatacatgtgatgatttattgtcaatgctttaaccctgaatatcatttttccataactgttgtatacttgtattcttatctatttcaatatgaacatacctaatggctaatgtaggtataatctggctcctgagtggtctcgtaaggttctcatactgcatgttcttttacggtgatgtgtctttgcatcctcagtaccatcgcctcattcatcttgaacttgaatttctgaattatttgttagcataaaatattaatatgatctttttaaattcattaaggtgcatcaaagctcaaaaaaaccatagaattaattgactgtaaacatactgaaagatatgtgatgtgtcttgctattgtattatttgcaatttgtattaagatgattttgcaaattgatttgactatcgttttgctgaattgtctaattatggttgaacaggtgaaagagtttgagcgcaatggagtaaaactatctcaaagcaagagaaaagaaatggagaaattgaaatctcatatagatgcattaaacttgaagtatctccaaaatttgaatgatttcaccaaattccttcttttaggtgaagatgaactagctggaatgccctttgagttccttaaggatctggaaaaggctgatgggaagtttaaggttccgttgactagttaccatgttactccagttcttgagcactgcaaggttggctctaccaggaagcagattgctgttgcttatggacaaaaaggtgggaaggataatgtagccatcctagaaaatttggtccagctaagacacaagtttgctaaattgctggggtacaccaactatgctgattttgctattgagcccagaatgccaaagacttcgaggaagatcttagagtttttggaagagatgtctgaacaattaagtgatgtggctaatagagagctcaacatactcaaagacctcaagatcaaggaggaaggaaatgctcagtttggaatggaagatttgttgtactacatcaaaagagctgaagaattcaaggttgatcttgacgttggtgaaattaaacaatacttccctgttggcctggtcatatctggaatgctgaagatatttcaggatctatttgcactacgattcgacgaaattaaggatgttgatgtttggcatgatacagttcgtgtgttttctgtttgggatgcaagttcaagtgatcttttgggttacttttttcttgatatcttttccagggaaggaaagtatgcccacacttgtgttgtgacccttcagaatggatgcttatgttctaatggtacacgtaaggttccggctgctgtgatattatctcagtgtccaaaagagtttgatggtaattcagcattgctgcggttccctgaagttgtgaggctattccatgaatttagccatgtggtccatcacgtatccaacagagccaccttttcaagattttcaggccttcgactggagggtgactttgctgaaattccaagcctgctactcgagaattggtgctatgagagtatttctctgaaaatgatgtccggcttccatcaggacattacgaaatccataagtagtgaagcttgccaatctctgaaaagaaggcgtgatttgtttgctggcctgaaaatgaaacaagagatacttttgtgccttgttgatcagataatacattcaagtgagaatgtggacattgatgacttaatcaaggatcttcaccccaaggtaatgttgggtatacctttattggaagggaccagtccagcttcaagttttcctcgtattgcctttggctatgatgctgtgtgctacagttacatatggagtgaggtgtttgctgctgatctttttgtatcaaaatttaaagatgacttgctcaatcagcatgctggattgcggttcagaaataaggtgttggctccaggaggctcaaaagatcccctggagataataacggactacctaggaagagaaccatcactccaaccttttattcagagcagaacaaggaacagtctgtgagggatcatttatgatgtaaccgttgagttttttctttcttttttcctttttgaatttagctatagaaggcctgctgactgtctcgagttatttttttcgtaacggactgacaagtctgatctttgtgccattctgttttccgacgtcatttgtttgaccatttagttaagctggaatacaaaagatgtcgctagattctgctgtgttttcctaaccttagcatgctttcaagctcccatcaaaacgtctgagcacgtgaatcaagattgcacagaaagttagaaataag

SEQ ID NO: 38828 - DNA, 1778 bp, Zea Mays
gtcgcacgtcgcttggcacatggtgcccctaactacccgcgacggttagtttattgcacgccgtccaccagccggtcctgcgctctcgagtcgagactccaccttccattcatttcatctgctccatctccctctctgttcgccggcgtataataagcttcccctttctgcaactgatctgatccgggctgccgtgagctctgctcgtcctgatggagttcaagagggatgtatggagcctgctcctcgtgctgctcctcgggcagctcgtcgccttctccatggccgcctcaagcttcgcctcctccctcattgctaatcttggagtcgatgccccactgacacagtctttcttagcctacctgttgctgaccttagtctatgtaccaatcgtcctgcgtcgacggcagaagctgcaaatagcttggtactggtacctagctctggccttctttgatgtacaggggaactatcttgttgtgaaggcgtaccagtactcatacattaccagtgtgactttgttggattgctggactgttgtatgggtcgtcatgctcacctggtacgcactgggcacaagatactcactctggcagttcgtgggggcagggacctgtgtggcagggctcgcccttgtgctgctttcagatgcaaaatctcaagatgagcaagatccgaaaaaaataccacttctgggggatgcccttgttattgctgggacagttggttttgcatttagcaatgttggggaggaatactgtgtcaagaaaaaggatagagttgaagttgttgcaatgcttggtctctttgggttgctgatcagcacagcgcagatacttgtatttgaaaggaagggcctagaagcagttacatggtctccaacaatgataagtctgtttgcaggatttgcagtggcaattttcgtattctacacagttgctcctttcgttcttaagatgagtggagctacattgttcaacctttcactgctaacatctgacatgtgggcagtcgccattcgagttttattctatcagcaagagataaacaggttgtactacctagcattcgcagttgtggccattggattaatcatctattcgttgaatgatagatcttcagatgatgaaacagctggaagtacagaagcaccggcccaatatcagcaacttccaattgaagacaattcaacaagaattggttctagttcaggtagccaagaaaggacacataaggaagaagttcatatctgttagtgggataataatgtattaatgaaaacgtttaattggcccaagaagctaagcaagatgaggaagagaatcagaattaattttctttacaagtcagtccagcagattattcacaagagcagacccattgctgaaggctcccgcatcagtgagatctaaggaagggataatacatcgggtcaaaatgatctttgactagggattgtgaacaatcacagctggtctgcaaagcataatagcaacagtatgaacatgtaaagggagttactagtcactaaagctctttcaagaattgtctatgaaggaaaaaaaattctagatagtgtatggatagcttacatgctttactggaatgcagaattatgatttaatgatattttctatattactcattgttaaattctatgagaagtatcatgccccgtgaattggaagctaaaaggggtaacgccccgtttggatcattggaattgaattccattctaataatagtaatttaggtatatatcaattaagctaattcgg

SEQ ID NO: 38829 - DNA, 3479 bp, Zea Mays
ctatattcttcaaattgaagcttgttttccgagtagaataactgtatttgaaacatgcaatgtagtacatgaaagagaggtttactgcatggtggcacaccccttgcagccgcatcttgttgctactggaactaatattggtatcatattaagcgagtttgacccaagagcacttccagctattgctcctttaccaacaccaacaggcaacaaggaacattctgctgtttacatagttgaaagagaacttaagttactgaatttccaattgtcaaacacagcgaatccatcccttgggaatgctggtgttgcatctgatgcaggaaggtcaatgaacaattcaatagaacagttgatagtaaagcagaccaagaagcatatcagcactcctgctccccacgattcctattcggtcctttcagttagcagttctggaaagtatgttgcaattgtatggccagatatcccttcttttgctgtatacaaagcaaatgattggtcagttgttgattcaggcacagggaagctttttgcctgggacacttgtcgagacagatatgctctggtagagagtgcattggccccaagaatgccacttgttgttaaaggtggttcttctaaaaaggcaaaagaagcagcagcagctgcagctcaagcagcagctgcagcagctagtgctgcttctgctgccacagtgcaagtgcgtatcttattagatgatggaacagcacatgttttgcagagatcgattgatggtcgtaatgaaccagttattggattgcatggtggtgctttacttggtgtcacataccgtacatctcgtagaatcagtcctttgacagcaacagctatatcaactgttcaatcgatgcccttatcaggttttggtggaagtggatcatcttttgcatctgatgatccattttcctctaaggaagggcctccacaaaatttccaactgtacagctgggagacctatcagcctgttagtggcctacttgcacaacctgagtggactgtgtgggaccaaactgttgagtattgtgcatttgcttatcagcagtatatagtgatttcttccttgcggccccaatttaggtaccttggagatgtttcaattccctttgcaactggtgccgtttggcatcgaaggcagttatttgtgtctacaccaacaacaattgagtgtgtctttgttgatgctggagtggcagcgattgacattgaaacaaaaaggataaaacaagaaatgaaagcaagagaagctcagagtcgggcagctgaagagcatggagatttggctcttatcactgttgaagctccccaggttactgtgagtgaaaaagtatcattgaggccaccaatgttgcaggttgttcgtttagcctcctttcagtacgctccatcgataccaccatttatagtaccaaagcaatccaagttcgatggagatgattcagtgtttcagaaagaactggatgacagaaggtatgctgaagttgctgtcgctggaggaggtgtgtctgttgcagtaactcgcttccctcctgaacagaagagacctatcggacctcttgttgtggttggtgtaagagatggagttctctggcttgttgacaggtatatgtgtgcacatgccttatcactcagccatcctggtataagatgccgttgccttgcagcatatggggaccctgttagtgctgtgaaatgggcaacgagacttggcagagagcatcacgatgacctggctcagtttatgctgggtatgggctatgccactgaagctctccatttgcctggaatatctaagaggctggagttcgaccttgcaatgcagagcaatgacctgaaaagagcacttgcttgtctattaacaatgagcaatagccgagatgtgggacaagaaacagctgctgctgatgccactgacgttacccagattcttagtttggcagtagctaagcaagctaagcaggaaagtcttacagatgccgtgcagggaatagtgaaattcgtcaaggagttttttgaccttattgatgcagcagatgccactggtcaatctgacattgctcgtgaagttttaaagagattagcggctgcagcttctgtaaagggagcactccatggacaaatgctgcgaggcctggcactccgtcttggaaatcatggggagcttactagattgtcgggtctggtaagcaatttgattacagctggccatggacgcgaagcagcatttgctgccgcagttctgggagataatgccctaatggagaaagcatggcaggacacaggaatgttagctgaggctgttttacatgctcaggcccatggtcgtccatcattaaggaacttggttataacatggaacaagatgctacaaaaggaactggatcacacaccgactgtaaaaaccgatgccgccgccgcattcttggcttctctcgaggatccaaagctcacaagcttgggggaaactgagaaaaagcctcccatcgaaatacttcctcctgggatgcctcccctatctgcacctccgatcgtgattaaaaaggctggagcaaaacctggtctccctaatgcagcaaaggcgtcaaatgggcctataggtgctcctatggctcaaggtgctcccatggctcatggtactcctgggccacaaggagtccccatgaatcaagttactccatcacagggcagtcatgacgaggcaaggccatcagatgctacagtggctgatgcagctgccgcggttgcagaaggtacagcagctcccccggctgcagaaggtacatcagctcctccggctgcagaaggtacagcaactcccagcagtgaggaagctaaagcagcacctggtaatgaggaaggcacatcaaatccaatcaacgaggaagccacagcagctgcagtttcagttgctgcaggcagccctgactctgctgctgctcctgcagctgatactagctcggacgcacctgctgttaatcccacggaagataccgtctctgccccctcaacggaggcaccaccagagttgacggataagccatcttcagcagaggcatcgttgccacctccacccagtgtttctggtgtataaatatttctgattctcttttagcagtgtgccgaattttctgtattctggttcgttcgttccaccacgcgcgctggtataggtatttgttgcctgtggtatacagatttcgcagacgccaggcagtatgtgagtagctttgtacatctgctgtctgcgtctcacgagaacgtgctaccgttgtgtcactgacactgtgtggccatatcttatgttgttggtgaccacagttcaattcttgcttgatgagttgatcgagctgcaccaccaatatccctgtcttggacgaccgattcgtctcttgcggaatctaacgtaactgctgaggttcgcaaaatgtcttgttgggtcatctaacttgggaatctgtgcg

SEQ ID NO: 38830 - DNA, 2832 bp, Zea Mays
cgatcacctcccccaccattcctctttcctgccctcgtccgtttccgcatcggtgtatcttcgcccccggcgaaggcgctatcctcccgaccacccggcggtgccggtacgccggtaaggcaggttgccagaccccgcgaccccgatcccgatcggtcgctggcgaggcggcgtgacctaccccggctcatcctctcaagccagacggtctggctgctgtgcatccccgttttggcggctaccttacctctggcaaggcaatcccccctcacccctggcaagcacgggagaacatggagagtgcttcagatgtacaaatgcaacatcgtgctgaagattccgagactacaattgagatcaaaatcaagacattggattcccagacatacaatttgcgtgtgaataaatgtgtgccagttcctctgttgaaagagaaaattgctactgtaactggaatattgtctgaacagcaacgcttgatttgtcgtgggagagtcttgaaggatgatgaactcttgtctgcttatcatgtcgaagatggtcatacattacatcttgttgttagacatccaggccagtcagctacatttggaaatgcagcaaccgaagctaacacatcaaattctggccgtcgtcatgggcccacagtggcaagaagtgtagtacttgaggctgttaatgtggatcctgggagcagtgaactcccagcttttgttgcgcagattctccaaagtgtgcttggaacaatcaatgcacaatctacgggtacaccaacatcttctgacaccggatctttagatccttcacaatcttccatcccaaatactataagagttgaactcgaccagcaacaagctcctctgctttttcagtctgaacccgcacatgagtcatctcaaccaaatgtcatccctgatgctttgacaactatgtctcagtacattaactttatgagggactcatttaggagggagggctttagtcttaatggacaaacagagggtaatgtggaaaacagaactgcagagcctgaatcagcttctgtgcttgggcttcataatgcatcattgctagctgaaaatatgcactctactaggcaaattattgttgaacaggctggtgcattgctgtctcaactctcaactcagctgggagatctagagaatgtaactgattctgcaatacgaagggacattcaaagtagtgcagttcgcacgggttctctatttcagaaccttggttctttgcttctggaacttgggcgcaccacaatgctcctgcgtataaatccgtcatcttcagaagcggttgtaaactctggaccagctctttatatatctccatcagggccaaatcctcttatggttcaagaaggtctgtccaaatgggtactttgttttctagtctgggttcacaaggatctgttctacatccgagagatgttgatatccatgtccgcacaagtgggtccgtgcctggagccagtactaacccaagtgattcagctggtgcgcaagcgcatcaaaatgtgaataggccaggagatgcttcgcatgcaaatattggtgaagcgttttcaggggttgcaggtggcactcctttttcagttgagtccggagttagactattgccacttagaacagtggttgccatgcctgctggcatcagtcgtgctccatcagggtcgtctagtggtgggcttggtattatctatccatttctcactagggttcgacaaagggcaaacactaatggtaatgatgaaaggaatggtcaatctccaaatgaatcggctcgtagtagcacccatcttaatcagcaatcaattccgcagtcatctcaaactcatgaagcaggtaatctgagatctccagttgatgtcaatgttggagatggctctgagacctcacctgggcagcagaatggtctggtcactctctctcagataatggacttttttggatcaatgctcccaggcgaaaatgttcgaggaaatacttcaagccagcaaccaccaatggcttccaccgagcagggagagggtagaaatcttgcaacaccagaagtgtcaggagccagtgaggaggccctacgctttgctggcatggtcagacaaattatgccatttatctcccaagttgaaacacagaatcaaagtgccccaccagacagcagcagcacacctgcacaggctgcatctgggagtgcagacagagctagggatgtcccaaatgattctacgagttcccgtcaacataaccgcgaccaaattgatgagcctaattctaaaaggcaaagaactagtgactgattggaatctacttgtgagctgagaatcttgccagttcttgatttaccccagcggatgatcaaaataaggacttgagacaaatggtggcagtattgagacaaaaatggattagctgtggtatatacttggcactgagggcactagacgaggcacctatgccttttttttttgagggggcgcatcttataagctgttatttttttagtgcaacgagcatacatgctgctggcatccaatccccaatatgtacaagttttaattcaggttgtgatcatttacgcaacgaatcaaagcctccgctctggtcattgccgtagcatacggaggactgacgcaatcaatcatattgttacgagaatgtatagcttaagattgtatgtttttttttaccatcgcttaagacaatcagagcatatagttcatgcttattatagtatgatccaaataggactagtagtattgttcatgcttatcattagcattgcttaagagcttgtttgggagtaagagaattaaaaaga

SEQ ID NO: 38831 - DNA, 1710 bp, Zea Mays
ggccaattccctgtatgccactggaaaatatactcattccttgtatgccactggccccacatgtcatagacaccaaaaaatatacctatatgccactcagtggcacacaagggatgagtataaaatctgatggcataccaggaattttctctagtttttagttaataacaacctaaattaatttttggacgtttttagggagatgctctcaaggccacaggatgacaggaccgagtctgccgactagctattagggttttgtttgcaaaccccaattcgattcccaaccacatcagccgccgccgtcccgtcaccaccaccaaccttggtagcagccgccgtccggtcatcaccaccaccttggtagccgccgccgaagcgcgccgcgggcgcgggcgctcgcgatggctaaccgcacggaccccctcgcgaagagcatccatgggacgaacccacaaaacctggtggagaagatcgtgcgctccaagatctatcagagcacctactggaaggagcaatgcttcggcctcaccgcagagacgctagtcgacaaggccatggagctcgaccacaccggcggaacctacggcggcaaccgcaagcccacccctttcctctgcctcgcgctcaagatgctgcagatccaaccagacaaggacatcgtagtcgagttcatcaagaacgaggattacaagtatgttcgtgttctcggggccttctacctgcgtctcactggcacaattgctgacgtctaccagtatcttgagccgctctacaacgactaccgcaagatcaggcacaagctcagcgatggacagttcacacttacccatgttgatgagttcattgatgagttgctgaccaaggattactcctgtgatacagccatgcctcgcatccagaaaagatgggttcttgaagcgtctggaactctggaaccgagaagaagtgcacttgaggacgattttgaggaagaagaggaagacaaggaggaacagcctatggaaattgatgaaccgaatggtcgtgaaaatgataatcatcgtggaaggagccttgccagggaacgggatagggactgggaccatgacaggaaacatgaaaggcataacagggactatgggagagggcgggaaagacaccgagatagagatcgtgaaagagacagaaaccgggatagggatagagaccgtcaccgcctgcgagatgatgattacaatcgcaacagggatagggacagggagagggatggtagggaaagggagcgccgagacagagaccgtggcaggcacaggagccgctcaaggagcagagatcgacgggacagagaccgtgaagatggagagtaccgcaggaggcgtggtcgtggcagtgtaagtcctcgaggacgtggtgaagacggtggcccaagagaggaacctaagaggaagaaggaaaagaaagagaagggtgaaggaaatgctccggacccgaatgaccctgagatcatagaaatgaacaagctacgggcctcactggggttgaaaccactaaagtagtttacacgagtaatgttcaacttgacctgcatccaaccttttttgtgctggactttttcagcttgatgtaactaaacttttgtattgatgtggttatatattcatcagggcttccatttctgtctgcatttcaatgcatttgttttgtaatattgtggcactattgtggtag

SEQ ID NO: 38832 - DNA, 676 bp, Zea Mays
gacgcaagggatgttgacgagttagaggcctccagggtcgagcacgacagggggcttcggagctcaacacaagtggcgcacaactggaagatagatcgtcgggatcgacgggcacgtcacggacgcggcgtgaattgacgacgaggagcaatggggtgtcacagcatacggagagcgacacgaagatgttgggcacctactacgacgtgcgcacagattctagggactcgatgagctgggcagagcagagagccaacccccgtgttatgttaacggcagcgcgactcaaatgagaccccgtgtctgtacatgccgacagcatggacgagcagacataacacggagggtgcgagtctgctaaggacgcgacaggaacagctctgcgggcaggacgcggccaagcatcatggcgtgacggggaaaacacaggcgaggtgctggcgctgacgagctggattccatggcagtcgacaccagaaattgcgatgatggagagatgagcaacggcggtatgtagccatgtgcgcgcggggaagaagcttcacggcactggagatcgacgcgcgcaacagggagaagcgccggcgagcggagaagacacacgcgcagggactccacggctgggcacggcggcgctgaggaaaactggagggagcacggcgcagggagaaacgcc

SEQ ID NO: 38833 - DNA, 4109 bp, Zea Mays
atgttgccgccgccgccaccaccgtcctccttgcgcgaccttctctcgcgggagcgcgtcgacgaggacgaggcgccgcatctgtcgccgcgacgcgcctccgggcggtcacccccgcgccgcggggcgtcgtcgaggtcgtccaggcacacgtcgtcgccgccgctggccacgaccacgacaacgaccagggaggcggagggggaggccgccgccgccgacgcggtggtcgccgtgctgtccgcgtacgccgggaggctgctcagggacgcggaattcaggcgggcgctccgcgacaagtgcgccgcgtgcctcgcgcccgccgcgggcgcgggcgaggacgacgacgcggcggcaggccgccccgtgctggccaacctcgagctgggcatcgagagcatagagcgcctggccgcggacggctccgccgcgcagccacaggcgccgcgcgacgccaagatccggtcgctccgcaactccatccgcctcctcagcgtcgtcgcgtcgctccactcgccaccgccgccgccgcgccccggcgccgccgcgggggacggcggcggccgcacctgcggggtgcccaactcgcacctcgcagcctgcgcgcagctctacctcgccgtggtgtacaagatggagcgcaacgaccgcgtcgcggcgcgccacctcatgcaggtgttcgccgacgcgccgggcctcgcgcgcagggagctgctgccggacctctgggaccacgtgttcctgccccacctgctccacctcaaggtctggttcgccagggaggccgacgacctcgtcgctggccgggacgccgacgaccggcgcacgaggatgaaggccctgcagaggctctacagcgaccacatggacagcggcacggctcagttcgctgtgtactacaaggagtggctccagtcaggcgccgccgcgccgcctcccgtcccctcggtgccgttgccttcgacgcccaggagtttcgacgggcgcgagaagagctcggcttcggtgcacagaacctccatcaacagagacctgtataatgcggttttcgggacagctctcgctctcgggcaggaagacgtcaaggatacaaagctggacgatgggactggactagctctggatttggatgtcgaattggatcacgatgctgcgggcttcaagacacagaagcttgctcatgtgagtcgacagttccttcaactttctccagatgactactctactcctagatggtttgcctcgtagtaataatatgtgtttttttgtttggcaaggcaaactagcattggcatctatcttttagacaagtgacgagttgtggtcactgtttgcagctgacaatttaagtggtgccaaggagacagccgtttgatccacgtacagtataatatttgttttctatgccgtggggcctttttttttgtcatattcctaggatcctcagttgtctatggttggttgtagacatgtagcatccactgagctgttcggtttaaaaagcttgcctcctgaactgagaaacatctgtccttgacgcctcatagtattacacagttagccatcaaaaatccgatcttgatttaggagtaacatattaccctaaactggcaatgcaaagtccttctctttgctttagaataacactgctatatgtagtgttttaagctacatgttcctgtttgtttagtcccgcatatatatatatatttgaagttagttaacttgagcccgttttgagtagacagagtaaaatggggctccaggaaaagcactcccgctctcggaaagaaggcgccgctctagcagaaacagcacctgcgcagcggaaatcatactcctttcgactgttctcgtgccaaggcgatataagcaggaacgtgatcagccatcccaaagcagcgaagaaggaacccgtggtgtctgtcgagaaagagctggacagcagcgagctagctcctgctgtcgtgcctctgctggaacgagcggtttccgtggtatccagttcggacagcctgagtcagtgcgaggacgccgtgcacgaggtcgccagagcatgctcggcctgggacccgagcctcgtgaacctgctgtcgtgcgcctctttcatccaaggccttctcgaggtcacgctgacctccaaagacgacgccgtgctggagtcggccatgtcgatcatggggaagctggttctggggaacgaggtgatcagacagctcgtgctcaacgcggacccgcagctggaggttttcctgaggctcctgaggagcagcgagctgttcctcaaggcggccgtggtgctctacatgatgaagcctaaggccaagcagatgctgtccctggactgggtgccgctcgtgctgcacgtactggagtgcggcgacgaggtgcagtctctgttctccgtaagatgcgcccccaagatcgccgcgttctatttcctggaccagctgctcatggggttcgacgttgacagaaacgtcgagaacgcgaagcagatgatcgctctcggtgggctggacctcctgatcggcaggcttggcgctggcgacgctcgcgagagcaggcactgcatcgctctcctgaccacgtgcgttcaggccgatggcagctgcaggcactacttggctgatagtctcaagaaggagcctctcgttcagcttcttgctggaaatcagaggaaagccagtgccgcgtcccttaacctgatgagtgaactcgtctgccttaacagaacaagcaaaatcgtggagttcgtcaaggagctgaagaacagcgggtgcttgaacacgatgcacgttctgctggtctacctccagcaggctcctctcgtccagcacccgttagcagctaccatgctactccagctcgatctcctgggtgatccttcgcagtacagcgtgtacagggaggaggcgatcgaggccatcgtagccgctctggagcacagctcgcagagcaggaaggtccaggaacagtgcgcccgagctctcctaatcttggcagggcggttctcgtcttcaggagagcccgtagcagaagcgtggctgctaaagagagcgggcctagacgattccctctctgagtccttcaggagatcagaagtattcaaagataagagtgttcgagcggaggaagagaagctagtggaagaacggcagaagaacctcgccttgatgctactgaagagcgggggcagaaggttcctcacggcgctgtcgagctgcatatccgatggaaccccgagcctcagccggtcgtgcctcgtcagcgtggcatggatgagcagctccctctcgccgctgcgcggatgcaacgacttccagcccctggcatgctccgtcctcgcgtctaagcttttggacagcttgagctacgacagagtcctggaggagagggtgctcgcttcgctgtcgcttctgaacgtcgtgagacacccaggtacgtacgtctgcaagactggtgacagccaagtgactgtaaaaagaagaagatgaattttgttttaagagcgactgtcctaatctgacagaatgcatggagaaggtcttcccgctgaagaaagaaaccatcgagtcactccaagatctcgcggaggtgacgtggactgcgaaggagctcctctttgcctgctgcagatgagatgcaagaccagatcgtcctcagcgatgaagaactagacaccagcatgtaattggaagtgattgttttgggagaagagtgatcgccactgctgtacacagattgtttcgtacttccgttgatatgtgaagccccacagatcctttccctcgtcatggactttggctttcgctgttgaattgaagcctgcacatggcttcctttcttcttcttctttagggcttgtttagattgccaggtatccatatcaatacacatccatgtgttgtacgttaacacacaacatactatattgagttggataatgatcatccaaataagtccttagttttacattatcctatacacgtggattgagttgaatatataatcacccaaatgtaagtcctcagtcgtagttcgttcccgtgataacatttttttgtctccagtgaaaataaggcctattggatctcccatcatcaatc

SEQ ID NO: 38834 - DNA, 1372 bp, Zea Mays
gtgctttggttgtgttggagtgttggcgtgggtcaaaggagcaacactacatgtatagctcatgatgtgttggcaccctaggagtcttccaccactatgttgtgtgcaagttcagggagtgtctgcctatatttcaactgccttagggctgaaatcagtgaagccttctcccctgccttgagttctgaccatagtgcgcagcaagcgtgtggtgattcttttgttcggggtgctgctgtgcgcgccattccccttgtctgtggtgaccaagctggccggttgtccacctcgccgtggtcaggtcagtttgatcggagccgtgggcagattcaccgcagactaagcaacctgtgtcttctccgagcagctttgcgcaagcaccaggatctagagctcccaacagaaggagtgaagattcaagatgaagtggtagttgaagaggagtttgctccagtgcatgttcatcaagtggatggaggcatctaactggttattgggtagaaaggtcttgagcctcttctctgcaacaaaggcaagccccggtgcatttgcccttccttgcgttttaaaagatttttatacactttaagtctagtgaaatgtgcatgaagtttataggagttgcctagaaactacttgatgcattgactaccttgatattcattccatttatagatacttcttttgaagtattaagtattatttaccaaatttgcttagtccggcttagatcttgtggataggggttgtccttgcagtaatgcttaccttgaggcaggatgtcttctacctacaagactaatttcgctaggatgatggtgggatcatgctacaaggttccctaaaatgttctattcatctaagtgttgggggccttcgtctcccgaaggtcctcaaaaacacgactaacatgctttccaagtataatatactgttacaggaaccttcggctttgagatgaaggtgcgcatggtatgaaaggcacggtctggaagaaggatgaatcagttccgaagctatggatggagaagcttcgacttagcgcaaagacggtgatggagaatgaaaccgacctaaaaggggaaaagactgcttagtcctcgacagattactccttagtcaatagttaatgtcaaggacatggatgtaattttatccaggctgcgtcctgtgcctataaatagatgaacagtaacaccgtactatttacgttggcttgtaatcacttgcacgtcactcttggattcttaccttctgtcaagccgaaggtacaaatgtaaatcgatattattaatgtttgttcatgatcatataatgataagataaataatctaataatttgatatcatcattcatgtcctttatatgtccc

SEQ ID NO: 38835 - DNA, 1952 bp, Zea Mays
cgatattttttgacgagttcacctagacacggtatattttgcagagcggcaacatacatcgacatgttttgacaaattcctctcccccgactgagatcactgatccagtgcgcgtgccgccggcgccatggccgcgccaccgccgtcgccagaccaaacctactagcagcgcgtcgggggtgcacctgcggccgatctaggaatgcgaaggatgtgatcaagtctataaagaagtctgtagggagcaagaacaagagcactcaacactttgctgttatgctattggagatgcttctgaataattgcggagagcctgtccataggcaggttgttgataatagccttcttccaatacttgtgaagatagtgaagaaaaaaacggatttaccagttcgagaaaaaatatttcttctgttagatgccacgcaaacatcccttggtggagctaaagcaaagtttcctcagtactatgaggcatactatgagctggtgtctgctggtgtgcaattttcaaatcgcccaaatgttgttgtcacacgagcagaagtgccagtcccagaaacgagaacagaaccaaataatgtgagtttatcggcccgattgcatgaagctcaacaggaagtgcacactcagcctgctctggatacaagtatagtccagaaagcctgtagtgtcatggaagtattgagggatgtgcttaattctatggatcctagacaccctgagggagcaacggatgaatttgtgttggatcttgtcgagcaatgtacgtttcagaagcaacggatgatgcaccttgttatgacatcaagggatgaaatggtggtgtcacaagctatagagctaaacgaagagctacataaggttctcgtccggcatgatgtgttgctctcagttcatccgacaacaacagtagcttctaatatcaatgaggaagagaatgctgaaagtctctatcggagactgcggaaggggaaagctctgtcacaggactacacagatgactcggtaccgtcgttccggtccatgcccgaggacaagctgcggcggccgctgaccatccaatcacctcaccctgacaagagactgggcgcgctgaacatccacttgccggacggtgaggagccaaggcatgatcccgctccgctgatcccgccgccgcccgcaaagcacgccgagagggagaggttcttccaggagaagagcatcgacgagcatcgacggcggagtggccagcctgccgggtcacctgaggggcctgtcgcagcacagccgggacagcagcagctcgtgtagcggcagcactgattatggcgactgaagggggagcagtggtacatataggggttcccttcttgggggttgttggtctcccacttggccaggcaggccatacattggtgttgcgccggagtttggcttggccgtgagcttcttcttcatgctgacctgtgtacacttggtagcattttgttcctccttttcacctttgccgtgacattattgggagaccgttgtgttggtggcggtgtgggttcttttctttcagatctatagatgattgtgatctacatctactgcatggggtatgcttgggtctgaagcattgctgtgactttaccccttttggcttcctgctcctgtgtgtgtggtgtagcgcttggaggtctgccagagctgtgtccttgggaaaagctactgttcaaagcatgcgagagccccaccttgggctgtctatacagatgaaattttgataaactatcgttttggacaaaaactgtgtaaactgttcattgttttcttttttggaaaaaatatggcagaagttgtctttcaattaagataaactaggtgaatttcccgcgctttgctgtaagatcaacagcactgtaataagcacatgaacttgttgggttttgtgctgcaattccttgtccattaccagtaggctt

SEQ ID NO: 38836 - DNA, 2802 bp, Zea Mays
ctgattcctcgtcgcatttcaaattgaaccccccgtttcctcaagtgctgtcgtttcgttcgcaccccaccccatggtggccagctcccactcgtccccggcggccagccggacgccgaacctgaaatcggcgctggcgccgtcaccatccccatccacccgccgggcggcaacagatgtggcatcggcgtcggccgcggtggactcgaaagcacggttcgaggcttacaaccggctgcaggcggcggcagtggctttcggcgagaatcttcccatcccggagatagtggcgataggaggccagtcggatgggaagagctccctcctggaggcgctccttggcttccgcttcaacgtccgcgaggttgagatgggcacccgccgtcctctcgtcctccagatggttcacgaccccaccgccctcgagcccagatgccgattccaggaggaggattccgaggagtacgggagcccgatggtgctggctactgccatcgcggacctcatcaagcagcgcactgaatcacacctccggaagatccaggctgctgtctcatccaaaccaatcgtcatgagggcagagtatgcccactgccccaacctcacaatcatcgacaccccaggtttcgtgcttaaggctaagagaggcgagccagggagcacaccggatgagatacggtcaatggtgaagtcactcgcgtcccctcctcaccgcctcgttctgttcctccagcaaagcagcgttgagtggtgctcgtcgatctggcttgacacgcttaaagagattgaccccactttcaggcgcaccataatagtcatctccaagtttgacaaccgtctcaagagaggtgggaggtcgataccttcttgagtgcaagtggctaccttggggataacatccacccgttcttcgtggctcttccaaaggaccatggtacaatttccaatgaggagttccgcaggcagatctgtcaggtcgatattgatgtgctacgtcacttgcgagaaaatgtgaaagggggtttcaatgaagagaaatatgtatcatgcattgggttcagctgcctcaagaagtacctcgaatctgaacttcagaagaggtacaaagaagcagctccagctaccctggcattgttagagcagaggtgcaccgaagtctcaatgaacctaacgagactagactccaaactacaagcagcgtcggatgtctctcagctccggagatcggcaatgcttcatgcagcttctatttgcaccaacttgaatgcattacttgatggagctgctgatccagctccagaaatatgggggaaaactacggaggaggaacaaatacatagtggtattggcagctggcctggcattaatatgcctgtaaaacctgccaactccagccttaagctgtatggtggtgcagcttttgagagagtaatgcatgaatttcgctgtgcaacgtattcattggaatgcccacaagtgtcaagggagaaggttgcgaacatactacttgctcatgctggaagacgcggaagcagtaggttgactgaggcagcagttgcgatagctcgtgcagccgcacgatcatggcttgctcctcttattgataccgcatgtgaccggcttgcatttgtcctacaaaatctgtttgatcttgctatggagcgcaaccgcaataatgactcacaatatcatcaaaattttgaagatatggatagttatgttggctttcttgctgctctccggtgctcatattataagttcgtcaaagaactgtccaagcaatgcaagcagatagtgcgtcatcaccttgattctgttacgagcccctactcccatatttgctacgacgacgacttttttagtggtgttggatctgtagcaaactccacgtgtaggtttaaccacttcactggagttacatcctttgacctagcagacagtggatcagcactagaggaagctcaggagaacttgcctccaaaagatcagcaccatatgacaccgcctattaataaagggaatgactcaaaggaggtcctcagagaaagccagctaacagtacctgagacaccttctcctgatctgccatctgatatacatggtggtaagaagaaagataatgggatcccaaatgacggtggcccaaggaaaagacatgccaggatggcagcatatacaagcagaaatcaccataacagtatgattggtgctgatgacatggcctcaaagtcagggtcatcatactccaccatatgcgcaatatctgctcaatattttgccaaaatgcgagaagtccttattgaaagaaatgccccctctgcattgaactctggattcttaacaccatgccgtgaaaggttatttctggcacttggctttgagctatttgctgtgagtgacaataagttcatgggcatgtttgtcctgcctggggcagttgatggtatccagaatgagcgccattctcttctcaaacggcagaagattttgctgtcctgtttgaacgagtttaagaacatatcccgggctctgtaatgatgatgtttctcgatttcttcaggcctttattgtgtatcctttagacccattctgttgtcatgtatctttcttggcataacctattttcttgaaatctgtaccactctctgtcaagttccttcgctgacaaggtctttatcactaacatttgttcagattcaatacttgatattattgattatgctcgatgactcgaatacaaaactattaacttgtgatctcatcagtttgggcacatgccctgcgaaacttcatacaaatatc

SEQ ID NO: 38837 - DNA, 1416 bp, Zea Mays
ctttcacacatgacgtcagacgaggcgaggtgcctctctgccgccctgccccggaagattcgattgaagtatattgcgttacgtgcgcgcgtactgctggatcatcctcctgtgtgctgtctgcgcacttgtcgtccgtccattgagctgagcgagccatcccgtgatcgccgatcccccagttgccaccctcaccggctgcctgccgttccctccgcctctcaaatccagtgccgtgcgggcgcggcggcggctccccagttggcagttgcccagcccccagcagcatgactactacgaccaagaatcataagcagcagcagctgctgcccatggcgccgctgtgggacgagttcttccgcggccaccgcggcctctacaacgtctacgtgcactccgacccggcgttcaacggctccgacccgcccgagacctccgccttctaccgccggaggatccccagcaaggaggtgaaatggggcgagatcagcatggtggaggcggagcgccggcttctggcgcacgcgctgctggacgaccactgcaacgcgcgcttcgtcctcctgtcggagtcgcacgtcccgctgttcgatctccccacggtgcactcctacctcgtcaactccaccaggctgtacctcgagtcctacgaccagccaggcgcgacgggccgcggccgctacaaccgccgcatgagccccgtcgtggccgcggggcagtggcgcaagggctcccagtggttcgacctggaccgggccctggccacagacgtggtcgccgaccgcgtctacttcccgctcttccgccgcttctgccgccgtcgccactgctacgccgacgagcactacctgcccacgctcctcaacatcgtccggcgcccgtcggcgggggccaaccggagcctcacgtgggtcgactggtcccacggcggctgtcaccccgcgcggttcacgaggatggaggtcaccgtcgacttcctccggtggctcagggaaggcagcacgtgcacgtataacggcaggaccaccacagtctgcttccttttcgccaggaagttcctgccgaactcgctcaccaggttcttgaggttcgcgcccaaggtgatggggtttggttaaaaaccatcatgcatagacgacggggtacaaattttaaggatcagcgtctaacgtgattgactgattgtctttgtgaaggacctcaaatccattgattcattcattcatgtgcagtcataatttaatgttactctttactagctcagtagcttcgtgtgcaaattctttttgaattctcattttgtaaagaaaagtgtacagagcaccagaaaggggaaacgatcaaaagctcaccattgtctttaatatgatttcttttggacaaaaattaactagctggattcactgctgaaagcaa

SEQ ID NO: 38838 - DNA, 321 bp, Zea Mays
caaaagtgaaaccgagggcatctacacgaaccctagggaaaggcgaatgcaatggaaattgtcttactagaaacggtgctgtgaagatccctgtccacaacaacaagcagacggcgacgaattccttgccccgatgagcaattttggccacgcaagaccgcccatgcacgaatgagtcccgagggctcttctatgatccctcgctgacaacccgcaagtgccaaccgaggccgcaacgatggcgaggcagggatggctcacgggggtcgattccccccaccctggctccctgttctctctcggcgtcgtgatgtgtattgg

SEQ ID NO: 38839 - DNA, 5473 bp, Zea Mays
aagcaaggtttgtgataacagaggcccttgctggaaaatccatggcataactcagcatttgaaggtgttggatttctcaggctgtttcttccagcgaactcgaggaatcaggatcactttacaactgattggattagaaattgtctggacatatgggattctgtcacaaattgtaacttctgggacatccaatgggcttccatcatagcacgttgtataaaaaattcaagatctgtgaactgggatgcttttcttcccttgttattcacaagatacttgaacatgtttgaggttcctatatcaagtggcaatggttcatacccctttccagtggaggttcctgggaacacaagatttttattttccagtaagaccagaacactttccaaggcaattgcaaagtctgttgtataccttttgaagcctaaaagtttagcatttgagtattttgagaagctcattaattttttggaacagttctatcatccgtcaaatgggggtcgttggacctactcattggaacgcttcctgcgctatcttgttgtttactttgagaaacgccttcagcatgaacaatttgttatggcagttgaggaccatgatcaatcttatctgggaaaggaagaaaggtctgtttttgtcaaagctatcttgaaattattggatcgtggtcagtacagcaaggataattctcttgctgaaacagtttccgttgcaacttcgatcctgtcttatattgaaccaaccctcgtgcttcagtttgttgcaaaaaacttccaacgagccttagagacaactacagctacccatcagttaaagaacgctgtcacatctgttgcattttctggacgtgctcttcttctatgttctttatgttcatctcagaatgatgatagcagtgttgttgattcattcagtgatcttgttgtcgcttccctttcaaatgcgttacttggcatggatgccaatgatccacctaaaactattgctacaatgcagttaattgggtctatcttttcaaatctagctgcagttagtgatgatgtgcctatattgctccaatctactactctatcgaactggctagatgaattcttttcccgactgttttctgtgcttcataatctggaatcaagtagtcccattaatgagggttaccaaagctcattcatgtcagggacttttcttgttgacagtccatattacttttgtatgcttgaaattcttctagggaagttatcaaaacccttatttaatcagtccctgaagagaattgccaagttcgttaatgcaaatatcctccctggtgctacttcagaagttgggcttctttgttgtgcctgtgttcattcttatcctgaggaggcttcagtctaccttgtaaagccaatcttagagaccatcatgtcatcctttgaggggactccaaccactggttatgtaggaagagtagttgcagataaagcatctaccaaggctgcactttctcctgctctggaaacagcaatagattactatctgagggttttggccatatccatcagttatgccggtcctaccttactcaattataaggaggaactaaatcacataataacatctgcgttccagtccccttcttggaaggttaatggagctggggatcatctccttcgctctctgctaggaaatctggtttcttattacccaattgatcagtacaagccattcacttgtcagcctattggaaatattattgaaccatgggggtgttcgaaagctcatcaggatagggaggatgaaatgcttaatttccctccaaagtggcatgatccaagtcatgatgaactctcttttgcaaatgaattactacaacttcatttccagtcagctttagaagatcttttgactatttgtcagacaaaagttcattctgacacagcaggagatgagaaggagcacctaaaaataaccctgttacgcattcattctgcattgcatggtgtaatgtcttgtttaccagaaattcgcccgtcatataaagatgggaggtccctggaagtggagtcggctttcttcatagcaggatctgctggtagcactgttggaagctcagaaatgcgtgaaaaggctgcagaatttgtgcacatagcttgcaggtacttattaaaggaaagaactgatgacagtattcttctatcccttgttgtgcgtgtcattgatgctttggtaaactatggtatgttaactaggctcaaagactcgaggtgagtaattttgatgtttatgtgacagttagctgtgtaggaagcttggaataccaagaatggtcaagccatgttcaagcttggaaactagaatctgcttccataattgagcctccatgcaacttcattgttccatttcatgctcaaggaaaaaagagacctagatgggcacttgttgacaaagcaaacttgcatagtacatggaggtgttcacaatcatcatatcacagatacagaatgaatgcagatgtttcgccatctgtccccatgattaatttgatgaatgatctcttagatctctcactacacaactatgaaactgttcgatcgtatgctggaagatcgcttacaaaattgttgaaacgttggccttctctaatttctaattgtgttctcacactcacgggaaatttgcgtgacccaaaagctcctgaacatgttgttcttggttcttgcagcattctgatctcacagactgttttaagacacttgaccactgattctgtttccctctcttcctttatcatgggaattctggaaagctctcatcatgaatcgttgaagtgtcagaaagctattactgagctctttgtaacatataatatacgtttctctggaatatcaaggagcttctttaaaactcctgaaaatcaagctgacaagccaggatttctcagtctaatttctcaaattaatgctttgggctttgagactaatggactacattggaggtacaatttgatggccaacagagtattactattactaattttggcatccagaagcgaatctggcatatattcacaaatgcttgcaaaaattgctggtcatttcttaagaaatttaaagagtcaactgccccactcaagaatgcttgctatatctgctttgaacacattattgcaaggatcacctcataagacatctgcacaaaattctaagcaaccaatagatcaccctgaagattgcaatatttcatcaacagaagagattttgaatgagataatccgggaggaaggattcatgaatgagacactgaacagtttatctcatgttcatattatttccgacaatgatggttcgtcaaaagcgagttatggggcatcatcttttcaaagcggatctgacaaagcaataacttacttctattttgatttctctgcctcatggccacgtactcctagttggatttctttactgcgtggtcacacattctattccagttttgctaggatattcaaaaggcttatacagcaatgtggaatgccagtaatctcttctcttcagagtacactagaagagtttttaatttcaaaagagagaccaaggcaatgtgtcgctgctgaagcgatggctgggatgctgcactctgatatcattgggaatctggaatgtgagaacaactggttgatggcccagttgcataagattatgttagcaccatctgtggagtcagctcctgaatgggcagcttgtattcgatatgctgttacaggaaaagaaagagctggaactcgtgctcctgttctcaggcaaaaagtattagaatgcttatgtactcctcttcctcattccatggcaactagcgtacttgcgaagagatattcttttctgtccgttgctctaatagaaatttctccacccaaaatgtccccagcagagaagcaataccatgttaaaattcttgatgaactacttgacagcatgaaccattcatctgctcaggtaagagaagcaattggtattgccatgtgtgttacaacctcaaatatgagactttctgggttatttggcactggatgttcaccgcaaggccttcatggggatgtaagcatgattgaacaaacaggaaataaatattggtctgaacgtttgacagatggagctaatgaattagccgtaagtatacaaaatagtactcaatctaagcaactagaatcaacatcagattcggctgaagatagcatggatgatagagagcaggctgatgctaaaaggatggaaacgatatttcattttatgatcgcatctttgaagtctgggcgatcttctgttctactggacactattattaggcttgtgtacccaattctctcactacaggaaacatcaaataaagatttatcattgcttgctaagtcagctttcgagttgctgaaatggaggattctacatcggccttttcttgaaactgctattacgtctattcttcctttagtcagtgatcctaactggcgtaccagatctgcactgttatcgtatctcaggacctttacctacaggcacacattcatactttctggctcagagaaatcacaaatctggcaaacaatagaaaaattacttgtggacaaccaagttgaggttagggagcatgctgctggtgttcttgcaagcttaatgaagggtatagatgaagatctatcaaaggatttccgtgaacggtcatatgcacaagcccagcatatttttgttgcacggagaagaaatttgaagttttctgttggtaccatccatggtgcagtccttgctttgacagcttcggtcctttctgttccatacgacatgcctagctggcttccttctaatgtctcgctacttgctcgcttcatccgggagcctccccctataagatcaacagtcacgaaagctgttgcagaatttaagcgcacccatgctgacacatggagcatccagaaggacgcattcactgaagacgaactggaggttctccgtgatacatcttcctcctcgtcgtacttcgcttagattaaaatttcaaaggccataggatattctctggtactggtgttgtgtatatgaatttataactgttgaagtgtcggtgtttttcataaagtatatccttgtacgtacctagttttatttcatcaacagatgccttcgtacaactgagatgaagttatgcagtctactgtataccgtctggacatagcggaagcattatggcatgtgggatccttgcgtgggctgagaaattgttaacatccaaatcttttgcccagtcaacgacgtgaataagatgctgcctagtttaaccgcataatgcatctctggcaactctaatagcagagtcaacgggctagatataaacttgcccatgttcattagaagcaagaaagaatcagccattgacattaagaagtacatgagcacccccgatgcaaacgtctatagccctaatcatacttgtttcttgcttcctc

SEQ ID NO: 38840 - DNA, 2637 bp, Zea Mays
gatctagctggctcttgtgcaattggtatgccacagctgctcttctcaccgtgtgaggacgagcacagtaaaagctaagcatttcttgattcatcctcccagcttcgttaattactatcaatgatgttgctgcatatttctttggcatcttctttgggaaaacaccgctgatcaagctctctccaaagaaaacgtgggaaggctttataggtgcatcaatgacaacattgctttctgcatttgtgctactcctgctgaaaatgtactaaccacaccttccatggtggagtgcagggcctccctgttggggcacgagatcgcccacccgtcgtctacaccagattatttctatcataccatcagatagtggatggacaaccaagcgtgcaccgtttcatcatttctgattctttcttagatgactaagataagtgtgaggtctgtactcatattctttccttttcttttcaatgcaggtatgatcttatacgagtggagattggcaacaaagatataaagcttgaatacttagtggaggcatttacaacttcaaatgacgtagcctcctcgacaccttctgcttctgctaactccggtgcaaggtacgccgctgccatcccaatccctacccccaggcaagctttgttgattgctttctggttgttgatttctgagctagctatttagaagtcaaaaattgggtgaaatctgattaaccaaactacctggttagaaatcaaattggatgaaatctaattaattttgatatgtgtctcctgagttcaaggatgtcttctacaataattcagccaagaacaagaagcgctaattggaatccaaattgtttgatgtggtgatatgatctggaacttggaccatctttatgctttatggggctaagaagcataagacctgtccgaggcaattgtatctcaacataatcagtttgatgggctccaggagttatatcatcagaaatgtttttttagtatttctatgtaccagcaaaatattgactgaatatttctaaccaggtagatccttgctatacttgacaaactaaaggaggaaagggagcaacaagaaggaaaatatggggaggaagatgtggatggttcatgtatatcagaagaagaagatggtgactgggatgtagatgagccagatgaggaggacatcatttacgtaaaatagcccattgtcttctaggaacttggtcatcattcatccagaacacagcaggtgtgcttctactgatcgaaaatacatcttccaaataactatgaggacttaaccaagcaccattcaatcttcatttgcttctatagtttgggttgcgttctgcatacataatattgcctatcaaggtagatttgccagagcagacttcgatcttcttaatctacctgacagtttcttaccatcatttgattttattgatggacatgttaagcctgttctagggagaaagattaactggatgaagacagggatcgttgagagtgatctggttctaacagttagtccacattatgttaaggaactcacttatggcccagataaaggtgttgagttggatggtgtccttcgcacaaagcctcttgaaattggaattgtaaatggcatggatgtttatgaatgggatccttcaacagataagtacaccagcgtgaaatatgatgcaacaacggtaactgaagcaaaggctctcaataaagagaggttgcaagctgaagttggattgcctgtggactcgagcatccctgttatagtttttgtcgggcgtcttgaagaacagaaagggtctgacatactcattgcagccattccagagttcgtgggcgagaatgttcagataatcgttcttattcccatctgttcatcacctggaggacttgttgacacggttgaggaggggtgtcaccggattccacatgggttctttcaatgtcgagtgtgaaactgtagacctagctgacgtgacggcagtagcgtcaaccatcacacgggcctagaacagtacggcaccccggcgttccaagaaatggttcagaactgcatggcgcaaaacctatcctggaaggggcctgcgaagaagtgggaggaggtgcttctgggccttggagtcgaggggagtcaagctggcatcgacgacgcagaggagatcgctccacttgccaaggaaaacgtagctactccatgacgcttggtgcctcggaaacacgcgttggtgataggaagcatcttctaggatcctcctggccttgtggctggagtgagttgttcagtcagacacagtttcgcctctacaacatcttcctcctcctggtggtggtccgaactccgaagcaaattccagtgataaaggatgaactaagaggtccatgtttctattgctagaccttttgcctcctaaatagacgatgtactgcgcttgtaacaagaacctcactttcgtgtcaagtaatatcaacaggtttcataatggtagtgaactgcactggaaaaacctgtaaacaatgcaaacaggattcaaaactaaaacaaatctgctattaaaagctgttattcaaaattgaaaaaaacaaaacctgttaattcagtattataactcagcaaacataaataaaaaaaaca

SEQ ID NO: 38841 - DNA, 923 bp, Zea Mays
aggcaccattcgcactctcctatcaattcaccagcaaaaatttcccagcgccggcctcgcggcagaccggcctccgtatcactgcgcaaccgatggcttcctccccgtggctgcgcaccgccggtgccgcccctgtcccgccgccagaagcagcagcagctgctgctaccgccgccgccacccccgccccgacgtcggagcaacaccgggaggaaggaaacgctgccgccgcgactgtaccgaagcaggaggaggccaagctccacttgccgcgggacaacgactcagaagcagtaacccaagagcatggacaaaaaatcaatagatatcaagcaatccttgcagcccgtctgaaggctaagtttttctctaagaaggcttttgacagagggaacatttttgaatcagaaaccattgttggaggtgaaacaattcggtcaagcaggtggccatgtacaagatcatttgcaaacccagaatttttttcccgcgacaagaacagccatgagaagggaaattctccatcttcagcagcagatttctctgccaagaacaactctccacccttggctggtgaagcctcaccaaagaataatgctagtgctttggtcacagaaaacaatttaacaactggaaatagacagcaatccaagaagaattgacctgatggattaatgtaggataatcaggttatgttctgttcttctgtagcctgagggtagcaacctgaagtatacacttagcaggaaaggcaaattgacgccaaaaatgtttgtaacctgctctaaattcagtttgttgtacctgttctagaaagcatctgtagcgaggaataccgttgtttacttggtatttaaattgatgtattatagactccctattgaaccattgattgctcaaatctgaaccccaaattttcttta

SEQ ID NO: 38842 - DNA, 3289 bp, Zea Mays
ctctgcaggactattcccattgctcagatatggctgttcgaggaagcagtgctttcaagctacgtttctatcccaacttagaagtacaaaatattgcacaagaatgggttaaagagagccggaggctgttctatctaagaactgccaacaatgtcacaaataacatctataagggaaacactcctctatggactggaatggtacaaaatgaactctctgaagattgcaggggtttgaactacacttatttgaataatttgagggaacgcgtatcgtccaaatcaattgtaaatagacatggtaataaccgagaactgatcgggcatagtacgataaatcagcatgtgaaatcagtgccagctccagtacgtgttgttaatgatagtgtcaagtgtttcagcatgcctagagcctctaaggtggagattccttggcctgcctattcaccagcggaggatcctttgcttgataaatctaatacagaggtagcaaatattaatgccaaagaagagacaccagttggtcatggagaagtaatatgctttagcatctattcagcaaattctgatgtacaggcagctgattttggaaatggcaaaacttgcatttgggttgatgttctagatggtggaaggggtgtcctgatggagtttgctcctttctttgaagattcatcgatcaagaaggtttggcataactatagttttgatagccatgtcattgagaattatggaatcaaaattgctgggtttcatgctgatacaatgcatcttgcacgcctttgggattcatcaaggaaaattgatggtggatattcacttgaaggacttacaaatgaccgtagagtcatggatactgttccagaggatttacctaagcctggaaagacatcaatgaaaaccatctttggcaggaaaaatattagaaaagatggatctgaagggaaagttgtatctgttgagccagtcaagaagttacaaagggaagacagagagttatggatttgttattcttctctagattccatgagcacattgagactttatgacagcttaaaaagcaagcttacaacaaggagatggatcttggatggttgtcctaggggcaccatgtatgatttctatgaacagtactggcgtccttttggtgccctacttgtgaaaatggagacagagggaatgcttgttgaccgtggttacctttcagagatagaaaaggctgctattgctgaacggaaacttgctgcagataagtttcggaaatgggcatctaaatattgtcctgatgccaagtacatgaatgtgaatagcgatattcaaattcgccaacttctctttggtggcattgaaaatagacacaaatctggtgaaacttggccacatagtaaaacttttaaagtgctaaatgaagaaagtgttgctacagagggtaagaagacgtcaaagtatcgtacaatcaaactttgcagtattgttgaagatctgaaaatcgatatgttcaccccgagtggctggccaacagtcagcggggatgcattgagaagtttggctggtaaaatacctacagaatatatttacacaatagatgatattcaagatgatgatgaatataccagtggttcagaaaacccagatgggaattcctcttatggaacagcatatgaagcatttggtggaggaaagaatggaaaagaagcatgccatgcaattgcagctttatgtgaaatatgttctattgattctttgatatccaatttcattcttccgttgcagggagatcacatatcatgtgcagaggggcgcattcactgttcattgaatatcaatactgagacagggcgcttgtcagcaagaacaccaaatctacagaaccaacctgcccttgagaaggataggtataggattcgccaagcttttgttgcagccccgggaaattctcttatcgttgcagattatggtcagctggagcttaggattttagctcaccttactaattgtaaaagcatgctgcatgctttcaaggcgggtggtgatttccattctaggacagccatgaatatgtatcagcatatccgtgatgctgtccaagaaaagaaagttcttcttgagtggcaccctcaacctggtcaagagaaacctccagtgccgctattgaaggatgcttttggcgctgagaggaggaaagctaaaatgcttaatttttccattgcttatggaaagacagctgttgggctatcccgggactggaaggtttctgttaaagaggcaagagatacactgaagctctggtacagggatagaaaagaagtgttagcttggcaaaaaagtcagaagaagcttgcaagcgagaagggtgaagtctacactttgcttgggcggtcgcgccattttccttacctgactcagtatggtcctggccaacgaggtcatattgagcgtgctgctataaatgcaccagtgcagggaagtgcagcagatgttgctatgtgtgccatgcttgagatcgaaaggaatgtccgccttaaggagcttggttggaggctcttattgcaggtgcatgatgaagtgatactggaagggccttcagagtctgctgaggtggccaaggctatagtggtggagtgtatgtccaaacctttctacggaaccaacatcttgaacgtcgacctggctgtcgacgccaagtgtgcaaagagctggtatgctgccaaatagactgaggagacgctgtcacctgccacaaggttgatgacaccagtgcaatcgagaccccactgttcggataaaaaatggtggacccgtcgtcatgcagactgcggttccaggaccttgagtttgttgtggtggtaacccaggccctgacaagacaacacgcccatttcttggctgcagcagaacagcggaagacacggaggactctgctgccagcacctggagttgcgcggtgccaaagcataccagacagaattcgagatggcttggatctcgagtgaactagcgcggtgccaaagcatgctgttttgttcataatctcacttgttcagcgtgctggtgcgttaggttagtttacagatttgttctggtgcagtgaggccaattatggtccctgcggttggtatcgatcttggattgtgcattgcatgtagtaccatactgcatctacactgggaccatttttcagataacagaaacattcagcttcatcctcgaaagagaatcagaccaacttgttacaaaaaacagtttcaaacgactggatcaagtttacataacaaaaccgtctcaaaatt

SEQ ID NO: 38843 - DNA, 2593 bp, Zea Mays
ccaccacattctcccccctcctctcttcttctccaatccatctctctgtttgtctcctatcctttcctctctcccacttatcgacggacttcctgcgaggaacacagagggccatccagcatcatccgtggctgctgaattcctgatacgtctctgtttgatgcacattggtcgtcaggcacttcctctgcatcacacacctatgctgcggctgcgtgatggaggaagctaacgccccagtgacgaccagccacccctcctccaccgctcctgatgcgcctccggacccggcggctgttccatccagttctgaccaaggctcccaatcctgtcaggcccagcagcaacaggtccaccagctggatgaaacgcgagagccggcgggcagcagctacgaagcgtcagagatcgccggccgcttcaacgaggccatcgatcccaaggccggcatcgacgctgcggcgcccatcgtcgattccgtcaagggcgccgtcagcaaattcggagctgtaggggttgttgattggagagagaaacgcaagcatgtccaggatgagctcgacaaggtgcgggaagaggtcacggagtaccagaagagagcacaggaggcggaggccggcagagcgcaagctctgcgggagctgggaaccgtcgtgaccgctgccgacgagctgggcctgggcctggagatggcgcgggccgagcaagcccaggcgcggcggcaggtggagctcgccgagctgcagctcgaggaggtgcggcgcggcgcaaaggcggagctcgacaccgtcagggaacgccgcacggccgcgctcgctgacctgcgggcggcgcgagcggaggtggagtcgctggagaaggtgcgcgcgcgcgccgcggccgaagcaggcgcggcggtggcgcgggagcgggaggccgccgcggcgtcgcgggaggctgggaaggccgtcgaggacctcaccgccgagctcgtcgcgctgaaaggggagctggagtcctcgcacgccgcccatgtcgcggcggagcagaagaggatgggcctggcggtcgcgtgggaggaagacaaggcgcggtggcagatggagctggaggaagccgagcaggaggccaaggggctgcgagagaagctcgtggttgcctgcgacgtcgagacgaaggcggtggcggcttcccagctcatggcgagcctaaaagctgagctgttcgcttacgccgtcgagagaacaacactgggacaggaggaggaggcgacagcgatcagcgaccggttgatgctggagaagaccaagaaagagctcgacgacgtgaaagcgagcgtcgagatggccaagcacgaggccaagtgcctgcgcgtcgccgccgcctcgatgcgcgatgagctggagaaggagaaggcagggctcaccgcgctgcggcggaaggaaagggaaaggcaagggctctcgtcagcgtccatcccttacctcgaggaggagttgaggtgggtgaccgccgagctcgccgaggcacgagcgaagaggggcagcgacgagagcgagatggccgagcgtgtagccgaggcacggcgagaagcggaggaagccaaggcgaaggcccggtcggctcgagaaaaggtcgccagggccaaggaagttgcgggcgtggccaaggccgccgtcgccgccatggaggcgcggctggaggcggtgacgcgggagatactcgccgcgaacaagtcggccgagaccgccacggcctcggccggcgcgctgctgcaagaaagcaagccgtcgagcgataaggacgtggaagcaggcgtgaccgtgacgctgacggtgcaggagtacgccgagctgagccggagagcgcaggagacagaggaggccgccggcatgcgggtggtcgaggcggtgaagctgatcaaggaggccaaggacgcggaggtgaggaggctggagaaggtggcgcggctggacaagcagaccgagcagaggcggctggcgctggaggccgcgacgctggaggccgaggaggcggagttcgacaagctgtcagcggagcgggagctgaggcagtggcgcgccgagcacgagcagcggcgcgcgcccggcgacaccgactcgccccgcccgggcctcgccgagatctccgtgctccacgaccagggcaccggcgaggggcgcgggaacccgcacatagtcagcccgagggcaggctacatgccgcggacggagctggtgatgacgggatcggcggcggatgcggatgcggatgcggacgcgaggcagaggaagaccttcttcccgcggattgtcatgttcttcgcgcgaaagagaactcagtcttggaagtgatgcacaacaaccggcttccttttgaaatttcttttggggcttgcttctggtacgtggctttctcggatggagcagatcaaatatgacgacacaagtgtaaaatgtgtattgatcataattttttttttcgttttcactcggagttgtgatccatgcttggaaatatggaccggcttgaatcttgatagttggtaaggtcttgttcttttgtccaatccaaaaatcatttcagctgatcaaaacttatactccctccgtct

SEQ ID NO: 38844 - DNA, 2331 bp, Zea Mays
aaaaacttaaaatttcaggctcgcctaatagagaggactccatccatgagtgacctgaatgaagtgatatttgggcaggaacatctgtctcgagatgatctgtcttttatcttctccctcaaggtatcagacaatgcgccactatatggtgtttgtctgcatgttcaggaaatagttcaaaaggcacctggtatactaggtgctgtctcacccttaaaccctacttcctataagcccagtcgtttcttggtttctgcaccacgttgttactgtctacttacaaagcattattgcacaggagaggcttgacagaataacacagtttgctagtgaaattactctagctgagccagttcctcgtcctattaaagaacaagatggagtagacggtgattttgattcctcaaatgggattccatatattgactggacagaatatgctgtacctgtcaacagtatatcaggtctcatttcttcatccagtattccatcagaaagggacatgtcttcatatttgttcaggagctgggagcctaattcttctcaaagtatatctggtagtgagatttcagattctagttatgtaagagaagttgaggaggcaaggcatagtttccagcattatgaagattgtatagtagagaacttggaaccacgttgtgatagctttgggagagcaagttacatgtatgataatgggcatacttccccagatcttctgtccatgcattctcctgcctctagcagattagagcgtgcacaaagtgtggagtctttagaaagttcagtcaaaggtgcaacatcagatgaagaatatgaagtaaatgtgaagcatgaagtgattgttgatgatgaaaaagttgtaggatgggctaaggcacacaataacgaacctctacagattgtgtgtggttaccatgctcttcatctgccacctcgtggtggtgaacttgtattccgcccccttgaacatctccaacctgtgaaatactcccggcctggattacccttgttgggttttggagaggagattttggacaatgctttgactagggcagaaaaaaataagatcaatttacatttggtggctgcagaagaagctcttgcattgtcgatatggactatggctacagtttgtcgttctctgtctttggaaagtgtgctaggcttattcactggagttttgctggagaagcaaattgtggtaatatgcccaaatctgggtgttctgtcagcaattcttttgtctattataccgatgataaggccgttccagtggcaaagtctgttgcttccgattcttccgaggaaattgattgattttcttgatgcccctgtacctttcattgctggtgtacaacataaaccccctgatatcaagatgaaaggatctagtcttgtcagggtcaatgtccagaaagatcagactatcgtgtgagaattctttggctaagagacatcccatctataaatgcaatgaagttcaggctgatgtagcttggaagttcttaaatataatgagaacctacttggaatcactttgctctgacctgcgctttcataccattacaaatgtacagtcaaataatgacagggtttctttgcttctgaaagacagtttcattgattcgttcccctcaaatgatagaccatttataaagctctttgtggagacgcagatgttttctgttctatcagattctcgactgtccagtttcgaaaatgaacggacataaaggcattgttccagtggagatcaaacacagtgatactctctgctttggttttggcgtctgcttcctggtgctacctttacatgtcatttccaatgcgcaggggattgggaagataaaaacaaggcacgtcgcgtggagtgcggaggatttcgattttgccgaagccacatcactaattagaagtgttctgaaaagtatctaggctcgtctgcaatgtaagaagaatacgacggactctcaggttataggaaatagatgcaacccgatcttctaaatgggaccgagctacatgtggcgcacaaggaaaacaaatgatgatgaatatagttgggtttctgcttgcgatcttgttttgctatgtaacactagtgtgtagtgacttagctatatttcatatagggaaaagaagaaccctgtatataggtgaagttattcattggagttacgcgtccccggtttgatcatgtaaatcatgacctggtgcgcaagaaaccggcatcagttttgaatagggaacgttttgcaatttagtgcatttaaggccatggagtggaacaacttcgacgtatgttcgattggacctgctatatcatca

SEQ ID NO: 38845 - DNA, 2223 bp, Zea Mays
tggtaatttggtgctcaaggcgagacgcccatctcccctctcatcgtctctctcatctcatccagcctgtgccaaaacaaaacgagaaaaaaaagtcttgctgctgctggtggtggagcgagaaaggaaaaaaaaaaagaaggggtaatctcaggaaccatctagatacagcggcggtacgtggactggactggagcgagcaagcctgcgccggcgccgccgtcctcccgaaacagaagctgtagttggtcaagaactggggatactgagttgaatatgatctcaaatccggtggactggtatagtttcggacccggatagaattggtagggatgcaagattggagggtgcgtgagttcgaaggtaaattcactgatgagtttgcccacagcagtagcaacgaacataaaggtggagttgaggcttctggtgtcattagtagtaagaagttgaagcatgcagttgctaatgagaaaatccaaggtgtcatccccggtacaaatagctcaggttcactgaaacgtaattcagagaacatccaacatgcgaacggggtattatcccagaatataagctgcgctggtgactacaaaaatggctccattgcctttcctttgagagaagaaaatacaataactgagaccagatgtccagatgataactggaactcctgtcagtttgcactgaacaatggttcgtccattctcaataaccacagtgctccccaggatagcctcacttatggagataatgatctaaactacatcgaatggcctggcattgacaattttgaggatgtcgatacattattcagcagctggagaatgcagatgggttatcttggattccgtcttcagatgctgtttactctaccgatgttgctttgcaacaagggcttgattcgtcttattcagattatggtattctggatgatctctccgcattccaatgtgcagaagataaatcactacccttggttgatccttcatcagctttatgtgataatcaattcaatgatacctacctgttcagtgaacaaaagaatgtgaatgcatatggtgaacagatataccaagaggatttgatggagttgttgcccactgaccagatatgcagcggacatgaaaacattgatatgttgcaggttggaaaccagtatccatctgaaaatgcaattcaaggtaccgaagataagaaattctctatagcgtcaacttcccagctgagttctcagaatttactgaatcaaagacaccacttagattccagttcaccaagcaatattacttcggagtcctatccaggaaagttcggtccatctagctgttcttctgcacaaagaaactcaaaagctggtgtgacacttaagtgcgcaaatgcagtgcagaagaaaactgtcaacatacaaccaagacagccagcaaatgataatgttatgaacacaagcagagcttcttacccttgtgagaactatgaaactgaaagaagaggattagggaaagaactctgggggatcctcaagttacaatgggtagttcaatggtagtggatggctcatttgtatcatctatgtcctctgataactcagtcgaagaaagcagctttcaacaactgcaggatgctgttagtcagctggatgtgcaaaccaaattgtgcatcagggatggtttataccgattggcacgaagtgcgcaacatagacaagtttttccaaatacgatgaacagcaatggtggtagcgaggacggaaaggaactggagaacgcagaaacttcgtgcaagttcatggaccctcggagcatcgagacgcagacaaacccgatcgatcggtctatagctctgctacttttccgcgagtcatctggcggccatgtccatgtggctgtagcagccgacgatgcctcgtcactgaaatcccctgctggtgtatgatttcctgcctgccacatctcagttccagggccctgctgctaacccaggatgtttctaggcatgtatgtaaaaaaaaaaacaagcgtattgtgtagccaatagtctgtactctgtagtcacattaattttgtcatgcttgtatcctattgctagacggccgatgtgctaacctagtgctgttgactcaaattttatgcgtaatctaaaaaaaattatttcttttcgtggatctctagcataccttcaaactgatgcacgggagtggaaggattcgcttcaacaatcgttagg

SEQ ID NO: 38846 - DNA, 1963 bp, Zea Mays
gcccgccaccaccatggcctctcctttcccctgcccgcgcctccggccggcgcgtgccgcccccgtgctggacgaccgacgagacactcgcgctcgcgcgggcctacaccgcacgccgcctcgccgtcggccgggagcgcctgacctccgctgactgggccgccgtcgccgcggccgccccgtctaagacggccaggcagtgccgccacaaggtcgagaagctccgccgacgcctccgatccaactgccgccgcccgtgcccgctcctcgacgccatcgacctcctcgacgttccttccccgcccttcttctccaagtcccagtcccgatccacgtcccggtcctcgtcgccgccggcggcggcggtctcttcgccgtttcccccttcccctcccgcatccccgcccagaaagaggcggcgggactatgccggggacgaggaagaggaggctcatggacctcggccggggctggcgaggctggtcgaccacggctggggctcgcacaccaccgtcctcgccgacacgatggggtacatggacccggagtgcatggtcaccggcagggccaacgccgagtcggacgtctacagcttcggcgtcgtccttctggagatcgcgtgcggccggcgccccctggtgcctcgccacggcgtgggaatgcgaatccctcgcctacgcctccaaatcgtcgaagccgcatcccataatagcaaatttctctttctcgcctcgtgcgctccgcccgctggcatcgtgctcgttgagtttccaaagtctcagccaccccagtatactcctccggatccgtgttccatcacggctacaaaaatactccgcctgcatctccaaagcacacggctccctctggtttcccgcctcctcttcacctccttcgcgtcccgacgctccctcatggccgccgctgccgcagcagcagcagcagtttcctccccgattgctccacgcgctgtggccgccgcggcctcccgccgggggttcgtcacgtttggtggaggcgccgcccgctcctcgcccacgctgcggtccggccgcgggttctctggtgtgcaaacccatgttgccgctgttgaacaagcagttgtaaaagatgctacgaagctggaagctccagttgttgttgttacaggtgcctctagagggattggaaaggcaactgctctagcccttggaaaagcaggatgcaaggttctggtaaattatgctcggtcttcgaaagaggctgaagaggtctccaaagagattgaagcatctggtggtgaggctatcacctttggaggagatgtttcaaaagaagctgatgtagagtctatgatgaaagcagctctagataaatggggaacgatagatgtgctggtaaataatgcaggaattacacgagacacattattgatgaggatgaagaaatctcagtggcaagatgtaattgatctgaatcttacaggcgtctgcctgtgtacacaggctgcaacaaaagtaatgatgaagaagaaaaaggggaaaattatcaacattgcatccgtcgttggccttactggcaatgttggccaagctaattatagtgcagccaaggctggggtgaatgctattgcaccagggtttattgcatctgatatgactgccgaacttggagaagagcttgagaagaaaatcttgtcaaccattccattagggagatatggccaaccagaggaagttgcagggttagtcgagttcctggcccttagccctgcagctagctatatgaccggacaggtgcttacaattgacggagggatggtaatgtaaggttcgagttggcttgatgcacttctacttttgcttaacatttaggcgacgttggttcactttcttgtgcacgggcgattttgggcaacggaattagggttctctttttcttttaatactcaccgtggataaaccaggcatgtggaagttgaaat

SEQ ID NO: 38847 - DNA, 3996 bp, Zea Mays
tggcccagcagcctgagccagcgcgcctgtgcatcttcttccagcgtgccgtcgcctgcatcaagcgcggcgcacgcccactcgtcctctcggctctcgtccagacgcccagtcgccctagccataggcccctagccctagcacagcagcacaacagcgccgccccccgcccccggtggcccggccccccgcccgttcacccgcgcaaccgcgccgcgcgacccgcgtccggcggccgcccatcgccagtgccgtgacacgtcactccgacgccgtcgccaccaaatctcctggcaacgcctcacgtcttctagttctaattccagcctcactgctgccatcacctccgcctgctgtgtgtcttccacctcgcgctgccaaagccgacaaaccctagcccaactctccctaccctcgcccatcccactcctttcgtccgattcgtggaggcgacggaggggctaaggcatgacgaccgatgggcagctcagggagtgggtctccgacaagctcatgagcctcttgggctactccaagagcgtcgtcgttcagtacgtcatcaggcttgcgaaggagtgctcttcacccggtgacctcgtgggcaagcttgttgagtttgggttcagctcgtctgcggagacccgcaccttcgcgtcggatgtctacgccaaggttccccgcagggccagcggcatcagtaagtagtggcaacagattctggaaggaatgtccgtcgacgaacagaagaggaggatgaagaaggtggcatcggcagttctgatgaagagaaagaaatgattagagatcagcaggaaaaggctcagctagaaagaaacatgagagaaagagatgcagctaacacaaggaagttgatggagcgacaattatctaaggaagaacaagaggaacttactaggaaatctcaagcaatggacaacaatgacacatctgatctgagaaaattctcaaggcaagcgtacctgcaaaagcgacgagacaaaaaaattgaggaaattcgtgatgaaattctggaccaccagtacatttttcaggatctgaaactaacagaggcagaagaaaaggagttgagatacaagatgaagatatatgatcttgtcaaggaacatgttgagactcctgatgatgttggtgcgtacaaaatgcctgaagcttatgacatgggcgaaaatgtcaatcaagagaagagattcgctgtggccatgcaacggtacaaagatcctaaggccaatgataaaatgaacccttttgctgaacaggaagcatgggaagaacaccaaataggaaaatcgaaactgcaatttggatccaaagataagaagccgtcttcagatgagtatcagtatgtatttgaagatacgattgattttgttaaatcatcagtcatagaaggaacccagcctgaagatgattcagataaagaagacgttgaagcaaaagatattttgaaaagggagctccaggatgagcgaaagacacttccaattttcaaatttagggatgaactgcttaaggctgtagaagagtatcaggttatcgtcatagtgggtgagactgggtccggtaaaacaacacaaatacctcagttccttcatgagtctggttatactgcaaaaggaaaggttgcatgtactcaacctcgtcgagtagctgccatgagtgttgcagcaagagtatctcaagaaatgggtgttaaacttgggcatgaggttggttactctataagatttgaggattgcacttcagataaaacaattattaagtacatgactgatggaatgcttctaagggagttccttggtgaaccagatttggctagctatagtgttgtcatggttgacgaggctcatgagcgtaccctctccactgatatcttatttggtctagtgaaggatatttctcgttttcgaccagatctgaagttgctcatttctagtgccacccttgatgcagaaaaatttagtgactactttgattcagctcctattttcaagatacctgggaggcgatacccggttgaaattcattatacaaaagctccagaggctgattacatagatgcagcaattgtcactgttttacagatacatgttacccaatcccctggcgatatcctggtgtttctcacaggtcaggaggaaattgaaacagttgatgaaatccttaaacacagaacaaggggcttaggcaccaaaatctcagaattaattatatgtcctatttatgcaaatctgcctaccgagcttcaagctaagatatttgagccaacccctgagggtgcccgtaaggtggttctggccactaatatagcagagacttcattaaccattgatggtataaaatatgttattgatcctggcttttgtaagatcaaatcatacaatccccgcacaggaatggaatctctacttattaatcccatctcaaaagcttcggcaaaccagagggctggaagatctggacgcactggacccggaaaatgcttccgtctatacacgagttacaactacatgcacgacctagaagataatactgttccagagatccaacgaaccaatcttgcgaatgttgtgcttacactcaagagtcttggtattcatgacttggttaactttgacttcatggatccacccccatcagaagccctattaagggctctggaacaactttttgctctcagtgcactcaacagtcgtggggagttgaccaagactggaagaagaatggcagaatttccactggatcctatgttgtcgaagatgatagttgcttcagagaaatataagtgttctgatgagatcatctccattgcctccatgttgtcaattggcaattctatattttatcgtccgaaggacaaacaagttcatgcagataatgcaaggttgaatttccacactggcaatgttggggaccatatagcactactaaatgtgtataattcttggaaagaaacagactattcaactcaatggtgttatgaaaactatatacaggtgcgcagcatgaagagggcaagagatattcgggatcaactagatgggcttatggaaagagttgagattgagatttgctcaaacaccagtgatttagatgctattaaaaaagctataacatcaggtttcttccatcactctgcacggttgcagagggatggtacatataagactgtcaagaaccctcagaccgtgcatatccatcctagttcaggattagcggaggtacgtccgcggtgggtagtgtaccacgaattagttctcacgacgaaagagtttatgcgccaggtgacggaactgaagcctgaatggctggtagagatagcaccacattattaccaactaaaggatgtggaagactccggaacaaagaagttaccgaagggccaaggacgagctgcattgtagctatgatacatgaagtttcgatggatgtattgtgttggactcatcgtaggagcatcataggatgtatataactccttatatcacgaacaggatacaagatgtcacttttcattgccctgcttaggtttcagagtaagctgattgtgaatgtaaattgtgacacgaagacatgcatgtgaaccgctataattgtcacactggagggagcgccggcatgcaactttcgtgtcttccagccgctacgcttgacgatcgttcgcatcctgccgccgtcgcgactattatccaagaaaatgcatatgtgcctttcctcgccggcctcttggatatggatgtatgttgaacaaacgcctatcaagggaaggataaatgagggatgagtatgggattttgaaaaaaagaaatcctgaatctttctgtaaattgggtaagcaaattgagaaaaatggatgggttgggacggaatcgtgagtcttgaatctgaacaactcagggtctttggttgggaccggattatgggccacttgatccgaccaactcgtaaaaaaagtcaggcttgattgtccaaaaaaac

SEQ ID NO: 38848 - DNA, 2181 bp, Zea Mays
attgaatgatgcatctttttttcttggaatttgaattgaaacaaaaaaaacaaattagaaaaggaaaagaaaaaaagaagaaggccatacctgttgccgaccaggccaaaaaaacgctctccgttttttttcctgctggccgcagcatgcaactgtgtgggacccacgcaattgagcccccttctccctccgtattgctcgcatccatcgtaacaacctcacgaagtgcttaatccaatcctccacccacgtcgtggataaaagcaaggccatgacccccctgcgcatatctgcctacccatgcggtcctcccccaaacgtcttcatcatggacgaagccaagaagctgccagcgttgatccacacatatcgttcggtcctcctctggcgctaagagatttgctgccgatgccgcgattcacgcgctgaaccagcgttccgttgccgttttcctggaccgatggctagtatttagggctcgtttggtagagctccactctatgattctctagctccgagagctgattctctaatggagtgattctgggcgattctctggtaggagtgaatttgttgatgaattgcgtttggctgctagttgtacccaagcttgtttaagtgagaacctgatctgttctttgctcttacttcctcagcaaatatttcacaagctatcttaacattttcatcgcaccagtctgcattatcctccttcatggtgcttgcacactgaaagacgcgagacgaagagatggcgtagtagtggacggaaggggcttgggagtgttctggacggaaggggcggcagcctggatctccagcgtcctaggctagtagcggctggtagcttggcgccgccgcgccgcctccaaccctaatggccacggtctggacaaaagccaggctgggcttgtggctggatgcccgagcggctcggtctcggatcgtgtcgtcctccgcctccgacgccgcgccgttcgagaagcccagggccgtggtcaagaaggtcctcgcgcagtcgcagcccgagggtcagggtgccaccgtccgtaggagcatcggcaggcacgagctccgcaacctggacccgttcctccagctcgacgagttcacagtctccaagcccgccgggtttcccgaccacccgcacagaggattcgagaccgtcacccacatgtttgagggggccatcacccaccaggacttcgctggtcacaagggcaccatcaggacaggggacgtgcagtggatgacggcggggcgaggcatcgtgcactcggagatgccggctggggacggcgtgagcgagggcctgcagctctggatcaacctctcctccaaggacaagatgatcgagccgcgataccaggagctggagcgcaaggacatcagccgcgcggagaccgaggacggcgtggaggcccgcgtcatcgccggggaggccttcggcgtggcgtcccccgtgtacacgcgcactcccatcatgtacgtggacttcaccatgcgacctgggtcccgcctgcaccagcctgtcccggagggctggaacgccttcgtctacgtcgtcgacggcgagggcgtattcggacgggagacggccacggcacaccactgcctcgtcctcggctccggcgacggcgtcagcgtgtggaacaggtccgccaggccgttaaggttcgtcctcgccgccgggcagccgctcggtgagcccgtggtgcagcacggacccttcgtcatgaactcgcacgccgagatacagcaggccatggaagactactcctacggcaagaacggcttcgagagggccggccagtggagctcctccgcctgatcggcgaggctatcgcgttaaattaaataaatgtgtgtaatacacacagctcaacgcttcccttaagttatgtagcaacgccatttgttggtgattaacgagtgatcgagcaagcttaaaaaagttccactccttttaaacttatatatttatcggtattttagctaatacaatagtttattgagactattgtattcgtgtatcgaaagttatgtagcaatgccatttgtgggtgattaccgtgttttccggtcgaagtatcagctagttcaatcatttataactggagacatttgaccttgtttggaacttcacaatcatttaacttgttcgtgctatgaaattattat

SEQ ID NO: 38849 - DNA, 1114 bp, Zea Mays
cagcgagaaactcacgaaaagagaggagccgggaagcaaagcgccgacgactacgccgcaagtcccaacccaacccaccctatccagaatccaggtatatcagatgactcgacatgtcagttctcgatgtttcaaatgctacagtatgttaaataacaggcaaaaggttgagtggaacaataggggtttctctacactccatgcattggtagctgctgccgtttctttctacctggtcatgatctctgacctcttcaatgaagatgcgcacaatagcataataattgacagaaaatcatggctatccgattgcatgtttggggtctcgatcggttactttttgacagacttgacgatgatcatgctgtattttccttctttaggtggaaatgagtatctcttgcatcacggactttctatgtatgcaattggtcttgctttattgagtggcaaagcacacatgtacatcctcatggtcctcttcaccgaaatcacgactccctttgtgaacctcagatggtatttggacgttgctggtcagaagacttgcaatctttacttatacaatggtgtggctctatttgttggatggctgcttccttgatatgatttgttttgaagatgtgatagctgggggtaatgattagtgatggcttcactatacaaattgattgctcggataatcttattcatatatatgttcacccatatgtattttcatcttgatcaggcgagatccatcttcagcttagggttctacagcttggtggcagtgccgtcggtggttgcggtgatgaacgtattttggttctggaagatactcaaggggatggtgaaaaccctttctaggaggaagcacagcgaaaatgggagaacagattagaaggaatgaaggaaggatgctactgaactgtacacatgttcatctcaacgcacttacggcactcgcattcatttctcacacagatgtaattatcttgtcttgccgtcaaagattcaaagtcggaatcccgcaactcttaaattgttgcaacagtgccacatgcaccgttactgaatatatattggccactgtcagtgtcagcgtgctcgcttgggagctgattacacgcgc

SEQ ID NO: 38850 - DNA, 791 bp, Zea Mays
aaactacgagggtttcttaataagatagccatgactggcacatgcgcgtgacttttggccctcagatcctcatcagacggctagagttaaacccgaacaggtatgcacccgcggtcgaccgatcacgatccgaaggttcagattttaaagtgatgcgagcgaatctggtgcgtacatcaaagatgaacggtcacgattctattagatgaaagggtacgcctatgacctaatctgggtcgttcattgaatcaagggtcaccgcaccgcccccaaccacaccctggctgccaggcaccacccagagatggcggcaccgccgcgcggcgaggtacgccggtgaacggccgaatcaaagccgcggcgcaaaaattggtcacgggtgggcgcaacacaccgaggagggtcatccgaattgattaaatagcttatcaccagtaatggaggcagcaacagggttgcccacggcgtcacgcggatccgcagcggtgtttggtcgacgacgagcaatctcgcgattgtcgatccattgcgcgcccagcaagattctcaccggttgcagagggcgcgacgatccggaaatcagagttttcatcgcgcggcgcaaccatccttcactcacccatcaatggcgctccgggatgcacggtgcccatggtcgcagaacccatggtgactagagggatggctcgattgatgaaaggcttaggtttttatagtgcgacgaagttcggatttgatccatcatccagaattgcgcgcgcggatatcgtggcggagatcgcggcgccccc

SEQ ID NO: 38851 - DNA, 2602 bp, Zea Mays
cgagtccccacccccaggtacggacactctcctactccgcccggcgcccatccccgcgcacgcccagcagtccagccggaggccagatcaaagcgccaccgccacgccgcacttagctaatcccgccgctgccccggggtcgctaggaggagatgaagcccaaaagcctcccgttcatcgccttcgagcacaagcgggatgcgtacggctttgctgtgcggccacaacacctgcaacgttacaaggagtacgctggcatctacaaggaggaagaggaggagagatccgatagatggaagaattttctggagaggcagcctgagtcatctggacaggatgctggtgataatgctacgggtgatggttctgaatcactgcatgagaagaccgtagcagggccacagaagattcaaatatggacgccaattagatcgtccctgagcaacattgagcagataatgagcctgcgcatcgggaagaagcaatcttctgctggcaagcagcaagcaaaggacggaacccatcacgtgaaaggtgaagagagcaagttgtcggaggattcagatgacgaattctatgatgtagataaggttgatctgagccaagaagcgcaatcgagtgatactaggaatgctgatgttggaagcaggaaccaagaagaaaattacatttcaagggaagagttggagtgcctggtccatggtggactgccgatggttttgaggggagagctatggcaagcttttgttggtactggagctcgtaggatagaagggtattatgatagtcttgcagcagagggtgaattagataacaaaagttctccaacttctgaaggtgttcaagaaaagtggattgggcaaatagataaggacttgcccagaacttttcctggtcatcctgctttagatgaggatggaagaaatgctttgagacgcttgcttatagcttatgcgaaacacaatccatcagttggttactgccaggcaatgaacttctttgctggtctcttgcttctattgatgccagaggagaatgcattttggacattggttgggattatggaggactattttgatggctacttttctgaagaaatgattgagtcacaggtggatcaacttgttttagaggagttagttcgagagaagttccctaaattagttctccgtgtctgggatgtgcttttgttcgatggaaacagagtaatgctgttccggaccgctcttgcgctactggagttctatggtcctgcacttgttactacaaaagatgccggtgatgcagttacccttttgcaatctttagctggttccacatttgacagcagccagcttgtcttgacagctcgtatgggatatcaatccgtaaatgaaacaatattgcaagagctaagtaataaacaccgcccatctgttatgtctgccatggaagaaagagcgaaaggtctaggcgtttggacagatactaatggtcttgcatcaaaactgtataactttaaacgtgatcctgaaccactggtttctttaagcaactcagcagaccagttgagtgatgtgggagatggggatgccaatcaagaaagtgatcctgtaaacatggatgacgagtatgttggtgtgacagtgaaatctgagattgattctttgcctgatccaaaggaccaggttgcctggctgaagttggagttgtgccaactcctagaggagagaagatcagcagttctcagagctgatgaactagaaacagcactcatggaaatggttaagcaagacaatagacgccaattaagtgcaaaggttgagcagtttgaacaagaaatatctgaattcagagaggctttgtcagataagcaggagcaggagcaagcaatgtttcaggtcctgatgcgtgtcgaacaagaactgaaaattgcagaggaagctcgcatctcagccgagcaggatgctgctgctcagagatacgcagcaaatgttctacaggaaaagtacgaggaagctatggcttcacttgcccaaatggagaaccgagctgtaatggcagaaacaatgttagaggctacactgcagtaccaatctagccagcagaaagcactgtccccttgcccttctccaaggccatcaatgctcgatgcatcccctagtcaggcaagtcagaattcatcgcaggtgtttcagccaagaaggaaaaacttgcttggcccattttcgctgagttggcgtgataagaacaaggaaaagccgaacaatgttgaagactctgcgaacacaaagtttaccaatagtgatgaaatggtagatgagaagcagatggaaaccctggatctagataacgaacagagagcagaatcaactaaagaagatggcaagatgagagcagaaacccctcagaaagacgacgatctggtaagggtccaattaaccacggaccatttgaatggacaccatgaacagatgcaagaaataaaactggattggtaagcacaatggcacccagtccaagtaccttcggcaacacttctcagtgtatttgtgacctgatcacggtgccagttggtgcagcattgagggtggcctaatgttctttatatcccccccccccc

SEQ ID NO: 38852 - DNA, 302 bp, Zea Mays
ctcgtcctcaccctcctgctcggccactctctcccagctttcaacgctgtgctcatctcctgcccctgcgtgatctctatcgcgcgcagattttttttccgccgccgttctctgaaaaatcctgccgccggtgcttatccccgcgccgccgccgttgtttggtatttatctttcaccgtgcgtcttcttccctggaaaacgcgcgcagtttccctctgttatctccagtgccgcgcgccctgttcttctcctccctggcttgctcgccatccgagctcgcccatggccgcaggacgcgccgc

SEQ ID NO: 38853 - DNA, 2227 bp, Zea Mays
agtagccaccattggtgtctcggactctcggctcggtggaacgcaacgcattgcgaccgacccgcccactctctccacgactcaatcgctagactagagagagaaacccttgtacccgtgttccttttcatcccccattttctccgagtttccggcccatcgccgagcatcgagtccaaggaagcggagccggcggagaaggggagatttgactttcccgtcgggtgcctagggagcaggagggatgcagcggcggcggggccacacgtgggcaggggtggggaagacggcccaggcggcggcggcgcacgccgcgctcttctgcttcactctcctcctcgcgctcagggtcgacggacgcaccgcatactcctggtggataatattcagtccactatggctctttcatggtattgttgcacgcggaaggttttcaatgcctgccccttctttgcctcatggccgtcattgggcaccatgtcattcgattgttgcggcgcctttactaattgcgttcgagctgcttctttgtatatatcttgaaagcataagagttagaaatcatccatctgttgatctgaagattgtgttccttcccctgttggcctttgaagcaataatccttattgacaattttagcatttttgggtttcaatttcaatggtgtttcttatagctgctacaacattcacccttctcaagctgtctggtgatgttggtgctttgggatggtgggatttgtttataaattatggaatgctttgcatttcttgtctgtacaagatggtttaatcccatgattcacaagtctcccactcatggggaggctagctcatcatcagcgattagataccgtgattgggaaagtggtcttgtcctcccatcactagaagatcatgaacaagagaggctttgtggtctacctgatattgggggtcatgtaatgaaaatacctcttgtggctttccaagtattgctttgtatgcggttggagggtacaccaccaagtgctcgcaacattccaatatttgctcttttctcgccactatttattctgcaaggtgctggtgcctttttctctctagcaagattagtggagaaggttgttctgctattgcgcaatggaccagttagtcctaattaccttacagtctcatcaaaagttcgtgattgctttgcttttcttcatcatggttcaaggcttcttggttggtggtctattgatgaagggagcaaggaggaacaagcccggttgttctatactgaatctactgggtacaatacattttgtggctatccaccagaagtggttaggaaaatgcctaaaaaggaccttgcagaagaggtttggaggctgcaggcagcgttgggagaacaatctgaaatcaccaagtgtaccaaacaggaatatgaaaggcttcaaaatgagaaggttctttgtagggtttgctacgagggagagatatgcatggtgcttcttccctgccggcacagaactttatgcaaatcttgtgctgagaaatgcaagaagtgtcctatctgccgtgtcccaattgaagaacgcatgcctgtatatgatgtttaaacctcactaactcagcttaacattcaaatttgtacatatgggttctgtcatgctgtgcatttagtctcgatcacaactttaagctgattgaggtgtgcgtttcagaaaaaaagtctacaatatgtgtatatcatgccatgtctaaccaaaagcatggaaaggtggctgatgagcattttgccatttcggtccagttatctactgtaagtatgtggtcagtgtattccccttttgtgattggtagatgagtcagtcttgtttgcgtagcagcattttctcagggttatgcagttgttgagaagaaagtagaacaaaaacagactgtaaataaaaaaatactgccttttttaaatgtaatcctcaagtgtaaacctccctgttgtgccattttgtagtagaaaaatgtctgccgaaatttgtgaccgcaacgcttcgttgtctggtgtcttttcacaatgtgaggggtcgtcttagcaaaattatttaaagattgtggaagcatgtctggagaagaaaggttgcgtctggtctgtgccaaggaatcattgttggtatgttttttcaaaccgtattgcggtgattggaaccaatttaatcatgatactgtggactgctgtctccttttaaagcagagtataaatc

SEQ ID NO: 38854 - DNA, 3982 bp, Zea Mays
ggggcaataggccaactgaaccctgactttgcccgcacggtcagatgtagccaccgcctgacctccacaaccacagtatctaccgactcgccgtcatgtccgtttccgaggccgcttatccaccgccgcccccgtcctcatgggcacaacagatccgcgcggccgctgccgagggccacttctgcgacgctgtctccctcttcctccggatgcgcgcctccgccgcgccacgctcgtctgtcccggcctcactcccggccgcgctcaagtcctgtgccgccctaggcctgagcgccctcggcgcctccctccatgcgctggccatccgctccggtgcattcgccgaccgttttaccgccaatgccctcctcaacctctactgcaaggtcccgtgttcgtatctcgactccactggtgtggccatagtggatgtacccggatcatcaaccgcatttgagagcgtgcggaaggtgttcgacgaaatgatcgagagggacgtggtgtcctggaacactttggtgctgggctgcgcggaggaagggaggcaccatgaagcactggggtttgtcaggaagatgtgcagggaagggtttaggcctgactcgttcaccttatccactgtgctcccaatcttcgcggagtgtgctgatgtcaagagaggcttggaggtgcatggttttgccttcaggaatgggtttgatagcgatgtgttcgttggcagtagcctgatcgatatgtatgcgaattgtacaaggacggattattctgtcaaagtgtttgacaacctcccggtacgagaccatattctgtggaactccctgcttgcaggttgtgcacaaaatggttcagttgaggaggcccttggaatattccgtcggatgctgcaggctggtgttagacctgtgcccgtgactttctcgagcctcatacctgtctgtggtaatttggcatcattgcgcttcgggaagcagctgcacgcctatgtgatctgtggtgggtttgaagataacgtgtttatatctagctccctgattgacatgtactgcaaatgtggggagattagcattgcccattgcatatttgacaagatgagttcaccagacgttgtatcgtggactgcgatgatcatggggtatgcattgcatggtccagcaagagaggcacttgtgctgtttgagagaatggaactgggaaatgcaaagcctaaccatatcacctttcttgcggttctgactgcatgtagtcatgctggcttagtggataagggctggaaatatttcaagagtatgtcaaatcattatggaattgttcctactctagagcattttgcagcgcttgctgacacccttggtcgtgcaggagagttagacgaagcatataattttatatcgaagatgcaaataaaaccaactgcgagtgtctggtccacattgttaagggcttgcagggtccataaaaataccatgttagctgaggaagtagccaagaaaataatggagcttgaacctaggagcattgggtctcatgtagtattgtcaaatatgtattcagcttctgggagatggaatgaagcagcacacctacgagaatccatgagaaaaaaggagcagatggcacgcgaaggtcatgtacccaatacagaggatgttttccaggatattgaagaagagcacaagtcatatgtgttatgtggtcacagtgagaaacttgctatagtgtttggtattataagcacgcctgctggaacaaaaattcgtgtgatgaagaatctccgagtctgtattgattgccacacagtaactaaatttatttcaaagttagctgatagggagattgtggtgcgtgatgcaaaccgtttccaccactttaaggatggaaactgttcctgcggggacttttggtgatcgggtaaccacttgggattatcatatgtgttgcgatataaagtgaattgcttatttttctccatctacttaagcttttgagttgaattggtcggatcatgcaatgagttccaatcattgcgagaacattagagccatctgaacactatatgttcttactctttgattatattaagtttcatctgcttttgatgccagttctgcaatccatcaaagtactagctacagtgtgctcaatttctcaaattatgttttcattgttgaatcatggtcaccttatccccaccttgcataaagaataaagaaagattgtgaagatacagaaaaaaaaaatcgtcattctcatttggtggaaggacaatgcacacagattgtcgcttttggttcacatggcccaggatgtccttgcaataccaatatcaacagtagctttagagtccgtcttcagcacaagtggatgtattttggaagactttcgtacctcccttactctattcatgttggaggtccttgtatgtacccaagattggccccgaaggtctactcccattgacatacaagataatattgaggaattggccattatagaaaaagagctaattgaagaatttggtaatggtggcaaaggaaaaattaaggagtctgcttccacttccaagtctcaagcaacagcaactagcagtaggtgcctctccaaaggtatatatattttgttgtatgagcccataactgtttactggtatgactatgagcgcatgactgtttattgctatgagctgcactgtttacttatactccatccgtttctttttaattgtcgctggatagttcaattttgcactatccagcgacaactaaaacgaaacggagggagtatatattttgcttcaacctgtgtatgttggacagaatgacaggataactggataataagtgtgctgtgtgcaaccggtgctgcctgtgtgtctgtgcatgtccacgtccccctttggcgttggcgatctccctgtctccctgtgtgcaagtgcaacactggaagtctgcaataggtgctggcgtgctgcactgctgcctctgtcgactgtgtctttgtctgtgtgtgcatgagccatatccctgtctctatttggctttggcgtcttgggctcttggatcttggcgaattgcgattggcgatgtccctgtctccctgtgagtgtgtgcaaccggtaatagcagtagcactactgcagagaacctgaatgtatttttcatgctgccagcctgccagtctatgaactatgatcaatgtgaatcaaaactttgtattcaaatttatgagttaaatttgtgagttagaacttagaatggctaagtgacattcttcgtatgtttttcaaaaatgttaatcagaactttgtatgcttccactttaaataggcagttaatgtggataaaatcaatttggctaccgggagtacccatgcccagtcctgcccgtgtagagcgcaccgtgtcggggcatcgagcacgcgtgcgacaggtggcgcggcgctcgagcgcggagccggggcgtcgagtgcgtagtgttggtcgacctcgaccacaacttctggcgacgaccgacgagggcacattgtggagggtgccgggttgctggctgcaggcactggtggtatgtgaacctggggcaaagcggagaagcttgatcttcgaggggttcacatacgaacgaagtcgggtatggaggcttcgacttcatgtcatcactatgcgaagcaggcgacaaaggagagatattccaaaagcccggctattgcgacggatacaagaaaagacgatttcgcccccacaagtgttatggatcatgtaaataggacttttgggcatctttgtaattttgccttcatacaaagttatacctcaccactataaatagagaaacagtcccatacattacgtacacgttgttgatcaatgtattctgaaaccactctgccttcgaaggtgtttttcgttacctttgaactcctctttgtaaagctgaaggtatctttgtaattatttgtaagtaaaaaaaagagaagctgagttcattt

SEQ ID NO: 38855 - DNA, 969 bp, Zea Mays
tccagagcatccaatctagatccaacggtttcatatgaaaggggttaaaagtaaaataggtactatgtttcaggtggaaggggttaaatgtaaaataacagtcatcattagatctagattagatgcaccaaatcgtttgattgcaaacttgcaccaatataagtgattgcataagatatttccccgccttcttcgtccacgcgaacgtggttgttttcaacagacgctcaattgcccaccataacaccgtttcgctttctcgctccaactcccacagaaacggccgccagcgccgcaggcccgcagcgttgatggccgccgcacctggcgcaccagaggagcgactcggcgtcctcactcctcaatgcctccgggagaagaccggaatctccgagcccaggtcggaggtgcacagggacggaaactaccaccgagcggtgaacgtgtggatctacagcgagagcaccggggagctgctgctgcagcgccgagctgattgcgaggaattgtggcctgggcagtgagacatcattagcgccggccacatctccgccggcgattcctcgcactctcggcagagggaccttctggaagatccaggcatcaaccatttcagtcgatgctttcgagctcatgtgtgtgtttcttcaggaacggtgacccatatccacatgggtatacgtatgagataaattcatatccacaccaatggatataggtgatacaataggttttttgttgttgtggtcagaggcggagctacgctacgtagaaattaaggggtgcacatgcacccaaaaaatggaaatatagtggtttggaccaaagttttaccatatatgcatcacctgtaaattgttatcatgcatcctcaaggtatatgtatcatcccctgacttactctagcttcgctactggttgtggttatcagtatatgataatatatgtaggtatttacctgttgccatc

SEQ ID NO: 38856 - DNA, 1238 bp, Zea Mays
gtttagaaactctttttttaactgtttgccggagccggaggcggtttcgactttggagccctccgaggctcttcagaaagaaacaagaaaatctgcaaacgaattgtttgtccaggagaaggcccccgacgggattattctttctccccgcgtgctctctatctctcccctctttctctccctctgcccgacgactaggccgccgccgccacggccccgccgccgccgccgtgcccaggtctttgtcggtccttgtccggcaacgagcaccctacagatggctgggaggcacaccattattctgatgcagccatctcaaaatagggcttctagaacatttatggattacaattcgattaatcatgcattggatggtatgtatgatttgaaacagacctgcttcagaaaaattcaattagaactctctagttagcattatttgtatgcccatggtggtcttcatgtcatcctatactcagggaaaaaacagtgatatttaactatatcttgtagaaacgtggtattaatctatctttagaggttttgatcaacatgtatggatgtagtcctctttgtttaaacttgttgctgggtgacctgatgttttacccctagctttactgttagcaataggctactttgacatggatcaggcttatgctcttccaaaaatcagatttgcatatctgcactgcttcttgatttatttcccttctagagttcacaagttacttgtaacactcaactgaaatggcaggaatctgtgggctttatgaaaggaaaattagggatatcaacccaatgatcccaaacataacttatgacatcagcgacctctataacttcattgatggcctagccgacattagtgcgctggtttatgatcactcgattcaggcattcctgccatatgatcgacagtggataaagcaaaagttgtttcaacacctgaagaaattggctcagcggtagcacaactgttgtttgttcttgatgccttttatccaacaaacaagcatgcgtgacaataggtgtccaatcagtggtattgggagttgtttcttgtaaactttgtaatgttacatgacagatttgctcccttgtattctggatgtttgactcggatttcattggtggcttgcttgtggttgtggtatgctaaacttgttttgtttcgcagtgctgggaatcagataacccttttgcctgttgtaaaaaagattttttcctgtaaaaac

SEQ ID NO: 38857 - DNA, 3675 bp, Zea Mays
cgttccttccccaactatcgttaggcttctccaccccgccctccccgccctccccgccgaacgcgcctcactctccctccatgcagatcaatgcgtccttccaccccaaccgtgctcctcgcccttctctcgtcgtcctcgttccccctagactggcgtggagtgaagatccatccggactccgattgatttcttctcctgctgaagaaacggagagattcggccaagattgggatcaatctgcgcatgggtcggtatcgtataagaacgtatagttgcaggtgatcaagatccaatacttgaaaataggatgttgacatgttactgtttagatgacaccagatgataatgcccttatagctctcaaaaaaggcagtaaacttatcaagtatagtaggaagggaagacccaagattcgtgagttcagactttctagtgatgaaacatcattggtttggtattcccatagcaaagtgaagtaccttgtactgtcttctgtctctagaatcattcctggacaaagaactgctgtatttaggaggtttttacgccctgagaaggactacctatcattttctttgatatacaagaacggacaacgttcccttgacctggtttgcaaggatcaagcagaagttgaggtctggttttcaacgcttgaggcacttattacttcatgccgtaaaagttattcagctgatggtccaagtgatagattatcagtttctgacgaagtatcacattaccaagatacttttcatgatacaacactagatattgcatcgagtatcacacgtacttttaactcagcaaaaacagatgttgtatctgatcgtgcaaatatgctaagagcaagtacagacagtagccggcttagtatttccagtgcccctagttcttcaagtcaaggttctggacaagatgacattgaatcccttggtgatgtttatgtgtggggtgaggtgtggactgatatgatccctgcagaaggatccgcaaactatttgtgctccaaagcagacattttaattcccaaaccacttgaatcagatgttgtcttggacgtacaacagatagcgtgtggttataggcacattgcactcactactaggcaaggagaagtatttgcatggggcgaagaacttggcggacgacttggtcatgggaccgatgcagatattagccgtcctaaacttgtcgaagccttagcagtgtcaaatgtagaatatgttgcgtgcggcgagttccatacttgtgctataactgcctctggtgatttgtacacttggggtgatggatactacaatgctggattgcttggacatggtgctggaactagtcactggcttccaaaacgagtctcaggacctttagaaggggttcaggtattgtctgtttcatgtggttcatggcattcagcactgaccacatcaagtggtaaagtgttcacctttggtgatgggacatttggtgcccttggacatgggaatcgtcatactgtcgcatatccaaaggaagtcgaaactttgagtggatttagaacaataaaagttgcctgtggactctggcattctgcagcgattgtggagaccactaatcaggcaggtgtgaatgtgatatccaggaagctatttacctggggtgctggtgataagaatcccctaggtcacggggataaagatgctaggctagttcctacttgtgttcaatctctcattgattataatttccatcaggtagcttgtggacatagtatgaccattgccctttctacatctggtcatgttttcacaatgggcagctctagcaatggccagcttgggaatccaaaatctgatggtaaacatcctaccccagtacaagataggctggctggagaattggttgaagagatctcatgtggctcatgccatgttgcagtcttgacttcacgaagcgaagtatatacatggggaatgggagccaatgggaggctgggacatggtggtgttgaagataagaaaaaaccaactcttgtggaagcattaaaagatcgtcacgttaaaagtatagcatgtggttctaatttcacgacctgcatttgtatacataagtgggtttcaggtgctgatcagtctgtctgctcaggttgtaggcaaccatttggcttcacaagaaagagacataattgttacaattgtgggcttgttcattgccatgcatgtagttcaaaaaaagttctgaaagctgctttggcaccaactcctggcaaaccacatcgcgtatgtgattcatgcttcatgaagcttaaggcagcggagaccagcagcaacagctcacatagcaaaagaaatgccattgctcgtcgctctgttgatagcaaagacaggtcagagagaccagaaataaggtcttccaggcttgcaactggatcaacagcagaaccactcaagcaagctgagctgaaagcagttagaaacgagataaaaccagatcctatgtccacgatgagggcaccccaagttccttccatgctaccttttaacaatcttgcttttggcgcaacatttggtggtccagctagtctgaagcccatgacaatggctccaatgccaatggccatgcctatgtcaccagctcctctcacaaagaagccaactccagcagcagcaactcctctttgtggtaaaagtgataccgataacttgaagatggctaaacaggtgctgaatgaagatatctcaaagttgcaatctcaggttaataaactgaaacaaaaatgtgatgcccaagaagagcaactgcagaaagcggaaaggagagctgaacattctgcctctacagctgcagaagagtcttcaaggcgtaatggtgtcttggagttcattaggttccttgacaatgagctcaagagcatcgcagatagggtgcccagcgacgctgccgacggcttaaaagccttgcaaaaccattcggagaggtttctcacagaacaaggtgttcgtccactggaagccacaggtatgcatcgtaagtgcgcaagcataggcaacctcgtaatgtctcaggacggcagtgctggaaacgcgagcagctcggctgcttccttggcgagcgagtctccatgccaccgtatcatggagaacagctcgagagctaacggcgacttagcaccgaagctcggtggtacccatggagaagtgcagctgattgagcagtttgaaccgggggtgtatgtgacgctcatccagcttagagatggcactaaggtgttcaagcgtgtccggttcagcaagaggaggtttgcggagcagcaggccgaggaatggtggagggagaaccaggagagagtgttcaggaaatacaaccacccggccaactaaccagcctcaccagacttcaccattggacacttcaagaagaaggcaaagttttcttcatgttgcttggggcattgctcctgcggctgtgtgccgtgggcctgtggcgatgtagaattaggttgtggatggggaagatgctgatgtagattctcattctgttgttgtttacctcctacagtttaccctttctctagctcacctcctacagtttactgtttcgcagttttgatatctcaaattattcattcaacagccgtgtgtttggttggaatgtgtttcgttggatcgcggcggtgaaaaaaactgacgtgga

SEQ ID NO: 38858 - DNA, 2118 bp, Zea Mays
ccgctgctcgaatagatcgtctgcagtcgcgtgactcgactttaccccgctgctccgcttccctctctcgtgctcgccgccccacagctcgaagacgacgaggtggcctcagcacacgcgcgcgcaaccatggcagctgctcaaggtggcactgttgtgtgttcatctgagaaagttgagtttctgaagcttcaaaatggcagtgatattcgtggtgttgctgttgctggggttgaaggtgagcctgtcaacctcacggaagatgtcactaaagctatagctgcagcttttgctgcatggctgttaaacaagaaaccagatggcttgagacgtttaagaatctctgttggacatgattcacgaatttctgcacataaattgcagaatgcagtcactcatggaatcactactgctggacacgatatcctacagtttggattggcttcaacgcctgcaatgttcaacagtacacttacagaagatgagagaagtcatttacctgttgatggagccataatgataacagcaagccatctcccctacaatcggaatggtctcaagttttttacaagtgatggtgggctaaataaagctgatatcaaagatatcctggagcgtgcttccaaaatatatgaggaatctgcacataataacctgaaagaacagggggaagcttcgaagggagttgtcactaatgtggactacatgtcaatttatgcttctgatcttgtacaagcagttcgtaaatctgctggagacaaagaaaaaccattggaggaactgcatatagtcgttgatgcagggaatggtgctggtggtttttttgtggataaggtactcaaaccattaggagctgttaccactggaagtcaattccttgagcctgatggtttgtttcccaatcacattcccaaccctgaggacaaaaccgcaatgaagtttattacacaagcagttcttgataacaaggcagacttaggcatcatatttgatactgatgttgacaggtctgcggctgttgattccaggggtcgtgagttgaatcgtaaccgattgattgctttgatggctgccatagttcttgaggaagaactacagttgtgacagatagtgtgacttcagatggattgactgtatttattgaaaataaacttggagggaagcatcaccgtttcaaacgagggtacaagaatgtaatagacgaggctattcgtctgaactctattggtgaggagtcacatttggccatggaaacaagtgggcatggagcgctgaaagagaaccactggcttgatgatggagcataccttatggtcaaacttttgaataaacttgctgctgctagaacactgggttcaagtattggtagtaaagttttgactgatttggttgagggccttgaggaagctgatgtgacagttgagataaggttaaagattgatcagaatcatgcagatttgaaaggagggtccttccgtgactatggagaatccgtcttgagacatttagagaatgcaatcagcaaagacccaaatctccgtaaagccccggtgaaccatgagggcgtaagggtttcaggatatggtgggtggttcttgctgaggctctctctgcatgatcctgttcttcccctaaacattgaggcacagagtaacgatgatgcgattaagctggggcttgcggttcttgctgctgtgaatgaatttccagcactggatgtgacggcactgaacaaattcgtgcatcagtgaatataagggacggacattggcatcataatgtgatcagcttcgcatggtgtcgtgttcgccccggtcgaacatgttctacatgtggcacgagtatcatacagaaatataccagtttattacttgcacaggctttttagtttggaaagacaagggagatttcagtgttgagatgattcttgtgtgtgtttataccagctatcagagtaagaatatgcgtgcgtactgttgaggctgatctttacttgagaataaggtttgagttacctgagtatttttttaaaaggatcaggaggcttgctgtgatgtgaggccacgaatttgccaataagtacctcgatttttctttagcgatttcacattggtttga

SEQ ID NO: 38859 - DNA, 468 bp, Zea Mays
atgctctacaagtcctccagctacagcttccccatgaagctggacgcccaccaggtggaaccgtcgcagaaggaggacaacgacgactacctgacccacttgctgttcaccgaggacaacgacaaggacgagctggtgaacgtgccggggtctgtcaccgacgtcatgcgcggcgcccctgggatatatatatttgaatgtcgtggccctagtcccatggattcgataagacggaagcatcgcgtcgccgccggtgttgagcaggagagcagcctagtgatcgaggggcggagcgatgatcaccgggaccatagggggttgtgcgtagctttctggagcacagggtcgatcgtgaagccagagatttctcgccgaaggcgagcacagccacatagccatgacttctcgcgggcagaaggggttccacactgcaaaactttagcgaggtcacgtgacatctaaagagca

SEQ ID NO: 38860 - DNA, 871 bp, Zea Mays
ggtctgagtagcattccgaatttcagattgaggttaaaaaagataccagcggcgacaacatctggtagatgtgacggagatatttaatcaacttggccgtgagaagaagcggcgcctttttaagatagtcagcctcatagttctcctgttcctgtccttgttctggatgatctggagtgtgttgtcggaggaggacgagtaggctgacaagatccggatggtagctcactctggccttgcaatcgttagttaggtaacaccagatgagggttgccatggcaggctaaacatgtcttagcgttatcactttgatactgttaattaacttttgaatctacggttgaatgtaggctatctggttcaatgtgaggcaaaaaaagaaaggaaaaaaaaggcaacatgcccccccctccccccaacagtgagcgagattgatgcaccaggctggttattgttcagttcagtggaagctccaactgttgtagcgtgcgccatgtgtatcgtgagccattcccgccatttgttgagcttgattggactgcgcatcaatactcacggggcaaagaaatagttacacagattaagtatgtgctctttttaatttgcataaaccctggtaagctgccaccatgtttgatggttcattgttttatcttttgctggagttcccctcgtatctcatgttaccccgccggcccgcccctagtcgtcattagcagtgcatttgctggttaaattgccgccacactgagtttccagcgcatcttgctggtactggatgcagctcatcaccgggtgctctgtgagcagctgtgctggaccaggaactgcagatctcactctttatcgctccctattttaaactttactc

SEQ ID NO: 38861 - DNA, 1383 bp, Zea Mays
aagtacctgcacgcactttgtgcatttattgttcgcaccgtactgcagaggtcacacacttgctgggtgttcttggatttgggggattttgctatctcttgggtgccagaccacaggatgtgccatatgtgtactgcctgttctatgtcatatttgttccgctccgctggatttactaccgctacaagaaatggcattactaccttctggacttctgctactatgccaacacctttctccttgtaatgattctcttctacccagaggatgaaaaactttttatggtttgcttctcgtttgcagagggtccgcttgcttgggcattaattgtgtggcgttgcagcttggttttcagttcatttgacaaacttgttagtgtcctgatacatctcttacctgggattgttctattcactatccggtggtggaatccacaaacatttgctgccatgcacccagaaggaagagatgctagagtcacatggccatatgtggaggacaaatcatatctgtggacatggcttttttttgttccgctagctgcttacaccctgtggcaacttatgtatttcctcatagttaatgtcctgcgtcgacagaggttgttaagggaccctgaagtcatgacatcctacagggagctctcgaagaaagcacagaaagcgaacaacatctggtggaggctgagcggactgctgggtgaccggaaccggcaggtcatgtacatactgctccaggcgctgttcacagtggcaacaatggcactgaccgtacctatattcctgtcctaccggatgcacgtggtgttcctgatactcaaggtgtgcgcgtcgacatggaacggtggcagcttcatcttggaggtgatgcctcggcaagtagtgcagaagcagctgaagaaactggacatgaagcccatggaacaggggagctcgacacaaggtgcgccaggtggtgatggtggcacattgggtaaccaccaccagcacacatccgaggagcatatccaggagtgaggaaattgaagctggatgtttataggctggacgatatggggtgagagattgtgcgtgcccatcttttgtcgggcttgggcaaagatatgtcgagatgtttactttctctgtagaatttcgtgaagctgttgcattgttcgtttgaagatggcgacgatgttcagatgatgcttcatgttgaaggacatatctttatttgcttcattgtacccagattttatttgcttcatgttgaaggacagactatgatgatgcgtgctgaggtgatttgcttattttatttgctgcgtgcaagaaaaggttcctgggagatgccctgtaaatgcagtgggtgaccacctgtgttgactgggaccaagtcagaagg

SEQ ID NO: 38862 - DNA, 1411 bp, Zea Mays
atcctttcacccttcagcccgcgtgccctctgtttctctcccggttcttcccctctcttgcgacgacagggttgggtaacgccgctcgccgccgccgccgccatacgcaggtgccgaggccttcgtcgatctcttagccgtcgacaagcacccaaggatagaatgagacggcaggggcaatatggtgaagcggatattaactctatggttgctgcccagttgcatcactaccaggcacagcaaagggtacagaaacaccctgagaatagctacactggaagagatcctgcacaagcttctgcggagcatcagtacactccccctaaagcaagacagagtcaatgggatcgaggtggaccaaatgcgccaagccaggttccatcatatgcatataacgaagcccaaggtgctggaggtgcgcaatccttttatgatgggcagagatctgatacaaaggttggtctagaaaagcagcccagcaaggagtctagggagcaacctcgtactgaacgaactgaaacaagatacgagaattataatcttcctcggacattcgaaggtcttgaacaaagtttccatgaagacattattttgctatccaaggaactacaggaggcagaggatgctgaaaattctagacacatggagagattgaaggatataaatacacagtaccaggagaaactattagcacttagagctcggcaagcgaactatagagatgagttcctgcgcaaggaatctctagcacgccagcagcaataccagcacgccagcatgagccattacgctagcaattccacggctggggagcagcatggttataacccaacggcagcaggcacgcctcctgttgctgctggaggtgcttatggtgaggctcatcggggttatgcttctggccagtatgaatcatttagcgatcgtccagattatccagagttccatgatgggggcagaggtcgtggtcgtagttctgagcagcgtgctcaataccctggtggtcgtgcttataattccggtggccggcgattctagatatgctttgaactttgaaggacgatctatcactctgtcaagcgagctcatatcacctgatgtcagtgtgctgtaccgtgctatactcgaccgagaaacctaagcgctcataaaacttgttctacaattcaggtgcatcgaactactttatggttttgctagagttcattctggttataattgtagaggaacgaaacgatgagagaacactgacttttccgtttctctgcattcatgtaatatgatctcggaagcaataacatttcatcttctatagcttcgagcatcagagagatggtcaaatgacactgatttgcattacatgtgattgtgaaacatttgcttttgaaaatgccaataaaaagaagcatat

SEQ ID NO: 38863 - DNA, 1214 bp, Zea Mays
gatcgttgtatctaaccattgaacaagacagtgatcctttgggttctgctttttgctgtgctccatttgttattgaggtcttttgccttgatcaccgaagttatacatcacaccaatgcccaaatgcaaacatgaaagacgtcactgtcctcatctgcccactctgtgctaaaggtgttcgcctcaatccaagtgaagacccaaatatcacctgggatactcatgttaacactgattgtgatccatcaaattaccaaaaagtgatgaagaaaaagaaatgccctgttcctgggtgcagagagacactgacattttccaacaccatcagatgcaaagattgcaccagagaacactgcctaaagcacagatttgggcctgatcataagtgcccaggaccaagaaaagtggattctggctttccctttgtaagcatgctaaggagaagtcagaaagcggagacacgctcaaatagcagtaacaacaatggttcttcgtggtggagctccagtcttgtgaatgcagcaacgaatttcaaatcatcagccgaagctggaatgcagaagctgagcaccgtgactagccaagccttccagaaggctaaggatgggatcgccccaaatagcagcagcagcagtggtgaccttgtggagcaatgtgttcactgcccagcaagattttccaccgtgggggccttaattgaacatgttgagaaatcccaccagatcaactcacaaccaagtcatggccgagtgacgattgatgtttgcccaaaatgcagcaaggcgttccgggatcctgtgttgcttgtggagcatgttgagaaggagcatggaggaacgtcaagagtgtagtgtaaagcttcgtgtgtactcttaacctttgtaatgtgtaacttttcgttaccttttctcatttcatcaatttgattatactctacacttttgggctcaacatttgcccacaggacaagtatattacgctggattgaaggcaaagcagccattgtccatcattatagaaactgaagtaagatttgttaagaaaatgttaatatctgtcgcaactggtgaaaaaaaaggcagcagctgttcttggccttcgtatggtttgcctcgtttgttaagtgaagagttcatgtgtcagtgtgtcaccatttaccgttggtgttactaataacacgttcgggaatgcggacaattctaaccgcttggctg

SEQ ID NO: 38864 - DNA, 3102 bp, Zea Mays
gaggcaagcacgcgcgtgacgaccacccctgaacccgtcagcgacaccgtcaaagatctgaaagcaagttgcagtttggcactccggcgacgccatgaaggggggtttaaagaaatgcgggcccctctgttctgaggtcaggcgacgggtgcggtcgccatcgccggggggcgatgccgcgtccgcgtgcgcgccggcggcagaatccgcccttgcgcctggacaggagctattgggcctacggctgctgcaaagattggcgaggcagccagggatgtatctggacggactgacgacggagatctcggttgattgtcctggtcaaacactctttgtttctgtaaatggaagttggataggaaacacaaaggccctttttggtggttgatccctgatcggaggggattggattcattggggaaaaaacaaggtttgtttggtgatcagagaattgaagtgggaaaattctcttgctattcaattatctggagaggggagggtgagctgagaggggtttcatggagatggagggcagaggcctgtctgatttgttcaggaacaccagcgaggagatcttcctcaaggcagtgatggagaactcgatgggagtagcagcagcgccaagcatggagatgctggggttcaagaacacgtcgcgaagtctcagagaagacagcgaggagctgttcaacaactggcttatgaatggagagatccctggatttgggtcagtgaacaatcaccctcgacaaccatctaggttgtcatcagaagccgcaggccttccgaatcaacagcatgacattgctcaacaaagttttctcactgacaacttggttccacagaatttaacaattccttctgtcgaatatccaaataaccacaaccagcaatcactcaaaaatgcagcagagaagggaatgcaagccagtgacctacttctagcaaaagcctggttccacagcactcaaccaatgactagaagtcgttcgtcagagttaaggaggaggtatgctgcgatgcaaactaatatggcaccaataacaataggaagcattgaaacacctaaccaattaaaacaagattttacaaacacaacaaacatcacaccaatgagcaacacacttgttcatacaccaaagtttgtatctccttcaagttcatcaacatcccctctggataatccacatgtggcagcacaagatactgttacctcagtggtgagcatgctcaaggacacacttgagcgcaagaagcttggtagccatgctaacaaagacacctcagcaggcaattcttttggattctatgacactcagcagtttcaacaaaacattcttggaggaacagatttctttcccatagtgacaactgcccaagttcaggattccctgatgcttcccaaggttgacaggcccatggaaccaaacaatggtaacttcgttgctcctgcaaaccaggtttggttcagtgcagcttctcgagagccttcacacagtggatcgtctactgctatgactactcattcagctggatttgaaatgtgtgatgagctacctcctgcagcgcaagcgatgagtgtttgtgagagcaccagaaaaaatgctgcaaatggaacaaccgactgcaaatcaaaaggcaaagagtatagagagagggtacaaaaggataatttgaaagatgggaggaagaaagcagccctaactcgaataggatccatttcatctgaacaagcagctgataatggagatcctacaaagaagcgcagggttgagcgctcacgcaaaatggcagaagcaaaggaaagaagttccacaccagtaataccatctgatatgcaagccgtacttaaacgctgtgaaaccctagagaaggaggtccgatcactaaaacttaacctgtctttcatgaacaggaaagattcagaacagaccaagcagatcgaggagcttcagaagcaaaacgaggatttggccgaagagaaggagcggctggtggaagagatcgaaaggattgtctctgaccccaacacatgaccgcccaatcatttctgacatttttttatatactaatagaattagacttgaaatggtcctagatacaaatacacatacacaatccagcagggggcagcaagaattaagtgctggcctaaatgtaccattctttccttgttttcacaagtgtaacgtatacgaatatcaacaagcaaagggatcagggattacagtttatttcctgcagcatgttggcctcatgggtatcaatcagaacatgcgtgtgatatgaatgtggagtatgtgtgttatgtgtatctagttgcaaccaataaaaacagaacatgacatgcgggtaatcgttatttcagtagtagatttgaacaaaactcagcagtcttaattagattgaaaatcgcaaagcgaagacacctacggtttttccctaaagaccatcttaaaaaaaggaaaagaagagactggaaaaaaaaacaatctccttggtccttgctgactccatcggtcactccaatgcgatgcgagcccatcaaccttttcgctcaccagcagccgctgctgcggccgcaatggccactcgttccagttctttggcgtcggccagccacggccgccgcctcaacgccgccgtatcttcaacgtcaccggcggcatccgacgaggtgccatcgaaggtgccgtcgaacggcgcctcgcagaaggccatcgtggccacgagcctatccaccggccgcttcttcgtcttcgcggctgcggccagcctcgccggggcctcggggacgttcgttgcgcaggcgcggcctccgacagcggcacctggcgacagagcccaggcgccgtcgaacggcgcctcgcagaaggccatcatggccgcgaccctctccatcggccacttggcggccagcaacgccaacctcgacggcgcagccttgggaacgttggatgaggatgggctgttcccggcggcaagcgacgacgcagccgaggtgcggtcgaacggtgcctcgctgaaggccaccatggcaatgaggctctccatctccatcgccgctacctcgagtctgttcgattggttttggtcggggat

SEQ ID NO: 38865 - DNA, 2105 bp, Zea Mays
gcaacacgtagtcccaccgcacccgactccttcgattatttgaatatagattccgtgggaaccatccgcccgctcgccggggtccagccgtgcaacacataacacgcgcccgcgttggcgtattctattcgccaagagccaaggggattggggaggccgtccatgttgcgtgttgtttagacgcgccaaaaggcaaaagcgtggaggaggctcatcaagcacaagcacgccacgcgatccacacacggcaagcaacgcccagggctcgtgctcgccccgcgacccgcgaaagatctgtgctggttcgctcgctcgctcgcgccgcgccgccgcgtgggggtgccgatgagctgcgcggggcaggccggcgggtggctgctcgactacgcgctggtggaggaggagatccagggctccgagttcatctacatggtcgacgacccggccgtctccagcgtgatactggggtttgatgctcccaggaaggaggacggcgtccaggacaaccccggcgccaagaagaggcaatctttctcttcttccttcctttcagttgaccctcaacataaagttaagcttggcgaatttcgcatgcctagtaggagcttgcagagatataatcacgaatgggttgggatgtttcttgtttgtcgctagtattactattaccttaattgttgtgctggagtaatctggcatacaaattacttgattaccagtactccgctctgattgacacgagaggtagaactagtggggttcaggaattggcaaacatgtcaatcccgtcgctgtagaagaaaactcacagatttcaggttgtccagaaaggatgcagtgcttgcggacacgtctagcgaatttgctttctcgtaattaactccactttgagagctactacttgtgcgaattcaatggtcccattaatttcactgtactgtccaaataaagcggaaaagtgtccacatcacactaagtccaattctgttgcccctgaagtccgtgggcataatttgctgtgctttcctgtttccctttcttctacgcagatcccggccggagtccagcgcgccacccggcaccaaggcttgccgtgagaagctccggcgagacaggctcaacgaaaggttcaacgagctctgtgccatcttggaacccggcaagccacccaaggccgacaaagtcgctatcctaagcgacgctgcccgtctcctgaaccagctgcagggcgaggcccagaagcttaagcaatcgaacgaatcgctccaggagtccatcaagagtcttaaggctgagaagtccgagctgcgagacgagaagacgaggctcaaggctgagaaggagaggttggagcagatgctcaagggcgtcgtcagccacgccgcggtggctgctccggggcccttcgtcccgcaccctgctgcggtcgctccatctttccaccaccacccggcggcgtttgctcaggctggaaagttcgtcccgtaccccagctacccgccgccggctgcgttctggcagtggataccgccgacgtccctcgacacgaccaaggaccccgcacactggccgccggtcgcctagccgacctaccacctcaccgtggcatcattcatcggtgatgcgttgccgtgtgtactgaatttgatcgaagcatgcctgaaaaaagaaaccttggctgctgctcgtgtcaaggacgtgatgtgctgaagttcaggcgatctaggtcggctggagaagtctatgtaacagccataatgctaaagcaatgaaagtgatatattaattgaatcgggctagtgtttcctgaaactacggttatttagacattgcctggaaggctagaacaatgcaaacttgggtaacattgtgacaaagatcttaagtagtttaccatctccatattcaaactccactacgtgtagagtgcaaaacagtgtttagacaatgaccatataactgaactgctggaggtctaacaatgcaaatttggctaacattgtggcctgcaatatgagaatatgttatacaagatgtatcagaaacaactactccctctgtttttttagttgttgctggatagtttaattttgcattatccagcg

SEQ ID NO: 38866 - DNA, 548 bp, Zea Mays
ataatcgtgttctggttcccagaaaaaaaaagacagggaagggagctccgtcgcttggggagagaagactgagatcgtgattttcctgcgtcaggctttggtggggacctggtgatgttcgccagagccttctgaaccgagacatagcatcttcacgccggtctagcggtcgggagggtggaattcattgccgtggttctctgccatcacaaatccgcccctcgacaagcaagctgtccgctcgggcgtctggatgattgatgcagcctggtgcatcgtggtggcatgtggagtctgctcagcgcccagtaaaccagggggcctggacgacgactccatggacgaactgtgcagctgcggcaatggagggccaccgctccctctcctcctcagtctgcgcccacccaccgctatgggatctggtcgcgcctcctctggtgcacagccgccctattgtcgccgccgcggggctctactggcggccatcgtcacccatcggccatgccgtagcgagctcgttgccgagcgaggctacgagtcatctgaag

SEQ ID NO: 38867 - DNA, 497 bp, Zea Mays
ccgagaaggaagaatcagccgtgcggttggacacggagatgccgagaagatggacgcacggagtcaccacgaacctatcgactttttatctccagatccagattagctaccacggcaccgccagcccggacggctataaagacgaggcccatctcgaaatcgacggcgatgaagaagaccagttcccctctcctgatcgtcctgttcctcacagcagcagccatggcggccgagccggagaagcaggcggcccccgcggcacaggagacggccgtgcacatcgtgtacgttgaccgccccgaggacgccgaccctgaggagttccacatccgcaccctcacccccgtcctcggcagcgaacagaaggccagggacgcagtgctctaccactacaagaacgccgccagcggcttctccgcgaagctcaccccccagcaggtcaaggatctcaaggcttttctaagaacctggttgtggggctgtgaggagaatccgag

SEQ ID NO: 38868 - DNA, 1682 bp, Zea Mays
atctattactttacaaaaataggggaaggcctgggggccggttctaaagaacggatgcccgttccatagggtggtccggagcatgtgtggccggttagcctggttccgtacacaaaaccctgcacactgcaccactccatgacgggtgtcctagtatttaaaactatagtcatatgcgtccaacgaactggaggtccggttttgaagaacatgcacttgtctcctagggggtccgaaagccatgtagcggctcagcctggtctcgtgctgtgagcctgcatactccactgccctgcggcaggtgtcttagtacttgaagccaccatctagggggttcggacgcacaacttggtttcccaggctaaaaccctgcatacatatgttattacattttgctctcaagcagatgtcattacactcccttacaagcgggaccccagctccatctctgcaggaatggactacgctgcaccaacaagagtcgtgatggaagctggctccgggctgcctcaccagcggcggcgaccacctctgcaccagcagcgacaacgacctccgccccgggcgcccagacagcagcagcgatcgcctcagggcaagcgctgctacgaatagggcctcgccctcgccctcctacggagggggagcagcaaggccattaaagccaaagagtcagggactcagcgataggtggccctgatggtcccggcagcagaggcaaccacctctgcaaggggcagcctcactagcggcagccaccacctcagcaccgacgaccacggccacccccgcacaagaagccctcgctcccgtcctcccacggagtgaggataaaaccattcaagaacaccaccgccactcccgcagcgtacggcgtcttggacggtccccccgtacggccggcgacgtgggagaagccgtggatgtggtagacccgcacacggcgcgaccgtcgcccgtgtggtggacggacagccacgccccgaccaaacggcaggaggcagcgtcggaggcggcgacagggacacccacaggccaagagctaggcacgcggcagctgtcagtgcctacacctggccggcctcgcgtagccgaagttcgcctccttcgcgtggctggtgaacccctctcctcccctgaatgctagaggaagaagcggggccactggcccacgcgggaggcagaaccccagctcgacgtgccttccgccccagcgaggatgatgaacatccttgaagctgagggcaggagggaagccgcagcccggcttgcttctccccaccacgaagttggtggtcatccttctgggtgaccaccggcgggggactgcagccgggctgcatgatgaaaatccttgaagccgaagggcagtgaaaggatgccaacccccatggggttgcactcctgcaatggcggcaggaagaagacaagatcggcggcaccaccacgggcgcccgctctccgacggtaaagtcaccggaagagacgaccttgacgcggacccctccggagaacaccagcgcaccccatctggaggcccggaaggcgaaaggacgcggtggtcgcaagagcagcgaggcatgcctactgcccgggggatcgacccctttttaaaggtagaccccccactcgcgcccctaaagcgtcacgagtgaagtctcccctggcatgcagcagggatc

SEQ ID NO: 38869 - DNA, 196 bp, Zea Mays
ccccatttcccctagcccttggccgccgcccccctcccatctcctcctccctcaaactcttgcagccacaccacctaaccctagccccccatctcctcctccccaaggtgtcattccttgccgcttggatctacgtcatgtggtgcaagtctccaattggttttggtggagggaagaagggaggaagaaaaggggg

SEQ ID NO: 38870 - DNA, 5226 bp, Zea Mays
gctgaacaacggagagaaaaagtgaggcggaagacgagggacatacttcaagcgcccgcggcccgcagcctgctcgcccaggtcttcgccggcgacgagcacccaccaggtccgctcagtccatctctccagaaatccccagatgttccacagcaagtcgctccctaggcccaaggacacatcggtggtggtggtcgtccttgagacgacagaagtgtacattgtgatcagcttgtcgacgaggagagacacccaggtcgtatacgtcgatccgaccaccggcgccctgcgctacctggggaagcatggggaggacgtctttgattcggaggcggcggcgctgaaccacatcaccaacggatcaagggttctatccaagagcactacatatgccaaggcagtgctgggatacgcggtgttaggaagccatgctctgctcttggtcgcgacacagttgagcgcgtcggtccccaatctgccgggaggcgggtgcatatacacattggcagagagccagtggataaagatccagctgcagaatcctcagccccaggggactggagaacagaagaacatacgtgagctggccaatctagacattgatggcaagttcttcttttgcgagacaagggatgttaccaggcccttcccgagtcctattacactacgggaaccagatgaggaatttgtttggaacgagtggctgtcaaagccctttaaggacattggtttgccaggacactgtgtcattcttctgcaggggttcgctgagtgccggaactttggaggtgctgggcagcaaggtgggttagtcgcccttattgcacgccgaagtcggttgcatcctggaactcgctatttggcccgtggactgaacgcatgttcaggcacaggcaatgaggtagagtgcgagcaactcgtttgggttccacggaagggcggacagcgcatcccttttagctcgtatatctggcgccgtggaactattccaatatggtggggcgcagaaataaaaaacgcggtgtcagtggaggctgaaatttacgttgccaacgatccttacaacggaagcttacagtactaccaacggttgggtaaaagatatgggaataaatcatctgaagcgaacgtgtccaggcaaaaaagttctggaagggttcccattatttgtgttaacttgctaagatacggcgaaggaaaaacagagtcagttcttgttgatcatttcaaagaatctatacggtacatgaactctactggaaagctgggaagcacgtggattcagttaataaattatgactggcatgccactgtgaagttaaaagggcagcagcagacagttgagggcctatggaggcatcttaaaccacctacaatggtcattggcttcagtgaagggaattactatgatgcaagacagcagcttaatgaatgtaaaggatcagttatctgcaatgacgatgtaaatggtgggttttgcatggaatctattcaaaatggggtgatacgattcaactgtgcagactctcttgatcgaaccaatgctgctagttactttggtgcacttcaagtttttgttgaacagtgtagtcgattgagcatctcgcttgacatagatgcaatgtttgggttgtcaagtagatattctgaatatgatggtagaaacactcgttctttgccccctggatgggaggagcgctttgactctgtaacagggaaatcattttatattgatcataatacacgtactaccacatgggaacatccatgccaggaggctccacagaagccctggaagagatttgatatgacatttgatcagttcaaaggctcaacaatgcttgctccagtgaaccagcttgctgaactttttcttttggcaggcgatatccatgctacgttgtacactggctcaaaagctatgcacagtgatattctgaacatattcaaggaggaaacaggaaagtttagtaaattctcagctgttgagaatgtgaaaattacggtgctaagaaggtaccaaaattttatgaatgatagttcccgtcaaaagcagttagagatgtttcttggtttgaggctatataggcatctcccgtccatccctatgttccctctcaaagtgctatcaaggccatctggatgcatgttaaaaccagttcctagtatcatcccaatggctgatggtggttccagtcttctgagcttcaaaaggaaggatcttatttgggtgtgtcagcaaggtgcagactatgttgaactttttatataccttggggaaccttgtcacgtttgtcaactgcttcttactgtctcccacggtgctgaagattcttcatatccagcaaccgtagatgttagagttggctcaagcatcgactccctcaaactcgtggttgagggtgcttgcattccacaatgctctaatgggacaaatttactgattccagtcactgggagaactgatccagaggacttggctgttacagggaaaagtgcgaggcccaatgttcaagagagctcctatcttcctttgttatatgactttgaagagctagaaggagaattaaactttttgaatcgggttgttgcattatcttttcatccatctgctgtatcaagaacacccattactcttggcgagattgaagtacttggagtttcccttccatgggcagacatgttaaccaatagtgaacgtgctcctgaatttatggagtttatcaataaaaaatcatcaagtgctcactgtaatctaggttccaagtcttttggaaattcttccatgcctgggaatgattctcatggtattgatgagtcttatactaaaagttcatcattagttcaaccgtgtggttcggaaaatttgttggattttctcacaggtgattttgacatgtcggagtcccatataactcaaaatacttttggtgctggagaacaaacaaacttcttagatgatggatttgatgttaatcctttcgcccctgcattggaagtgcctgttcctgttgctaaagtaaacaaggaggttgaagaatgtggcagcacccagctttatattaaattttttgaatccctttctggctataataagggaaagggtcttgactttgagcaaacgatgaagcttgaaataaaacgtctccgtcttggtctttcagccgctgaaagggaccaggcgttgttatcaattggtgtaattcctgccacattagatccaaaccgtttaattgattattcttacctattgaagttatccagcttagctgataatctagcactgctgggccatacagtccttgaggatcgcgctaatgcttcaatagggcttgaaaagggcagtgaacatgctatagacttttggaacatcagtgaaaatgatgaattctgctatggtggggcatgtgaagtccgtgctctgtcttcattacaagctttagcatctagagaaaatcaatcggtattcatggaatgtttccagtgtgaaaagacagtttgcaaagcttgctgtgctgggaaaggggccttccttttgcttaacacctacagggagttgaagatatatggtgggagtcaaagtggtggctactcagcactcacagatagttttgtgtgcaaatcgtgctgcagtgaaattatcaaacgtgcattgtatgtggattatgtccgggttcttcatagtttgcgcagaaaagatcgttcagagaaagcagcactgagtgctgtgaatcaggtctgccaactggagtacaagaaagcatctgatttatctcaaagtattcaatttggtcagagacaattgaagcagatccttgatggtgaagaatcccttgcagaatttccatatgcaaactttttacaaatggttgaaactgccaatgactctgaaccactgctttcattactggcgccttttggtactggagagtatacgtcttactggaaagctccacaaggtatcacttcagtggaattctcaattgttcttggtggtttatcagatattgcaggagtttccataattgtcagttcttgcggttactcagcatctgactgcccaattgtagagatatgggcgagtaataaaatacaccgagaagatcgtacatttataggaaagtgggatgtacaggatataatatcttcatctccacagcttcgtggacctgaaaaatctagtagattgagtgaagaaccaagacacattaaatttcacttcccaaatcctatccgttgtcgtataatttcaataaaaatgacactttcccatagaggttctcattcaaccaagtttagtgaggagtttgatcttctatcattgaatgatagctcatcttatgaatcgaagccaaccaatttacataattcatttatccatgcaaaaagaattgtagtttttggcagtttgttgagaaaggagatggagcctgacacatcaggggggataatgagaatgaaaagttatttagacagatcaccggccttggggagatttaggatcccagttgaagctgagaggctgagagataatgatcttgttcttgagcaatatctcttagctaattcacctggaatagctggattccggcttgattctttcagtgttataagacctcgtgtgacccattcaccttcttcatcagagttggacatgagggagttttcattgacacgaatggaagatagatttataaacccagcaattctgtatatacaggtcacagttgttaaggagtccggcaagttggttgtagaggaataccgtttaccagaagtaaaagcaaacacgccactatattttgatttcccagatctacaacaggatgcgcgctgtgttatctttagattgcttggtgacgtcactgcctttgtcgacgacatttctgagcttgagaacttaaacttgcggaatcttcctttggcgtcgggactgtctttgtcaaataagatcaagttgtactactatgctgatacatatgagatgggaaagatcggcagtctctcagctgtataatgtatgtgagttatgtggatggatccttaacatactggagtcaaccacatagccaggccgttatggttttggccctgaccctggcctaatattcctatttggagctagaattacatattgactcaacaataaaacttttattttaacaagctcagactatgaaatggtatgtctgggttgttgtgtgctaaagcgtacttctgtttagt

SEQ ID NO: 38871 - DNA, 3005 bp, Zea Mays
tcgccgccgaacgcatctagtcagcttccactggagcactccacccccgaatgcttctctcgcagtcgttgccctcctcccctaccccatatagtaaaacacgttcgcagatccatccggacttgccaataaagaccaagcattattggatggactccgtcactggctgcgacggcggcaagaaatcggattaggacgagtgtagggggtacttgtcttaggaaaggggatggggggtctctgctcgaaggtctcagctgtagacaagtcaccgagcgacactgcgtttggccggaaccaggtcaccgatcatgatccgggggcgtcgttggagttggagaagcagccggtgtccggaaaggcagctgcaccggcaaagcggctggacgagcagcagcagcagcatcagtctttctcgttcctagagagcgtcgtccctggggttgcttttcatgcccgggctaatgctagcggcgaaacggggcccaggacctcgccgcaactgaccagatcgctgtcgcagagggatggcgtgggcaaggcaaaagccggtgctgacaaggtttcagaagtgagctcaattttaggtagagctagcactgttgggcttgaaaaggcagtggaggttctggacacacttggcagtagcatgacaagttttaattctagccgtggttttgtgtcaagttctgcagcaaagggaaacaaaatatccatgctggcttttgagatggcaaatactatagttaaaggctctaatctgatgcattctttatcggagcttagcataaagcatctgaaggaggtggtgcttcattcagaacttcagaaggtgttcaacaccttatatccaaagattttgatgaactgctcaagatggcagctgccgacaaaagggaagagttagaagtattcacaaaagaggtcattcgctttggaaaccgttgcaaggatcctcagtggcataacttggaccgctactttgaaaagctggcatccgaactagccccatgaagttatctgaaaggaaaagcagaatcagtgatgcagaaactggttacatgtgttcaaaatacagttgaattatatcatgaattgcatgctttggatagattggaacatgattatcgccttaaacagaaagaacaggatggcttgagtttaagaggagacagtctggatatactgaagcaggcagtgaaggtccagagtaagcatgttaaaagtatgaaaaagaaatcactttggtccaagaatttggaagaggttggtatgaggtggtggtaaagcttgtagatattgtccacttcttacatttggagatatataacgccttcggtcatcctgacaaggaagagccacaagaacgtggcaaacaccataatagattgggaccagcaggccttgcgttgcattacgctagtatcatcaatcagattgacaatcttgtaagttcacataatcttctagagatcctattggactaaattattattaaaagataacttggtgaaccttgtacatcaaccatattcgttgcaatatgtcttcaatcaaatcccattacttgtttgaagagactcagaaaatgagcaatattacaaggactgtaaccaattgtggtttatgctataaattggcatcacattctttggtgggtagctcatcttcatgtgatgaatgctccaacttcagtttctttacaataacttactccgtaataaggattgatcgattgctaggtttctcaatcatgtgcaatgcctccaaatgcaagggatgcattatatcatagtttaccacctatcatcaaatctgctctccgctataaactacaatcgtttgaagtcaaggaagaggtatgccaggctggagtctcaatttgctaattgctattattatgattgcacgtaggaatctatatgccatgctgtgcacctgaacataattctgctaaatgaatgcagcttacagcttctcaggtcaaagcagaaatggagaagactttgtggtggcttgtccctttggctagtaacacaaataaggcataccatggcttcggttgggttggagagttggcaaatacaggatctgaaatgaactgcaagctatcagggcagaaggacatgtcccgaatcgagacattgtatcatgctgacaaggagaagactgaagcacttatcctggagctggtcgtgtggcttcatcatcttatcagtaaatcaagacacgccagtggaggtgtaaggtctcccatcaaatctccagtcagctcaccaacacaaaatggcgctgcaatcacactgttgccgggcaaaacgaaaatttcatcaccgattctcacccaagaggatcaggatatgctaagggatgtcaagtacaggaaatttgtcccagggataagcaaaagtcaagagtttgacacaaagtcaagtcacagcaaacggagtaggttgagcaagagcaacagccagtccccagctagtggcaacaggaaataattgctcccagttaggaggtcttccatgcttccagttattgacttcgaaattcacaggaccaaagctttggatttaattgacaggcttgacaacctaaaaatacaacgagcaggaagctaaccggaacgtaaacttgaatgtggtcatccgcagtcttgaaaccccagccgcgatataaacagttactgagtatcagatatgagtagcaaggccggccgttgaactctggtgagaagctaacagtatgagaagctaacagtatgagaagcaagctggtatcgtatatcctgtaccgaatagaataggcaaaatgttgtaaaaatgacatatcgtttgtaactgcacaagaaataagaagtgcaagttttttagtttaaaaagggagggcaaaaaggatgtttttgttctatgttttgatggccactaggccagaatggcttgtatgaaccttagtactcttttttgttccaaattatagatcattttagtttttctaaatacata

SEQ ID NO: 38872 - DNA, 788 bp, Zea Mays
agttgctaaaattagtcgagaggtttagaatggatcaactaattgttagctatacccctcaaataagtattagttgttagatgccccaacccagctaaaaccagttaacagttagctctagaggtttagaacatggcataaaacaatcatgttatgagcctgctcgctggatcctctcggtccagtccttgcatctaccagtctaactctaatcttcccgacaccacctaaatcagtttgctcgctgccccgtttctgtcaccgacccattatcgatgcgacgccacccgacttcgccccttcctgtcgcctccgttccttgttctgtttttaccgtgacgtcaatccgctcgacaagctagatctcgctcgtcacaacgatatgatttgtcccctgcggtcggcggaattggcgaactctcatgtggtctttttggctcccctgaattttcaacctgcgtccgccactgcggtcgtagttgtagacgttgggacgacttcatgttcttttggccgttagatgaggaatctgcggtcaaaatgaaaagtgctgtcgtggacgtacataagagtagatttccgttctgatttaataataagaaaaaatgcggacactatgataaattaacctgtaggatgtttgttcaattttttaaatcctgcaggcactaccggagacgttgctccaacacctgctgccgccgaggcctgattccacagccaaatgtcagacaaaaaatagcaataaaaaaaactggcgccacccttgatgcccaaatagatcttct

SEQ ID NO: 38873 - DNA, 370 bp, Zea Mays
ggaaggacgtgagtattgtacttcttgtatgtttatagattattgttccgtgatgtttgagctagcaccagataaacaaaagaagcacgaatattatcgttagtattatatcggcagctggcgttccttgtaattggatattttggcaaaagacttgtacttagcttgctattacttgatgtttgaagtagatgcaattacgctagaaaagtgaaataattgggcgtagacgtacgtcgataactagtatttccgtttaaaatagtacatcgtctcgccgctaggagtttaattcgctatagcgtagtactatttagggttgaaatattcctatttatatgcattcatgttcatcgtgcatctcaattag

SEQ ID NO: 38874 - DNA, 1718 bp, Zea Mays
actctcctctcctctccgcctcaccttgccctgcccgcacacaccacctgtccccgcacggccgcaccgctccgctcccgaggcttagggctccggccgcgctcccttcccttcccggcattcccgatctctcgccgccgcccgcctggccttgatctcgatcgccctcccctctccgctctcgctccggcaggccggcccgggtttgtctcgccgctattgggcctcggcacgctgcgatggtgtcgggcgtgtgcgtggggacggaggggcaggtggaccctgaggcggtggcgccggctgtcgcggaggaggcggtggtgccggcgcccgcgagggaggtcgtggtggggtacgcgctcacgagtaagaaggccaagagcttcctccaacccaagctccgggggctcgccaggaaaaagggaatcttgtttgtcgctattgatcagaaacgcccattgtctgatcaaggtccatttgacattgttcttcataagttgactggaagggggtggcagcaattgctggaggaatatagggaggcacacccagaagttactgttcttgatccacctggcgcaatagcaaacttgcttgatcgccagtctatgcttcaagaagtatctgaattggacctcacagattgtcatgttctcttctgcaggtaaagtacgtgtgcctaagcagctattcgttaatactgatccctcatcaataccagctgcagttaggagggcaggtctctctctcccattgggtggcgtcatgtttaaggtgtacattgttggggatgcaataagggttgtacgtcgattttcactcccaaatgttgatgaaggcgatctatcgaacaatgctggggtatttcggtttccaagggtctcttgtgctgcagccagtgcagatgatgcagatcttgaccctcgtgttgctgaacttcctccgagaccattgcttgagatcttggcacgagagctgcgccgacgactgggtcttagactattcaacatcgatatgattagggagcatgggacgcgagatcggttttatgtcatagacatgaactactttcctgtgcattgctgacactaatatgaaataccaaattggagacactgcgaatagaggtagtttatctcccgtgtcatcatgactaatgatgatatcaggtatactgcttgatggatgtactgaacgaacgagatgcctgtgctgtgacacttgttccactctgtcggttttattgtttttaaaaacagtttggagtccaaagagtggctagaacctggcacgccgaagttatcccagctcagcctgttttcttggtacggcaaaatgcctggatacgagcacgtgttcaccgacttcctgctgagccttgccaagaaagagtacaagagacgacaaagctatagctcgctaagctcaggcgaatggtgataagcgaggagactactcggcggggcatgtatatgtctatcatccacgatgcgtgcgtacagatgtacttgtgcatgacgagagataatgggtcgtagaagcggagggctgttgtcaggctataactaactgttgctttacatgtgctaactgttgatgcttcagaataaattttgtttgggtggatgatggctctgctgaaatcgagctacttgtagaacttatgactggaacctcgaaataaacggagaatttggattacgtaccgtactacttgc

SEQ ID NO: 38875 - DNA, 3841 bp, Zea Mays
ccacccaaccgtaccctcccgcccctctcctcctcctgcaccttcgccggagcaccaccccctcgccgtcttgcgcccccgcctccctcgcacatctcactccttaccgtaccctccgcctacctctgctccccttatccatcctcgagctcacctgccgcgtggatcgcctcggcacattttgcttcttattatttttttttacctccccgcctgagcgttagctggttggcggatgtacgtgtcctgaccggagatgaagattcctctgtcttgaggggttgatctcggggagccgcctttagtggccggccgtccttggccccgccgcgtcggccatggacatggagaggggggcgggaagcgagcaggggtcgcccgatagcgaaatgggcgaaggcgacaacgatagcgtcggctacggcgcggagatggaggtggacgccgggagcggctcggctccggcgagctcggcgtccgcatcggcctcggtctccgcgtcggcgtacgcggcgcgcgccggcgccttcgacggggtcgaccctttcgagggcatggagttcgacgacgaggaggacgcctggacgttctataacgtctacgcccaccgcgtgggcttcagcacccggatcagcgtcatgcaccggtcgcgccgggacggctccgtcatgtcgcgccagttcgtctgcgccaaggagggcttccgcacttaccgcgggaagaatgaggtttcccgtgctgatgccgcagacgctggcgacgacgatagtgggaggggtcggaggacacgcgctgtcacccgggttggctgcaaggccatgatccgggtgaagaagcaggacaatggccgctggagtgtgactaagctggagactgcacataaccatcccctggtccccacgaaccaggcacactgcctgcgtccgcacaagccactgtcggagtgtggaaagcaccgtccttttgggggccatcgaaatggcggctcgcttctggcaattgagccaccgccaccacctcttacgccgcctgtgcctcacacaagcgtagctcaagtggttcctcagtatttttcggatggtatcgggaatgccactagagtaattttggattatgtcaaacgcatgcaagctgaagatccagcgttcttttatgccatgcaatttgttgaggggcgtccagtgggtaatgtgttttgggctgatgcgagggctaggacgacatacaaagactttggagatgccgttgtcttggatgactactgcaaaaggagcaagcatgaactgccacttgtcgcttttactggagttaatcaccattgccagccaatcctatttggctgtgccatcatggcacataacaatgaagtatcctttgtttggttgtttgagacatttctcttagcaatgtctggatgccaccctacatctcttattatggagcatgataatgttttaaaaccagctgctttgaaagtatttcctctaactaggctccagttttgtaagtggcacatcatgaacgaagcacatgataagctgtcatatctcctagatgcatttccatcattccatgacgactttattaattgcatcaatatgtctgagacaataaatgagtttgaagaaaattggaaggcattaatttctaaggccagctctcaaaaaagtgaatggcttgacttggtgtacaattgccgtcatcattgggtcccggtatatctgagagatacattctttggggatgtgtcgttaaagctgcagtgttctagcaggagttcgttgtttgaaggttatattagtgccaaaactgattcacagtcattcattcagcaatatgaaaaagctttagactgttgttatgagaaggaggtgaaggaagaatttgaaacaaaatattcacttccggatattaagacatcatctcctatagaaaagcaaggagcagagttatatacgaggtcaatgtttttgaaattccaacaggaattgatatgtgccactgcttacactgctgaaatggtgaaagaggagggcaatgcttcaatttatacagtggccatatctgaaggaagtgagaagtctgtaacagttcagttctgttcttctggaagttctgcgacatgtagctgtcggatgtttgaatattttggtattgtctgcaggcacatacttactgtgtttggtgtaagaggtgtctctgcacttccttctcattattttgtaaaaagatggacaaagaatgcattggatagaagcttaggcaagaatgttgatgaagttagcagagaggagctcaaggaggagccaagaagtagcgctgaagatggtgagcaatccctgacatggcgttacaacagtttgtgtcatgaagcactaaggtatgctgaagagggagcatcatcattagaggtttatattgtggcgatgcaagctcttcaagaggctgctaacagggttaatatggccaagagaggtattggacaggtagcaccattagcggtaatgccaattgcagcacaaccaccagaaagttttgcaagaaatcaggagattacttccaataagcaaaagaagagaaaaaagaattcaagtagctcaagggagaacgccacatcaaatcaacttatttgataagttttctgggttacctgaccaaaatgcaccagcaacttcaactggaaatctgcaaggtggagtaacaaaatccataggggctgattcacgaataaaagagagtcatgaattatcccaagctaatggtaacaggggatgcagtgtaaatacattaaactctagtgctgcgcgacagctcgtgactgtccctattggattgtgccttccacccactgatggctccgagatatctgcggcttgtttgaactctgtagactctggagatatcagtagcaatggcaagttatcacttggtcttcatcaatctcagtcatctgcacaacagccagctacaccgtcacagacaaaaacacttgacagtattgattgtcgtgcaaatcctgagggttcatctataagggctgcagccattgcagccggtgcacgcattggatcaccatctgatgcagctacaatcataaaagcggctcagtcaaaaggcgccatctacattaggcctggggaaataatcccgaattacctgaaaccactagcaccaaaaccactttcctcgctaccaccgatgaacccagggcagctcagacgatttggtgattctgctgccgcgaaggatgcaatcttcggttcttcggatggcacggacgatgacgacgaggaagacactgatgacgaggaggacgacgagctgactgacaacgatgcagaacatgaataatcttctccccctgcactaacctctcctaatggtatgtgacgtggtgatcttcaacaacctcttcaaccaatggaatcttgtagagcatagctgtatacatgtttatagtctgtatttaaggccccagctgccacctccatgagccaagaattcttctttgatctctctctctcacttagcatgcctagaagccccacttatttgacctaaggacaaacattggactccttaatctccttttttcttctgttggctcctggcgaggttggtggtggtgggtctgatggtcagttcacatgtgtagctggttagctatgttatgtacagcatgagttgtacgctggcgaactgctttcaacagtccaaaattttgtaccctgtttttctcttgctggaaagggatttgttggaactgagctcacaggtcctttgttgattggacttggcttggaagagtggttggttcgttgctggaaaaaaaaaatcaaaa

SEQ ID NO: 38876 - DNA, 1319 bp, Zea Mays
ccacgatcagaaggatccggagttccggacgggcggacggccactgcaacgagctcgcctgtcgcctcgccccggcgccccgcgacaacgagacctcctcctccgctcagccgcagaagccacctcgccgccggcagcagcgttggcggaaaaggggtggaggcgcggcgattgttcgcgggatgagctacggcggcagcagctccctcgcgcccggtgccaagaggccgttcgagtacgggagaacgcatgtggtgaggcccaagggcacgcacaaggccaccattgtctggctccacggccttggtgacaatggaaccagctggtctcaactgctggaaacgcttccccttcctaatataaaatggatatgcccaactgcaccttcaagacctgtgtcattgtttggcgggttcccctgcacagcatggtttgatgttgctgacctttctgaggatgctcccgatgacactgaggggatggatgcctcagcagcacatgttgcaaatttgttgtcaactgagcccgctgatatcaagcttggtgttggtggctttagtatgggtgctgctactgctctgtactctgcaacttgctttgctcatggaaaatatgggaacggcaatccataccctgtgaacctaagtcttgccgttggtcttagtggctggcttccatgtgccaggaccttgaagaacagaattgaagcctcaccagaggctgcacaaagggcttcaacaatacctcttttgctctgtcatggaaaagctgatgatgtagttctctacaagcacgggcagagatctactgatgccttgaaggcaaatggcttttccaatgtgctcttcaagtcatacaatagtcttggtcactacactgttccagaggagatggatgaagtttgcaaatggctcacagcaaatttggggctcggcacttcgtcatcttgatcgcgagaaagactcgcggtgtcggtgtcttctccagggtagtaaatgggctaatagcaaatttgggcttgggtatacggccatgttctagcttttcttcacgcagacgtgtctgcgagtgctgtacgcttataatttctatattctggtctacgtcgatttggttgacacggatattgtttgtttcaaatattctgttttccggtttggaattgtgatttgcttcctccgtatggcatcgagatgtctgcaaaggttttaccgtgactgccgaatcgttttgtttgtctattgtatataatattattgccagggacggacccaagataaaataggagtgaaagcatacttacaaggaggaacatgaaa

SEQ ID NO: 38877 - DNA, 3247 bp, Zea Mays
cgcaccctgatcccgcacaccagtcctgctcatggctccccgaaaccgtcgccccagcctccctcccctccccggctcccccgatttcagctgcccccgaactccgtcccctgttgtccctacctcgattctgccgccgcaaacgccgatgtgagtcgtccgatcccacccgcaaacgccgctccccgcctcgaggctcgccggaacggacgcctggataccgcggccgcaacccaccgccgcgcagggaggttgcgcccgcactaaaatggagcacagggaggctttgccccccacaactcggaggacgtgtgcaggccggagggcatgggggaactcgtgttgaggtctatgcatcaacatcttcttcaagtgcacaagcaccagcacaatggtaactcgtaagctcccataagtggcatgtcaaggtcctctctgagttctggtaaccgataagcgcccccatgaaccctaaccctaaactcccttctcctcctccatgcccctcgatcgaccgattgatggaccccatgcgtgccgggggtgttattgaccatgtcatagaacccaaggttgttggggttcaatgtcggctggacaggggatggtgggggcggccaggtgatgtaagccaaatcgctttcggcctcctccagcagcgctgcgaagacgaggtgctcgaggtggcccagcgggaccacgaactggtgacggaacctgctcaacaaccacgcgcgcttgacctagcccccaccggagaccctcactgtggcctcctgagtcggatcacgcctcaccttgaactgcatcgacgcctcaacctgccggggcaaggtcacgtgccttgcggaggctataagaatgttggggggttgtacaactccatagcttggtgatcacggtggaggactacaacagctcccgcagaaggcctgccagcttgttcgccatggacctcaaccacaacaagctcgatctcttctactgactgctggtgtgcatcagcaccgtcaaccttcatgcatcccctagttcatgtaccggtactttggccgcggcagagtcgacatctgagatatatgaggccttggaattgaggaatggtggatctgattattttgtcaagggtgttcttaagatattgctaaaggaggtgctcgcagggaggaggacctcaacgtggtgggcatactttgcagggtgcagagatactgtccaaggaaggaatcagtgctgaggtaattccttttgtaaacgttatagtttcactgatcagtgcacgcacccagttacaagtcggattccacgtgcccacgccgtccgcgcaagtttgcatcaaagcgctggggaggatggaatggcagatttgcattaaaccagcgacaccacttcataaccagcaggcaggcaacacactccttcagatcggtgggatgttcgaaaaagataagcccttgtaacctttgtatgcatagtaggcaatccttgtgtagtagaacccagggatgaacattacaatgcccaacatcatgaagaaaattcctgatacaacataaagggccataagtttaggtaaagggagtgaaaatattcatgcataagcactgcatttcatttgaataagtacttaactaaaactgctatatgaaagggttcaaaatgcatcagtacttgaaaggtgaatcagcatccatgcaaattatcaagcctgtgcgagcaaatcacaacttgttctaatcaacaagcagtttagtgcaaatcacaacttgttcttaatattcccctatcataggcttctagcgtggagtatgaaaatatgtgatatatattgtggtggtattgttttctgatgaaatgaatattattaccccataagtggacacaggccagttgaaccaatacgaacccgatcaactacatcgatgcatcaccaacccaagcatcccaatccaaacaacttgtaatttgaaactagaggtacattatagtaccccttttctttttagggaactagactattaaggaacaccttttctctagtggggtacaagactaatataatcagtttgtgtgacccgcctgaaaactatgttctgttatcagtattttgtgccgtcacaattcagttagcagcatgcatgttcaattgttggtgtctttgttaagtttgagtagaaaagctcaatctagcatgctcttcgctctgttttactttccatgattcgttgattatctatgcagtttctgcacgattactatgagtatgtgctttcatatattgtttactcgatgacttgaatagtttacaacgtatgattattgcttaggaccctgcactactaaatcaggggactcgcttgagtcagaaaaacttaggaaccaagttttctctctaagttactgacttcattttctactgtttatagattgcgaactgaatttaaatcaaatacttcagtattggtctctagagaggaagctctgccaaccattactaataactgagaaggatttggcaatcgcttatctttgactcaataccttatgacctcggaaaggtttgaacccgtcagggactaaagatgccaaaggttgaagaagggtcacgagcaaagagggcatttactatcctttgcaatcttcaccgttggaaggattatgataactgcaatttcatttcttcttggatatgagctccacaagaggatgagacccctctcttcgccatatgtataggacctaccttcttgacatgacctatgcatccaaaagttctgagatgacccacttgtggtttactgccatgccatgcctcatatggagttttcccttgcacacttcttggcaatattatatatgaggaggtacctagaccatctaatcagattcgtacactaattgatgctattggctatgttattccttggctaattacacatgtgaagcaagctagaagctcatcttgtacccgcaacaagttgatacctgcagcacgtggacaaagctagatggcgtggacaaagctagatgggaagcctagtataattgcaaagtgaatcagttagattctagtagttactaaaatttttaagtgatatttgtatgatattgccactttggctttgcttctttgtgaacacaattggcagttactgaacatgtttgctatcgagttagttagcttcttgatattttgccaaggccaaaagcaatattattgagggtttataatttgattttttaacat

SEQ ID NO: 38878 - DNA, 1242 bp, Zea Mays
gttaaactggagggggtaaagaattatttagcttggtctaggagagccttgcgattattgaaagcaaaaagactcgagggctatgttgatggaactgtcgttgagcccaaagacaagccaagtgctgaatggaaggattgggatgctataaactctttggtagcagcatggatgttaagttctatgatcccagcaattgctagcactgttgatacaattataagtgctgcagaaatgtggaaagcgcttgaagaaatgtattcgggagctggaaatgttatgttgatggtggagactgaagatcgcctccataatatcaaacagggggagcgaactgtggcggagtatgttcaggaattacagtgtttgtgggctgatgttgaccattatgatcctattgagctaccacactcagagtgtgttgtttgggcaaagaaatgggtggaaataagacgtgtgcttcaatttttaaggggtctaaacccagagtttgagggaagacgagcctccatgtttcatcaatccactcttcctagcctacaagaggcaatagctgctatatcccaggaggagtcacgactcaaagtgatgagggaaagtcctccagtgtcatctcaccctgtgttttcagctatgagaactaaagatgctagagagtgttacaattgtggtgatgttggacacattgctcgtaattgtactaaacctttcaagtttaaccgcgggagaggaagaggggctgctagaggtggtagaggtcgtggaggtagaagttgggcaagagctaatgcaacaactacaaaagaagaccttgagatctttatggagaatgaagctgaaacaaagtcgactgagcaacataaaattcctggaaataaaaatcaggagtcctacactagggattttgtcaacttcgcctacacagatgaaggagaggagaacagggaaaagacttgggacagctaccaggcgtagtggattatggtatatggaccatgaggagacagatgatacaagatgcactatgttgggcaacgaagttggaagagaaggaagttgtagtgatgcttttgcattgtagattcgggcatctctcttttgataagatatgcaaagtttttcccgatgtaatgtgtggggtggacaaaagcaagctattgtgtgatgcctgtgagtttgcaaaacacacgaggacatcttatataagtcgaggtatcaggaatatatctccttttgtgctag

SEQ ID NO: 38879 - DNA, 352 bp, Zea Mays
gaacttttctgctgtggcagaacctcccaagttattgggcccacatgcacctgtccttgtcccaaagacctcagacggctatgcatgtgcaccagataacttaacaggatctgtctgattgccccaaggacatcggataaaccacttacaaccagaaccgcgggattaagtaaacacaaatcacacaccaacaattttacagcggaaatcttattaccaaattttacatgttacatcaagttttacaatgtacatgatcggagtggttacaaaagtgattcaaagaaataagtttgaattgttataaattgtttataagtttgaaatatatgctagctcaagtgaccatcct

SEQ ID NO: 38880 - DNA, 783 bp, Zea Mays
ctactactccctctcctatctctcttctctctctccctcacgtctctctccctcacgtctctctctcccttcattttctctctcccttgcttctctcacgcacgtgccctggccaacgcacgcgacgccccaccgcgacgccgcacaggccccgccctgcgcgagcagcgcgctgccgcgccagcccaccgcgatgccgagcgcgcccgacgaccaaacgccgcgaaccatcgtccgtttcttgcttcatggcgatttatttcatccgtttcttattcctattatttctccattagtaaccgacgtattgacggcatttgaagcctgcggcaccccatgacctccctggcagactcttcttctcccctccttctctctataaatggggacagcagagctctctcttctctcctgcctacccaagcgccccatctctctagctcaccattgcactgttcgacgccgccgttcgtcgccggagttcgctgctcgttgccggagcccgtggagttcgccggagtgtgccgtcgtcgccggagttcaccggagccgcgtactagctgtccgtagtcgagccccgctctccgtcgatccgtccccgtcacacgcacgaacccgaggttgatgacgacccaagtttattttatgtattttataaagcgcttttaattcgattcatgtgttgtatagtttgtttgttgtaatatgaacacatgtgattccgatttatgtatttgtgtgcgctacggaatttgttagaaatatgcgtgcatcgtgttattt

SEQ ID NO: 38881 - DNA, 1685 bp, Zea Mays
tctcaacgcaggagattgggttcgttgcttccccagcacagtggtgttttctgcggttggtgtgggatccatggagatttcctgcctctggaaatgaaatacacatgtgtagaatcaaacaacagtagatttttatgaaatttaggattgttcatggagctgaatatggatacatgcaggtggcctttttatagaggaaggaatgagtattaattaagttctaattagttgcgagtagtgttttgtcctatagaactagggagttttgcttcatggtaggtgttcctaggctgcaaattttgtctgatcttgcattgagaatatgatgggtgaagtctgtgacacgtcgcgtcgcgccgtcggtcgaagccagctcaatagtgaggttgaggcctcacaactttctgcaaaactacatgtcaagtgctccaccttgtcagaattttaaagaaacattttgttgtttcaccttgacttcttattgacatggcctattggagagagatctctgtgtgtttctggtttctaattggacatgtaaaagtttatgattagttgttgcataaatggattggctagaattttcaaagtataggtgcttggtgtcttctcatggtcatagggaaaatatcatagctgatattttcacacaagtgaaggatccacaaaagggatttgttccctatggaatgatcagggaactactcgtgccattctataaggcaaatgggagccgcaaaccaaataggaaaattttctatggagacatgccagtgaggagcagtttagccggttcttgcattatgaagtggatgcaattagaaaggcgtgtgccagcttggaagagggctaccttcctctagttacattcatagtggtgcaaaagcgccatcacacactgttttgtcctgaagatcatcgttcacacagacaaccagatcgacgtggaaatattttgcaagccactctggcattcaggatgaactagatgcaaaacctgaagagctggaaggagaagagttggaatctaagcttctagagcctgttgcagctctttcggtgcatccagtgcatgtcccaggaaacaagcaactagcttgccctacttcacagaaagttatagctaaatacgatgagctggctgcactacaagctgaaatggcattgtgatcaggacactttggagacaatagttcttatggcgcagtcaggctagcaggctgccatctgagtttgaaattaccgattgctgccatccttgtgatccagacaaggaaaatgttcttgctatttaagttatgaggtggagtgatggctcttatcttgaagatcaggatcactggcggttgggttactccttgattcttacatggattaacgcatggaccgaggaagcgcaatgacaagcctaatagcctgcaactgatgaaaggaatggtctctactacatgtattattgtccatcccatctttgtttaatggtcgtagctgctttatacaattattcctacctatgctagactgtgagccattgtatatcaatgtattttatcatattgatttcgtagcaacgtacgagcatatacctagtatatttataaacaatgtgtagcacttgccacatttaaacagctaatcttaaaaagacacgacatgcgaggattgttaatcaatatcgtttgtat

SEQ ID NO: 38882 - DNA, 1337 bp, Zea Mays
ccaagctccccaccgtcggaggcacccgacgcccttcatctccccaccgccaccgccgacggcactgggcttggcgccccctccccaccatcttgttccccaccgacgcgctcccgacgcccccgctaagctcgcctcctccccaccgtcgtctgctcggggctcggcgcgcctcctccccacgtcgatactgctcggcgcgtctcccgatccaaatcggccagcctcatcttctcccgatccaaatcgccattctcccgatccaaatctgccagccccatcttcctccccgaatcgccgagaaggacgctcctgtaggccgcatccctgctcccccacggatccacggagcggtagcctctccggacgggcttcttctccgacaccgcagcagccctggaggagcgtcttcaccgtggaggagcgccgcagcaggcctggagggcttcttcgccgtgggcctcctctgcgcctgcgccgccctgctccacaccccgtctccctgcaccctacgcgtcatcttcccaggctccggcgtcctcctccctgctccctgctctctacgcccagccccgtccgcccgacagctggcagcacatcggacctgtgcagtgtgaaggtcttgacgagtagtcaagccgcggcacgctactcgccccttcggagacgaacgagatttggggagcacgagcaccaactccacccacgaccatggattcacgcatgtcgcgggcaagcggctcctccaatggaggacaaggatggcccagttatggtctggtgtcgctgatccgctgccccaaatgcgaaaggtcagagttgctcgtgagactaagatcgaaaaggtgggagaacggcaactttggtcgagagttcgtgaagtgtgaaagcaagccatatcgagataataaggggtggtgggtggctctggggagatgatggcgtctaatatctgggatgaacgagcagtagcaaatagagcagatgtgactacaaactgggacaaatttgctgccgaactgaagaagatgaatgacaacatggtcgagttgaagaagataaaggacaacatagttgagttgaagaagatgtttggagccttttatgcttctatgatttttattctattccttttctttgtgatgaactataattgtaagcgttaaatataggattcatggtgaacctatgctgaatatttgtgatgttgaatctgtgatggacatttgtggtggtaaatgtgtcgattcagtcagggtcttgttgtgatgagtatgtgttggcattctagtgtggaatttgtgtgccatgatcttttagtgttaaatctagtggga

SEQ ID NO: 38883 - DNA, 2308 bp, Zea Mays
aacagctagcaggccctatatataagaaaggaaagaacgactcgctccacgttaattagttcctcgatcgattatcaccagcatctcacttcgttcagatatatatagcaagtctaagtcttagtttttgcttttggaacatctctctaatttcacgattgagcgtacgtgcgcacaaacaaacaaacaaacaaacaatatatgggttcttccaatgatgtcacggcgattcctctaatcgtttctctttgctacattttctccgatcctcctttttgaaggattatggtacactataggaagcttcgcagtttatttcagccaaaaatcctcatcgaaaaaataaaataggctgaaaaaaataagggatggccacaaaaaaggctcgtgtgcatattttttcatccgttgaaaataatacagtttgttttctactactttcttttgccactgaatataatttcttttattgaaaatataaattagtaaaaaaccatagttttcgacgattttcttggccacacaaattactatatgatttcttataaaaataaataagtgcaaataaagcatgtaaaattctaggcagaatcacagaaaaattatacaatatcatataattacatataacaggttacaaatgatattagtacatggattcacataaactataaaggaagtaagatgtccagtaaaaggaaattggcaaaaatgtctttcagtaattgtttcacaccaatataatgaatctccacacatgaactacatgcatggatgtagtagataacagatctgctatatcatgttctgctatatcattagcttctcgaaccatgttctgctgctcggtgactttggcgatgccaaagagatctgtcgggaaactgccattcatatttacagccgggaaagcagtgattattgtacataatagattagtagtagcagtagatatatgttagtgtcatcacagtgttaaaaaatgcacattagaaaatagcatgccacatcccaagataaatagcctactttattaactgaattttaattccacgaaatgaagagaaacaaacagggccttagtggtaagagaatgtctgaagatggattttatctttcattatcgaaaaaaaaaatctcaatgtcgatttggaaatatacggttatcatttgtggtctgccatttgcttctttcttttgtcttttattttccccccattgtcagatgttgccccacttgtcaaaaagattgatgatccagacatggcaaatgataaggatttgctacgagttgttctaacgttggactatgcttgcaaggaggttggattcttttatgtgaaaggccacggcatttgtgagatgctaatgagggaagtgagggatgtgtcacacaaattctttcagcttccacatgaggaaaagatgaagattaagatgacacgtcaaagtgggtatagagggtatcaaaagctaggagagaatgttaccaaggaaaaacgtgatatgcacgaagcagtcaattgcttgactcctattgcacctggcaaatacggagaccttggtaaaacacttgaaggagacaatctgtggcctgaatacccatcaaatttgaaggtagtgctggaaaactatatcagccttgtcaaagatctgtcaaggaagatcatgcgaggtatagctttggcattgggtgggcctgctgatgcctttgaaaggggaatagcaggagatccttactgggctctcaggctggttagctaccctgtttcaagcagtgatgagaaacgcactgatgatactgggatgatgggatcgcacacagactacggacttgttacactggttaaccaggatgatgacatttgtgcccttgaggtccaaaatcgttccggtgtgtggatacgtgccaacccgattcctgaaacctttctttgcaacatcggtgacatgctccaggtctggtcaaatggaatttaccaacccacagttcatagagtcatcaacagctcccatcaacgccgcgtttctgctgtgtttttctatgagaccgattttgatgctgccgtagagcccgttgagttgtgcgtggagaaaacaggcggcgtcgccaagtatgacaaggtcgtgtatggggagcgtctggttcggaaggccttctgctgctttggccatttatagggctggagaataagttatattgctactgtgaaaacaaagggcatactatatgcattgcacacacaatgatctgttgttaaacctatgtgatatatattgtgaaataaaggaacacttattatatata

SEQ ID NO: 38884 - DNA, 1524 bp, Zea Mays
cagctattgcgatggatcctggtcagcggataagccacccgcttccgatccgattccacagctcgaccaactctccgcctcccgtcaccacctcgcggctcgcgctctccgatcccgcgcatattctccaccccgtcctctgctccgccccatcagtacatcaccacgcactactaggacgccgcgccgcagccccaccatctccgagaccgagttctgatcgccgccggaaccggtacacggaaagccgtaaaccaatggcgctcctcgcgccgagcccgcgcgcgctctgcgtgcgggaggccgcggcggcgtcgccgcacccgcactcgttggcgaccgccgcctgctcgaccgttggcggcggggtggctgggcgggcgctgtggctgtggaacggcggcgggacggggaggaggaggagggagcgccgggagaggttccgggcggaggcatacttctgggacgtgtccaagccggtggagatggaggagatcgacagcatggagaagctcgacgacgcgctcaggtggtccgtcgagaacaaccagcccatcatcatcgactggtacgagtgattttgcacatgttgcccgacctgcataggtcactctaacttccattggcttgtctggtgtctgtggccattgattcggatgttgattgtcattatagtagaatcgagatgactttttccgcttttatcatatctatctgcatgcttagataatactatcatatctcatcagaagtcgagacgttgtctattgcttccaggatggcaagttggtgtcggaaatgcatatacctggtgcccagaatggagaagatagcaggagaatatcctggagtcaggttttacttcgtcgatgtcaacaaagttccacaggcggtggtgaaaagaggaaatgtaactaaaatgcccactattcagctctggaaggacggagagtggaaagcagaagtaataggtggtcacaaagcttggcttgtgatggatgaggtcagagaaatgatccagaagaacaagtgacttagcacccatgttatgcaatggccaatggatattgtaccgtgttcaatgtaaatagagatatcagacgatctcttcatatactaagctgaaatcaaacacaaatagagcaaccatgttggaaataaccaaccaaataatactgctccctactccctacgttcagttctctttgtatatgtatgttggaacaagatggatttttatgccagcacaaggaagcaaggagcacattcatattcagttacgcaactacgcaagtatgaagaatagaaagcagaattaataggaaaggcatatggcttgtgaatttgttatccagaagaacctgactcgtgcattgatatagagagatgcgtccaattgatatagattatagagagatgtgtgacgatatcttcggctattatccacatgattggttggttggcgatcgtgcccatgctcgtctggtgcgttgactatgtacatatagatgattggtagtatgt

SEQ ID NO: 38885 - DNA, 2947 bp, Zea Mays
cgcgcccggccgtaaaaaaaccggggtcagcgcgtggactcggccgctgggaggatgtatcgcaaattcgcaatcgaatcggcggccacccggcaccctgcctgcctgtcgagtgtcgacactgtcgtgtccggttggcgccccagcgaaaagcaaaagaaataccggaagaaactgcctcgtgcctcctcctctcctcgcttctccctgtagagaacaggccgaggcgggcgagtgctccagtacacctcgagctacataccccagctcgcacggtccagctctgagctccctcctctccacctccacgcccgatcgtgaatcgtcacttgctctgcaacggcgagagcgccatctttgctgctacccattaactcaggcgggcattccgtcgagcaccttccgttcggcgccgggtggcgtggggagcgagtcctgccgggttgcgtggtccgttgcgtgaacgggcgacagttgctgctttcccgggggcgctccttgatgccgctgttgtggcaggcgctgggttctagcggatggaatgcaacagctcctacgcgctgaagtcaagaaggttcgttgccgtagctgatgcgggatttgaggatgctgtagacggcgccagcgattttggagatacgatgagtctcgcacacaagcagaaggttgtcggggaaaccgtggagacggaggaggagcaggaatttgtttggaaatctagcctgctctcctacaaggatgatggtgattccgttcttccagcacgcatcaacatcaggagagacacctctgcctggcaaaatgaacccgaggattgacaggtctggaagcaatgaaacaagcaaggtccctagactgggttccattgttgggacagccagcatggctggatttggcaaggcagtggagattctagacacattaggctgcttgatgacgaccttgagctcagatggtggctttgtttccaggaccaagaccaaagggtgcaaaatatcaattcttgcttttgaggttgccaacacaatacttaaaggtgctagtattatgcaatcactctcagaagacactgtcacatacttcaaacaagttgtgcttccttccgaaggtgtacagaatttggtgtccagtgagatgagtgaattgatgcgaattgcagctaacgacaaaagagaggagctgaaaatattttctcaagagattgttaggttcgggaaccgctgtaaagatccccagtggcataacctggatcgctactttgtgaagttagaatcagaaaatgcgccccagaagcagttgaaagaaacgtcaatagcagagatgcaaaagttaatgagtcttgttcaacgtacaactgatttgtatcatgagctgcatgcattagacagatttgagcaagagtacttctctaggataaacggaaagggtcacacagatagaattgaaaaaggttactttgcaggaggcaatattcaaattgtgaaactggagttgaagacccaaagtagttatgtaaagagcttgaagaaaagatctctttggtccaagacgttggaagaagtagttgagaagtttgtagacattatgcactacttacatgttgagatcaacaatgatttcggatcttctgatggaggtgtgatgaatgccgaatcaactgagagctgtcaaaggctaggacctgctggacttgcattacattatgcaaacattatcattcagatatacagtattgtaattttctccttgtttttactaagacagatcaagatcttgagtaatttgctttcttttacaataataaattatgtatcatcttaaagcagaaagatactatgctgtagcattgccttcctctttattttatgttttattttcagaacttctagttagataacgtagttgtagcttccatgattggatgttatccaaaaacgaagataattaaccaaacataagcatgactgacaagaattgtgtaaatgtctttgagctgcgttcacaactcacaaggtactattttaaggcgtaggaactaacaaaacttgcttttataggtttctcgatcagggtatgtgccatcaaattcaagagatgcactgtaccagggattgccaccaaggatcaagtcagcactaccaaataaattgagaacgacctcggtgcctcaggagctcactattgatcaaataagggctaggatggagaaaactctgaaatggcttattcccatggccgtcaataccacctgcgctcgaggtttcttgaggtttagcgaatgggcgaaatcagggactgagagggttggtaggcgaccgggtgtagcagatcggattgagacgctataccatgctgacaaggcaaggactgaggactgcattctagagttgctcgtctggctccatcacctcgtcagccagagtaaccggttggcaatgcaaaaagtcactgaccaatgtatctaaccaaaagtcaggaattgtcatatgggccatcacatgctagcatcgcacggcgacttctatccagaaaaaaagaggctgggtttgtcgagtggtccaaggtatccaaaattatatggaaaagaggggacatcaaaattttctgatccagcttgctggttgttttcgtctttgttattaggttgtagatggaatctagagttgttcttgccatggaggtcgtgtgtttttcttctttccatggaggacgtgcggtttttcttgtccggatacagtcgggcatgcagcatgcttatatgtgctccgtacattagctgagtaggtgtagtataagaagagccctttttttttcttctctttgatctgcttgttatttgtaagtgtagttgtgacaatcacattatacaaagaaaacgcacgtcatgtcagtgcagtgaaaaacaaacaaacatgaatctcttttcatatacatatatctgccgtcg

SEQ ID NO: 38886 - DNA, 905 bp, Zea Mays
ccagtagtttataaggtacaattgccaaagaatttgtcaacaatgcacaacatgttccacgtgtcctagttaaagaaatgtcttagagtccccgagcaggttatcgagaatttaggtgttaaccttgaactagatttaacccacttggaatgttccataaaggttttggattaaaaggattgggtcactcgaagatgagttatcaagttttactagatacagtggaaccaacacccgaaagataaagccacttgggaatcagagaagtatttagaaaaacatttcctaaattcctagtttcttctaagccttaagttttgtgtagctgtccctgacgtgaaccaacaggggcacactccctgccttgtagtagtaatggggaaataagccagtgacgcatttcctttttcattatctagcatagagttttaaatctcgggacgagatttctttttaggggggaaggctgtaacacccctggtgttacgataactaaaaccttgtcatgtcatcatctgcacttgcattaactgcttgatacacctagaatgcattcactaggtcaaaaaaatttcaatgaatgtggtgttgtgtataagagtatagggctcagattaagaactttgcttaagacatgggaagagaagtcgtctcttgaacaagtaataagttggcttggaatttaaagtattaaaggtaagacttaggacctagagcaactttgttttcaaagggagatcaagtggaaggaacacttgagctgaagggtcaacttagaaaccttaatgtgagggttgaaagtttgtttgcaattatgtgtaagcaaacaactcctaaatcaaggatactttggacctgagttctataagccaaagttggatttgagattaaggagcaactttgat

SEQ ID NO: 38887 - DNA, 204 bp, Zea Mays
attctccccacctttggccgccgcctcccctctcatctcctccttttccaaactcttgcagccacacaccaaaccctagccgcccccccatctcctcctcccaaggtgcttttcgttgccgctcggatctacgtcgcgtggtgcaaatcttcgattgttttcagtggagggaagaagggaggaaggaaagggggacaacccaag

SEQ ID NO: 38888 - DNA, 1542 bp, Zea Mays
aaccgaaaccgatcacagctgactcccgaatccgtgaaatccccatcgccgtctccgtcttctcctattgccctctcctcgcccgcacagccgcactgtttcccaatcccaaaccctccgaccccacctggaacccaacacgcgcacccacagagggaaccgagcctagccgaaccttcgagaagtttccggaaagccgtgtcgtcgatggcggccgagggcggcggcggccaagagacgttcgaggcgcgggtgaagcgcctgttcgggtcccgcctcttcgacgccgtcccggactcctccttcccgacggcctcctggtccgtggccgcgggcgacgtcgagcgccaacgctgggcgaagccgtcagaggcccgcgacgcggaggaagaggcagcgggtgaggccggccgcggggacacgccctgcgcctcctcgttctacgactccaacggttgcctccgcagccggaggcgcaggtccaggcaggaggagttcgagggggacctggacgacctagatgaagacgaggaggaggatggggagagagggagggcgacggagcaggacgaggacgagggggttagggttaacatcggcctcgaccccactctggatcgggaggaagaggaggacaagtatgacagagaggcctttggtagagaggaggctgctgaccgcgtgtacatgcacgatataatggatgacggtataaacatgagcatcaacagtatagtccctgacctccttgatgattccattgaaggggtgtaccgttttaagaaggatcctcgggcagatatgagggcagcatctgcaagactcagagaagacgatgggtctgctaaagatggtgactctcactatgccactgaagcgaaggacttcctgaatgtgggaattcagacaaagaaagctgtggaggaagtaaatgtaaaacctatactgaagaggaaggaggagcaagcggatttgaaaccaaggaaacgtgtccggtttgatgctaatgttaaggatcgcgagtcggatatgtttgaacgtgatgaagattctccaatggttcctcaatccatggaagtagtcacagggaaggagagcacgcctactttgtctgtgtctcctggtgtccctgactatgtaaggaacccttcaaagtacacccgttacaccctggatgtaccagagtctaatgatgactcgaacaggacggctcttgctgacctgcatgatctgttagggagatcagaccaaaacaggatacattctgagactgctgttgagattcctagctcagtcacattcatccctcgcaaaaagtcagtggatgccatggcagtggatgacggtcccagagctattgattccaactcatctgtaattggattggtagcaggtgcctctgatgaacctgatcaatgcgagatggatgaagatgacagtaatttatcgtcaacgccacagatgcatacaaactcgaaggcaaactctcggcgttacagatatgcacttcctttcctatgtagaaacgagtgtcagcagaat

SEQ ID NO: 38889 - DNA, 3089 bp, Zea Mays
cctagggccacggcccgccaccagtagctcgctcggctccagatcccgcgccacaccacatagcatggcagaagatacagcgtagcaaggtccggacgttcaccagagggcagtggggatggggatggggccggcccgcgtgcgctctccgtgcgggaggcctcggcggcggtgccgctcccgcacccatcggcggcggctgcgctcgaccttaggcggcggggcggccaggctggcgctgtgacctgaaacggtggcgggatggggaggaggaaggagcacctagagagagtccgagtggaggcgtactgctgggacgtgttcaagccagtggagatggtggagatcgacagcatggagaagcttgacgacgcgttcaggatggcaagttggtgtcagaaatgcatctacctaatgcccagaatggagaagatagcaggacaatatcctgggtggtcgcagcgatctgtgattgtttatgcccaaagcgtagggttacccgtcttgttagcgctaccttagtgccgcttttttgaaccctagacatctcagaagaggtaccagctgtactttcacgggctttaacaaattatttagaaagccatatcggggtgatctctctggtctggtgacctgatctgagttttttttgccttcattcaggggaagcactcggagatgaagctgaagcagagcaaacgtgagacgcaccgtgggcattctctatccaaggggaaggtgtgacctcaggcctcttctgtgcgatgcattactcttaatccgtgtttgcgttggttgctttgaattaattgtcatgtgcttatttgttagcagccaaacaaaaaatcgctcaagttatgataacccgactattccttgacctattatacctgtttccttataacttcttatgattgcacatcataattacttgagaacatatatttgtgaattgctttggtgtccccaacaaactattgtatgttccataacactatagacgtacaaatagtaattggaattgtttctgtacagagtaataatgaacatgcattggataaacagtaggaaacaaaagaagggcaacatcattactctgatcctcgacttacatttctatttgtttttccttcgtacagtacattccctgtcatttgtttgaatgatatgtcaagctttgaattctccaaatcatgcacaatcataagaaacacgtgcagcttattaggccacaattttccatgctttttgatcagtactgaaccccataaatggagactacattgtgtttgacaaaaaacatgcatctttaagtgtcgtgataattttttccacaaatcaacaaccataacccaaaataatgtatcactaatatttaaagctgctacttctagttttctctagaaacctttatgcgtattttgtggacttgctcctactaaggttttgctatttgcaaatttatatagatcagtctcaccattcaaaaagtgcttggatgaaagggaaaaagttaccattcaaaaagtgcttggatgaaagggaaaaagtttggatgaaggcattggtctataaatttttagaaagtccaatatgtgctaaatcctatgtattcgacattgtgtgtcctaatctccccttatcaaaaatagcatagagaaaaaaagaataagtgcaacacaaatgcacaaaaaacagtcaatgtttcggtaaaaatatgctttacactttgacagaaaaaagaggaatatagaataagtagcataaacaagatacatcaaaaataataatgagagtacaataaaaaatgtaggtatcaagatatggatcccaccttgtgaccaaacttacttttattttggctttacagtttgatctatggaatgctaagttcttttgcttgccaactttgctcactcaagcaacttctttctttaaagttatcctattattcatgatttttatttggatgttttggaccttttcttcaaacattagcgagatgcagtgctagtgttgttaatatacctacttgcaggttgctcttttcttatattatttccctatgtgtcgtgctacattataaatatcaagtaattttaatggtacttcttttctgtaagtatacacattaatccttgcaaaagttaaatctacatgtgcatttatttatatatctatatacgcagtgaactttatgtactcaatctaaagatcgttctatattcaatatatctagaatccaatgtggcattttattagcttttagataccaaaccttgctattgactgttcatacatatgtttctaatcactggtagacttcataacttttagacatttttgacctttgtaaattcatattacatattgtattcagtttcttatctcaaatattatagaactatattattataggttgctggaacatgatctggattcaaaatggttggctattgttgatgtaagaatatactttatgtaccctcaagatcattctgcattcaatatatctagaacctaatgaggctcattctgcattcaatatatctagaacctaatgaggcatttccttggcttttagataccaaaccttgctactgtttgttcatatatatatatatatatatatatatatatatatatatatatatatatatatatatatatatatatatatatatatattcatgttaagacatcttattgtatccaatttcttatctcagatatcttgttctccccacaattttatgttctacatgagtggagagatcatatagctcatgagaaagatgagggtactggttagtggttgtatactgccaaataaagcttgaatcgagataggtgttgttgtttttttctttatatcctgttataatggtgcaaaattggatctacaactttgctagctcccccccccccccccccaaaaaaataaagcagatacctacagatgttggacattgtaaaagaattgtaaaatcaaaatatccatatgttgagaacaatgttgtcgtaatcgcttaccttacactgttcgtactgcaattgattattcttatgcctttaaagaagtagctgaa

SEQ ID NO: 38890 - DNA, 2371 bp, Zea Mays
tgctcttctcttctattgggacactttgtgataaactgaagcaaacagatccatataaatcagagcttgagacaatgctggtccgacatgtctttcctgaattcagcagtcgtgttggacacctgcgagcaaaggcagcatgggttgctgggcagtatgcccatatcaacttttcagacccgaacaattttcgtcaggctatgcactgtatagtttcaggaatgcatgatccagatcttcctgtgagggttgattcggtctttgcacttcgttcttttgttgaagcctgcaaagatttaaatgagattcgacctatacttcctcagctccttgatgaattttttaagctgatgaatgaggttgagaatgaggatcttgtgttcaccctagaaaccattgttgacaaatttggtgaagagatggcaccttatgcattaggtttgtgccagaatttggctgctgctttctggagatgtatggctagttcagaagctgatgatgaagctgatgattccggtgctttggcagctgttggttgcttgcgagcaatcagcacaatccttgagtcaattagcagcctcccacatctttttacgcaaatagaaccaacattgctgcctataatgcgcaggatgttgacatctgatggccaagatattcttgttccattagacaactacatttctcggggaactgatcactttcttgcatgcaaagatccagattaccagcaaagcctgtggaaggcacttcaatctattatgatggacgaaaacatggaagattctgatattgaacctgctcccaagctcattgaagttgtttttcaaaattgtaaaggcaacgtggatcactgggttgagcactatctcaggattacaattgagcggttacgtcgagcacacaaaccatacctgaaatgcctccttgtacaagtgatcgctaatgcgctctactacaatcctgcgctgacccttgagattttaaataagctcggggttgcagctgacatttttaaccattggtttgctatgctacgacaagttaaaaaaagtggggcacgtgttaatttcaagagggagcatgataagaaagtttgctgcttgggcttgacctcccttattgcgcttccagctgctaagattccagcagatgctttggatcggatcttcaaagcaacacttgagctgcttgttgcttacaaggaccaagttgcagaagctaagaagcaaaatgaagaggctgctgatgatatggatggttttgatgctgatgaagaagatgatgacgaagttgactctgataaggagatgggtcttgatgatgaagacggggatgaagtaagcagtcttcagctgcagaaattagccgcagaggctagaggcttccaaccagccgatgacgatgactcagatgatgatttcagcgacgatgagctacactcaccaatagacgaggtggatcctttcattttctttgtagaaactgtccaaggtttgcaggcatctgatcctgccaggttccagaaccttatgcatacattggatttttcttatcaagcgcttgctagtggcattgcacaacatgccgagcaaagaaaaaatgaaattgagaaggagaaatctgagaaggcaaatgcacagtgacgtcataaagcatttctggttcccttcgattgttttgccattttgccggtatagcattggtggacggttaatttcctgcgatttgcaggccgcaggtaagagtttttgcagccttagccaaagtgtaggacaaattcaatcttgtgagatagcatcttggataacctgtcacctcgaccatgttcgtcgtggccagttgtagacgtcttggttgtgcaagaaagtttctctcgaggacagttgctcgttttgttagggccatcaatttttttgggcggcttgtaagttatttgagaatcccacctcaggttgaggggttgtattctcgagtcgtcaaagtttagtaccggtgcggtgtagattgtatatggtttcagttgtctagaacgttgtggcttcatggacgggctgtggtataagtttttattattttttaatttttttgtcaacaagacattgtaattggggtttgtttgtttggtaagagcaagaaaggtcggcactgttatttcttcggtatcattgtccacttgtttcgatattagcagtttacctaatcctatatccaaactccactcttccatattcaaactccactctgaacaatgtaatctatagtgcttttgagtaaactatgaaaagattgctgcagatggttttacaatgatggaaaatgggtattgggataagtggtattgggataagtatcataatgatattgcttg

SEQ ID NO: 38891 - DNA, 3950 bp, Zea Mays
tcttcaccaaacacacgctctctctccccttcccatctccttcctcccgccccagatccgagcccggcgcccgagttcatggcgagcgacagcgacgtcgacgaggacgagctcctgcagattgcgctgcaggagcaggcggcgcgggacctcagccaccagcgcccgcccgccgccaacaagcccgttgtcaacctcgtccgcccacccgcccccaatgctcgcggcggcaacgccagggccgggggcgccgcagcgaaggcgcgccagcccagccgcggcggcgacgaggacgacgactcggaggtcgagctgctctccatctcctccggcgacgaggacgacaatccccgcgcccgcggcccgccgccgccccgcgggggcgggggtggacgcgccggagcgcggagggccgcgtcacgggacgatggggacttcgacgatgaggagcccagaagctggaagcgcgtcgacgaggcagagcttgctcgcagggttcgagaaatgcgtgaagcaaaggtggctcctaacattcaagaacttgatcagaaagcagcagctgctgctgcagctgctgctcgaaaggccctcacgagtgtacagactttaccaaaaggagttgaggttttagatcctttgggccttggtgtcattgataataaatccctgcggttgatcactgacgcttcagtaagttctccaatttcaagggagaagtctcaaggtttggaccccaatatgcgagacaaagttatctattcatctccaaattttgatcccaaagttttcctttcgtgggtccacaaagacacgagcgctgctgacttagaggctggtgctctcaccttgaaaactgatctcaaagggagaacacagcagaaaaaacagttagtcaaggagaacttcgattgttttgtctcgtgcaaaactacaatagatgacattgagtcgaaattgagacagatagaggaagatcctgaaggtgcaggtactgctcacttgtattcagtgacacaaaaaattagcggtgtggcaaatcgtgcatttgagcctctatttgagaggcaggcccaagctgaaaagatcagatctgttcagggaatgcttcaaagattccgaacactatttaacctaccaagtgcaatccgtgggaacattagaaaaggagaatatgatcttgctgtcagagagtaccaaaaagcaaagtcaattgttcttccttctcatgtatggcaacttcctgttttgttttatctgcctatgttatccaattggatggtgaagcatgcatgcatgaatgagcgcatggtatggcgtaatcccacagctgataagatattgtgcatgcattgtccagctcatgcactcaatgaaattaggtggggatactaaaacgtgtactcgaagaggtcgaaaaggtgatgcaagaattcaggggcatgctttataagtccatggaggatcctcatcttgatcttgctgagattgagaacattgttcgtctattgttggagttggaacctgaaacagatccagtgtggcattatttaaatattcagaatagcaggattcatggattgtttgaaaagtgtactcaagatcatgactcgagaatggaagttttgcaaaataaaattcgcgaaaaagtgctctctgattcgaagtggaggcagctgcaacaagattcaaataaatctctggaagttgattctaccattggtgattctcctcgagttgatcagttgtcaacaaactttatggctgaggaagctgatagtttaagggccacctacattcgtaggctaacttctgtactgatccagcatgttccagctttctggagattagctttatctgttttcagtggaaaatttgccaaggcagcttctggtaacgtagtttctgattttgatgtgaatgcaaagccgactgcaaataagaatgatgaaaaaggtggagaagtaaagtacacaaaccacactcttgatgaagttggtagtatggttcaggctactatatcggcttttgacactaaggttcagagtaccttccgtgattttgaggaatgcaacattctttgtccatacatgagtgacactataaaagaaatagctaaggcctgtcagactcttgaagggaaggattcgtctccaactgctgtaaaaatgttgcgcacacttcattttgaaatgacaaagctttacattctacggctttgttcatggatgcgggcaacaacaaaggagatatcaaaagatgagacttgggttactttatccacccttgagagaaacaagtcccagtatgcgatttcatgcttgcccctggagttccgtgacataacagtttcagctatggaccgaattgatactatgattcttaatctgatgagcgagactgcgaagtcatatgacatttctcaaccacttcaggaaatcaatgagtctgttagacttgcatttttgaattcctttctggactttgctggttatctggagaggtttggaggtgaactaaccgagaacagaccaaacaaagaaaacaattatgtctcaaatggatacataaatggtactagagaaacatttgttaacacagatggagatttgcacaaaaagctgctggttgttttgagtaacattgggtattgtaaagctgaactttcagaagaactttacagcaaatatagacacatttggtctccagtcaggaataatgaggagcgaagttctgacatgcgagacctgaggacttctttctctgcacttgaagagaaagtcctggaccaatatacttttgcaaagtcaaacttgatcagaagtgctgcacaaagttatcttttggattctgggatttattggggagcagcgccaatggtaaagggcattcgagatgcaactcttgacttactgcacatccttgtagcagtacatgcagaggtatactctggcgctcggcctctgttggagaagacaatgaaaattttggttgagggtttggtcgacatctttcttagtgtttttcatgagaataagaccaaagatattagattgttggatgcgaatggtttttgtcaactgatgcttgagcttgagtattttgagactgtactgcacacgtacttctcacctgaggcgcaacaggctatgaaatctttacaagagaatttgttggaaaaggcctgtgaaagtgttgcagaagccatggaaaatcctggacaccaacgtcgaccaacccgtggcagtgaagatacagcatcggatgacagacagccatcagtatcacctgatgatttgcttgtgcttgctcagcagtgcagtagtgatctgctgcaaggggagttggagaggactcgattgaacatagcctgtttcatggagtcgacccttcaaccaacagctgcgccagcaggcccaaagcctgccgcacattcttcttaccaagcacagcatgctcccgtccaaacgtcctcgcctagttttagaaggcagcagactggtacaagttcccctgtagtctccaggcggcgccggtgagcttagtgcatctttccatcattggcgtagcctcttcccggagtttccttccttttcccccctcacatgtgtgctttttttaatcacttgtaattgtcatcctgttgtcatgtgttacgaatttcgatccattcttttggtgttgtataagatgaaaaggaggagtacagtactggtgctgctgcacgggatcatggaattgtataatatcgacgagtcaaatattattgctgcttgaagataccaccacagctttatgtatatggaattctggagttgtcggtctgcgccaacttccttcctgcggtcgtcaccgcatgtttgtacattcgtcgcttggacagttttatgtatcccgagatttgttaatattgtatcagttggttcgtgattgttgatatgtctgcatgcttt

SEQ ID NO: 38892 - DNA, 1325 bp, Zea Mays
ccaaagagagcttggttcaccttgcaagaacgaagactgttgcagaagcctgggccgccattgaaggggctacaagcgtttcttcaaacgaactgccctagaaacatcagactatcttaaagatgattgccttttagtgaactgcactgttggcgttgttcaatcacatactgaaggaccaaagatatacacaattccagtaccgcggtccaacatggctctacatattggtcagctattgacaagtggaaagaggacagacattgcattcgaagttgatggagagatgtttcctgcccacaaggtgattctttcagcccggtctcctgtttttagggcacaactttttggcccaatgaaggataaggacatgaagtgtataaagattgaagacatggaggctccagtattcaaggccttgctccatttcatgtattgggatgagttgccggatattgaagagcttactggtgtaaatacaacttgggtatccaccttgatggctcaacatttactagctgctgcagaccgttatgcattggagagattgaaattgctctgtgaacttaagctgtgtgaagatgttgcaataaatacagtggcaaatactttggcactggctgaacagcaccactgttatcagctaaaaactgtttgcttgaaatttgtagctctgcctgaaaatttgaaagctgtcatgcaaaccgatgggtttgattatttgcaacaaagctgcccatccctcctgaccgagcttctcgagtatgtggccaaggcaggagagcactccgtgagcccctgcttgtattcaactgaagtccttgacggtggtgatgccaatgggcgacgcgtgaaaccaaggatctaacggttggaagaggagttcctcgtgcccattttaagttgtaaagtgtttcgaatgacgggtgcttatgtggccgtgccatatcatgcatgttgtagcgtgtgggtttgtgtgtgtgttgtgacttccatccctctccccagccgtattgatggtactgtagagggtgttatcgctaatatataccctactgacttatgtattgcatcgctgtttcaaagcagtctgtcatcataagtgcacacaggtggaatagggcgaggatggtctggtgcaaaggtgaaataatggcacagactgtgtatgtgtgtgtcctgtttttcagaagttttaccttgcggtaggccagatttgtcgattcttagtcgtctgtatttggctgtattcaattgaaattgtgaaatgtatcagttgaagttatgcgtagacattcacttccatacctctcgaatacccgttt

SEQ ID NO: 38893 - DNA, 2114 bp, Zea Mays
actcgacttcccccacctccctcgtcagctgcagtgtcaatccctcctctccgccgcctacagctgcggggagctcgccagtcgccacttcgccagtcgccacttcgccagaatgttccatcagtaccaggcagcgggtcgcgcgctgccagtccccgctgatgagcaccccaagatctaccgcatggagcttgcgctaccaacgaggtactatctgaggaagctcaagtctcaagaaggtttaagagcaacggtcagattctcgccatagacgagatctttgagtgtaaccctacaacaatcaagagctgtggcatctggctgtgttaccagtgcaggacaggttaccacgacctgcacaaggagtaccgtaataccaccctgaatggtgccatggagcagatgtacaatgagacggcttcctgtcatcgtgtggtcaccctacatacagatcatcaagacggcaacaatcaactttaagctttgcaagagggacaacgccaagcagttccacaattcaaagttcaagtttcctttggtttactgcaacaagtcaggccaccaaataggaagctgaagaccaccttcaaggctttaaggcccaacttgttcgtgttatccaacttgccctgacaccctcccaaatctgtgaggctgtcagtctggtggtttgctagttcaggatgtctgaccataggcgtagaggagggagacgtacccagcaagagcaacatgattcgtaggatgaggcaccccattcgcagttgcctcccccatccccgatgacaatggagaagatgttcctcatgcaaactcaagcagttcagtcaattgtgcagaccctgatagccatccagcaggtgcaacaacaacctcagccacagatacagatatcgtagatgccaagagataatgtgcggagtttatgagaggtcatctcctgtgttcgctcagtctgctgacctcatggacgtcgaggattgcctgcgtatcgtggagcgtgagttgcacatcgcccaatgcaacgacagagaaaaggttatgtttggtcctcgcctgttaaggggagtagctcagtcctggtgggagtactatctcgctatccacgccgagcccgagaccattacttgggaggaattcagggataactttcgtcggtgtcatattctagaaggtctaataatagtgaagaaaggaaattctgacactaaagcaaggacccatgtcagtgagtatagagatatgtttctgcaattgtctcgctatgctactgaagatgtcaacactgatgccaagatgcagtaccgtttcctaagaggctttgttgatccccttcactaccaattgatgaatcataccttctccatctttcagcacctgatcgacagagctatcataattgagaacaagcgcaaagagatgaaagatcaaaaacgtaagattggtggacctcagcccgagagcaacaatcgtccccgtttctcaggtaatccacctcagcagttaaaacaaaatcactgtcagggatatcaacagcagaactagcgtctgcatcagtagcaattccagaggcagtaaccccagcatcagcagcagtatagttagaacagtcaatcgggaggaaatcagttctagaggcagaataatcagtcacctcgtcttcctgccccagcaaccaactagagtagtcaaccagcggccgatgcactgcacctgggatcttttcagatactgtaccatgacgatcttcttcagtgtgcctgacataccaacttcagggcacttgttcttcgatttcatgcaacaaaccactaagccgactgtaccaaagttgttcccctatataccagcttaaattttgttacaaagatcttagtcaaacattcactggatcgagcactatttggttttaaagttgattcgatgccactgttagtctaatttcagagtgatactcgactgaaagcccatcttctagtccattttgctacaatttctgtacaattatatatctcaatcacttaatcaaacattcactggaagaaaatgagttgtctttgtaagccggtgcactatgacccaaatagagtcacatcttttagatgtcttgggta

SEQ ID NO: 38894 - DNA, 936 bp, Zea Mays
ttgctttctggtgtctgtcccgttggaactgggctggaaggcataccatcattctcatgcaaccatcacagaacagatcgacgaggacatttatggactacgattcagttaaccacgcgctggatggaatatgtggtctttacgaaaggaaaatcagaaacatcaacccgatggtcaggaacttgacttatgatatcggtgacctgtacaacttcatcgatggcctgaccgacataagtgcactggtgtacgacgattcacttcacgctttcctgccgtatgaccgccagtggataaaacagaagctgtttcagcacctgaagcggctggcgcagcagtagggtatcatcaccgctggcttttgacgtgcatgcgtcgtggggagaaccccctcacctaagccttaaggctttgtttgggtgctctagtattaacctcaattcatatgtattgaggtgaattaaggtgtacattagtttaatttacaactcagggcttgttcggttagctctcaatccatgtggattgagtggaattggataggttttaatcccaaacaagtcaaacttattctcaattttttctaatctcatccaatccatatgtattgggaataaccgaacaagccctcaatccatctcaacacatgtggattatggtcaatactagagcatccaaactagcctatggttcgggcttggatccaaatgcccaggatgtgtgtatagaaataagacctgtatcccgtgtttgatgtagaacatgtggtcatgctgcggcttgcttctgaagatgattggttgaacaatgcagatttcatgtttgtcatctctctcctttttctgatatctgacggactgggcagcatgaccgtgtttagagataggttgggatgatctgccattggattctagatcttttcacgttcacatatct

SEQ ID NO: 38895 - DNA, 774 bp, Zea Mays
tgaaaccaaacgaggataatataattgcattcattgctcataaaagtctttcctgggttacaacaatttaggggattcacccttaagcctagtccagaatttggtaccaaaactaagctcacgtgggttcctatcaatcatgttcatccttaagcctaatatgtcaaattaacccgtcaaccctgagtggtagaggcaacgctggaagtaggtgaaggggcactctggagggagtcgctttggaccaggagttggctctaattcctcgagatcctcctcttcctcgcttcctgcctcgtttgcctccatgtcctgttggtgcatctctaggtggttgttggcttcctcaagctcctcctgcacatcatggagctggatctccaggatatcgatggtgttatcccagattttcacctgctactctagagttgcgatgcgctggctcagctgttccacttacaggcctttttccaccaattctgaagacaagttgaccacgaagtcctctcgtgtcacacccggatttaagggacaaagccgggtgcatctcatacatgcgccaaagaagacaacatatataataatagagtttatagagataaatgtcacaataacatcagattacttattacatagtgtaagtcttacaaagtaagagataaatatagaacgaactaaggtccatccttggcgccataaagtcaactaggagatgccacttagatcaaatagaactcctcattgtgcggctcctcttgaaccacctgttcttct

SEQ ID NO: 38896 - DNA, 3114 bp, Zea Mays
tttgtacctaaagtgatgaatgccaaaagattctcgctacagagacgaccatgtgaaagaatttaaatctagagtacaacgtgaaggaatggcgttgccgtcggccaccgtgctgtggacggccagcatcaccttccggcttgcacagaacatggtggtgttgttcttcctggcggcgctactggcggccccggcgcgttcgtcgtcgccgtcgtccaacaacggcgccggtcttcagcagcccaccctgaccctctgctccggtcactccactgtcgccaagagcggcgagttcgccagcttcctcgcagccgtgtgcgccggagcctacggcggcggcgtcgcccacatgtcccacagcatgtcctcgtacgtcgccgccgagaaccggaccatgtacggggtcgcgcagtgccgccccgacgtgtcggcctccgactgtactgcctgcctcgctgcagcctcgtccaagctcatcaccgggaccgcgtgcgcgacgtcggcggtctggcacgacgcctgcttcctccggtactcggaccgcgacaccggccggttccgcgaggacgaacacacggagaccgtgttcaacgcgagccgcgcgctgtcgtcgttgccgccccacgttggcgccaacaaagcggtggtggtgaggcgcctacttgccgccgtcgcggacagcacgaggagcggccacatgtgcagcgacatcggtgtcggcactggtgcggcaggcggcggccggatctacggactcacgcggtgcgccgccgagatctcgtgcgcagactgccgccgctgcctcggcggcgctctcgcggtggtagagcgcgagtacaacggcagcgcggggatgcaggtcctgcggctcagctgcatggccaggtacgagagctaccccttctacaacaccaagttcttgacccggcgattgctggcgtcggcgacgagcgggagcccccggccgactcatggaggaatcgtctttaactcttctatatcttttgggccttttgggctcgtgcactctggcggtcctaacccaccgccttcaccgccagtatcacctccaccaccagcattcacgaccatctccgtgcctgctagtgtgggcactgcacaacccaccccaccgccttcacggcctgcacaagcacagccatcaccacctccaccagcagcatccatgatcgtctccgggcctgcgactgcgactccgagggctgcacaagcacaacccaccccagcgcccccaggcggtcataacccaccgcctgcatcacctccaccagcatccatcatgaacatctccgggcctgcgactgcgactccgactccgagggctgcacaacccaccccagcgcctcctggcggtcctaccccacagcctgtagctgccgcaacgaatgaaaacaaagggaagggaacattgaatacaccaaaatggcagatcgtctctattgcaactgggttggtggctgctttcatcatcctcgcactcaccgtatggtgccgtcggaaacagcaactgtctcagagagaacatgtcatagaaccccatgttttgaatcatcaagcagatggagtgccaggtgagactatgcatcacctagaaaagaaacatttgggctccgaagaagacgacgacggaggaagaacaagctgccaactctacagctacctggttcttgaggctgctacatgtcgcttctcaagtagaaacaagctagggagcggtggatttggaacggtatacaagggcacgcttgagaatgggaaggacgtagcagtgaaaaggctcagggactccaagagggcgatacaagaactagagagggagatctccatcgtggctagcttgcgccataagaacatcgtgaggtttttagggtactgcttccaagaggaagggaggttcttcatctacgagtatgtgcttaacaacagccttgataaattttggtacaaaggtaagttcattactcccactattaattatgtttaagcgggtgctcgttttaatctcaatccatatggattgaaggggattcgattagtttaaatctctagcaagtcaacatctatcctaatttctctcaattccctccaatccatatgagaggggaataagcaaacaaggtctaacagggtagagattaccaaggagaaaacaaacacccaaaaagttggcttgcaattgcagcatcttctcaatgccagaagctagagtgggctacatggttcaacatcatcttaggggttgctcgcggccttctgtttctccatgacatggggatcattcatcgggacctcaagccacacaatatacttcttgaccgtaacttcaacccaaagatcgctgatttcgatctcatgaggatgtatgatcaacagaaaactcacgagagcactgagaaggtcgctggaacatttgggtacatggctccagagtgcacgtccggacgaaaattcctactttcgatcaagtctgacgtgtacagctacggggtgttagtgctggagatcatcaccggccacaagatctacactttcgaaggccaaaactctgaaggcctcgtcgaatacaccgtgggcatgtgtgcgcaggtgtggcagcactggtccactggatagagaagagagcgagcgacgtcatggatgctgacttaggtgtggaagggcatgagcacgcgccacggcaagcgctgcggtgcgtgcacgtcgcgcttctctgcgtgcagtctgaccggtcgaggcggccaaccatggggcaggtcatcgccatgcttagcagtggcgacgacgggacagatgacctgccggagccatctctgcccgggtacgtcctccgtccaatggcggcgtcaggtgtccagctatgctttgggtgcaggtagcgccgcttgatgacgtacgacggtccatggccagtacaaacataggtaataatctctggtctctccatcaacaaaatggatgtaatcctagcaaggcttaaatttgatcaactataaactttagcggacccagtgtttgatcatagcctgagcaaatttcattgagctaatcaaatcgtgtattttggaacacgggctacaattgaaacacaaggac

SEQ ID NO: 38897 - DNA, 862 bp, Zea Mays
atggctgggaggaccgcgcccgcctccctcccctccttctccctcacgcccgactccctcgctgcccctttatcctggatctcgtcatggacgctaccacgaccaacgattgatatcatgtccaagttcttcaagctgatggtggttctacaattaatgaatgatttgaacgaagtgttcaagatgccgctatctcttgtattgaggcttatagtgtgcttgaggttcttcgacctctctataattcccctaagatactggaacaaaagtcttcctcctcgtctgccccaatgtcggcaagtcagccctcttcaacaggtgagagacaccttaggaaggcatcggtcattgcctctcgcctgtagtttctatgccgctatgaggggtggtggcatttcctcaaatacgttgcatgtatcactgtaactgttcttccccttccgttaccattaacccatgcatctaattacttgtatattttacgttaccgttttcctgttctcaacatttcagattctagatgatggtacgacaaattattttaggagcgctttgacataatttaaagcttggaagggagctttctatgatttatttttctgactgtttcgtcacatgttctttccctagatgaaagtattgatttatttttggttctgcaggatcattgcgtctctgcgagctaatcagttctgtgagcgtctccctagccccaatggcgagtcaactgttgattgtcatcagatctcaaagatgccaaatcttgcattcaccattgcaaacaagactttcaccttaacaccagagcagtacatagtgaagttggagcaagcaggacaaactatctgcatcaatgggttta

SEQ ID NO: 38898 - DNA, 371 bp, Zea Mays
cattttcctaaagtcattgttctctggtccatgcgcgcctggtcgccgtgtgattcctgctcatcttcaacgccggccaacctcactccatggccgtcgcttggctcacttgagctccatcccgcccccagctcgatctccagctacctcttgtgcggctcctgggagctaggctcctcaccggcagcagccccaacacagcagtaccaacattcaagacctccacgtcggccaccatctcggactccgccggtcgtcgagtcctgcaggttctctttacctcagcgcgctgcgactccttcaccggtgtgcgtcctgtctccagcgttccttgaccaaagctagtcaacgatcgatgtgatagaactccg

SEQ ID NO: 38899 - DNA, 1425 bp, Zea Mays
cctgcacgtccatgtaccatgtacgcacgcaggtgatcgagctagctgcagctagcgtatcgccgaagaaccaccgttgcacctgtgtggggcaaaacaaaacaaaaaatccactggccatcggccgcgcggcggggccgggccggcgtggctggaggcgtccatgcggtccgtatcggccgggaccggagcatgcgtcgaccggccgggagagcatcgcagtaatggcgccgtgccgacggcctgggacatgctgtcgtctgtcgacgacactcccgggccgcgccccacgggaccacgaccacggcgcctgggtgcgtgcgcgcatgcagtgcagggcgcccgcgcctccgatccgctggatggcgcccgcggcctcgcgttaacgacgttgtccctggaggcctgaacagggcggcgcgcgacagcacccaacgggcgatgggccatggccaacgaccccagcgcgcgcgcgcagcgcaaccgtcggtacagcgagtcggcgtcagcgcgcggcgccgtggaaaacgaatgacgctgtgcgccgccgggctccacgcacggaaaaaaggtcgtcgatcggccggctcgcgctcgccgcctgatgagatatgtgttcacacgagccctcgtcttcttgtcacgtcgcagtcggatctgcgtgaatggtgacctaggcgcgtctatctctctcacggccgccaaggtgcacgacatgaaagcatcgacgatagattgatctccatctccgccgtggtggttacaatacactcgcggtggcttaactgattgcgcacgcatgtcggaccgtcgaatctatcggccgtccgtcgacggagcaagccagccggggcgccgcgatcgaaagcggcgcagctaggtaaccggcagcaaggctcatacgtctacttgcatgcctggcctggtgatcagaaacggcggcgacgacgacggtgatctgatccctccatgacctcgcacctatcgatccatcgggatcatgcatccgggcgtcgatcgccgtggtggcttcctggctgcgtacgtcacatcgtgctcgtgacagcagcagcttatggctccctatgccggcgacagtgcggtggcagcgggcaacaaggcccggccggtcacgcatctatcgtcggtcgatgaacagcctcggttgatctgatggacatggcgagtgatggagacgacgacgtgttgtacgtgcgtgccggcggtctgccggccgggctaaccgctgcattaacccacggccggtcggctctgcttttttgcattgttggagtaccgtcttgtggcaagtttttgtttgtccacgcacgcttctccttacaaagtgatgcatcgtgcttgttcacgaaagcttttcgaattatcagcgtagttgtgcattttattgtgagcacacggcgtttc

SEQ ID NO: 38900 - DNA, 4774 bp, Zea Mays
caaacccacgcggccacgccactctagctaccgagcgagccatgtcgcctgcgcggcctcctccgccttccgctcgcctccgcgccttcccccgcgatggagtcctcacctccttctatgccggtcgattccccagtatccctggatgccttaatcgccgatcctgcggccgcgccggccgcgtgtactgcctcttctctggcggtgataaccgcaagaaacaggttctggcctccgggggttgagtgtcacatcggtgctgcatcaggatcaggcaaacaccgtcgcggatgactgagttggcggtaggagaggtatgcggacaaggtttggttttagtggatcctgttgggccggatttggccttgtaatctcaattgttagactttgttaatctctggtattgggccgtattgtggccgtgtattcgtgggcgggtcagccacacgtataagaggcaaatatctgcgctgaagaagggatggaagaacagaaaccaaatattcatacctctgtctgcttctcttgcctgtgttctttccctttcttctctcttctctccggtgatctctggcgataatccaccggatatcacaaactggtatcagaggcattttccggcgacacttcgatcgtcgtcgagcgacatctcagggaagacatcacggcgccaagtcggccatctgttcaggcgcgtcacgtggttgcagccatggaagaggtggagaaaaggctgactgagaagttccagcaagcatgggaggcgtcgactgccactctcatggagctgtcgaagaagatggatgggttggacacgctgtcgaccaagatgtccgagatggagaagcgacagatggagcatgagaagatcacacagtacgtgcaggcaaaaatggatctctccatgaagtctctggcacaggtatcccaagatcaagcgcgactatcaaatgtggtggcgaatgcaaaccgaggagggagcgtcgcgcagaggggaggaactggtgacgggttgatgggagctcatccacaggcaataccacccagtttccagacatcccagaccgcccctcatgtgtctcatccgacaggaggttcagggaaccattcgtcaggtgaggaggcaagatttggacaagaagaagttaacagaagaggaatagagtcggatcaacatcaccgaaggacttggctacccaagtgggatttcccggtatttgaaggggaagaagctagggtatggatagataattgtgaagcctacttcctgctataccagattccagaggagttcagagtaagcgctgcctctctccatcttaagggtcgtgctgctcactggtaccaatcatttcgagattctgtcgggttcgtagattggattcagttcaagttggagattcggaatgaatttgatcttactacacattcagacaggatgttggaattgttaacactaaggcagacggggactgtgttggaatataagacacaatttgagaaacttgtctattgcattaggttgtttgacaaggctgtgagtgagaccttcttggtgacacaatttgttttgggtctcaaacatgagttgaaggttggggtggagatgcaatttcctaaaacagtggctatggccgctcaactagctttgaaacatgagagtttgcatagcagacacactgcaggaacaagaaaagcagtgggagtaaagggggttcctccagtgggcttcaaagaaggtacagagtctcaaggagaattatggaaggccaaacaattgaaggactataggagggcaaatggactttgttttaaattatccctcaatgctatgagtggcactaacaacccaagatgtgtgagaatacaagcattgatcaaggaccagttaatccttcagttgttggattcaggcagctctaacactttcataagtgagctagcctgttctaggattgggtgtgaaactcagaatatagagcctgttgcagtgaaggtagcaaatgagcagatcatctactgccagaagaaggttgtccaattgaagtggtggtgtggtgggaaaacctttactgtagatgcatttgtgttaccagccactgcatatgatatggtactgggaatggattggctggaaaagtttagtcccatgttatgtgattgggatagaaaatgggtggaattcagttatgaaggagtgagaatcaggctgcaaggggtgggcaataaatctgcagctctgttgccagaagcatcccatgagcaaatccagaggtggcacaaggggaatgaaatttgggcagttgcattgctacaacaagtgacaccagagttgaaggtagtcactggtcaagtccctgagtgtgttcaagaggtgttggaccagtttaaggaagtgtttaaaaccccagattctttaccaccctcaagagaatatgatcatactatctctctgttgcctggaactacacctgtgaatgtaaggccctatagatactcaccattacagaaggatgagattgagaggcaagtccaggaaatgttgcaagcaggaacaatcactagaagtgtcagcccctttgcttctcctgttttgttggttaagaagaaggatgggagttggagattttgtgtggactatagaaaattgaatgatattacagtgaagaacaaattccctatgcctatcatagatgagtttattgatgagttagcaggagccaaggtgttttccaaattggatatggctgcgggttttcatcagataagaatggcagaccaagatgaaatgaaaacagcatttaagactcaccatggacacttccaatttagagttatgccatttggtctcacaaatgcaccagctacatttcagtgtttgatgaatgctgtatttcagcaactcatgaggaagtgtgtcttgatttttatggatgatatattggtgtatagcccttcactggagacacatgttgttcatctacaacaagtttttcaagtattagaaacacatcagttgtatgcaaaaaggagcaaatgtgcttttgctctcactcaaatagaatacttggggcatattatttcagacaaaggtgtgtcaactgacccttctaagacagaatcaatgagaaggtggcctactccaaagtcacacacggaacttagaggatttttgggactcacaggctattacaggaagtttgtcaaggggtatgggatactggcaaaacctctgacggtactgctgcaacaaaaacagtttggatggccaccatcagcacaaactgcctttgaggctttgaaggatgctatgattaccactcctgttcttgccttacctaatttcagtgagacatttgtcattgaaactgacgcttgtgacactggcattggagcagtgttgtcgcaaaagggacatcctgtggctttttatagtaaagctttaggagtgaagaacagccaactgtcaacttatgagaaggaatttcttgcaatattaatggcagtagagaagtggagatgttatctgagtagaggaccttttgtgattcggactgatcacagaagtttgtgtcatcttcaggatcagactttggcaacggatatgcagaagaaagcaatgaccaaattggccggactgcaattttcagtacaatataaaaagggagcagaaaataaagctgcagatgccctttctagagtggcccataatatggaattgtcggccatttctgcaacaactcctgtgtggcttcaggagataacaaattcctatgagttggatactcatgctcaaagtctattggcagaactggctgtctctagtccaaatgagcaagggtttgaattgaagaatgggctgatttacaagaataacaggcttgtagtgggacaaaatgtggggctgcaaacaaagttgatttcagcctttcatgcatctcctttgggaggacattcaggaatccaggccacctatcaaagggtgaagaagttatttctttggaatggactcaaggctgatgtggaacaatttgtgaggcaatgtcacgtgtgtcaacaagctaaacacgaacattgtaagtacccaggtctgcttcagcctttgcctattccccaaagttcctggcaagacttgtccatggattttattgaagggctacctaaatccaatgggtattctgtgatcttagtggttgtggatcgcttgacaaaatatgcccattttttagcagttaaacatcctttcacagcttcacacattgctcacttgtttttctctcaagtggttaaactacatggattccctcataccatagtttcagacagggataaagtgtttaccagcacattttggcaagagttattcaaattgtctggaactcagttacatctcagttcagcataccacccccaaagtgatggtcaaacggagcgtgtgaatcaatgcttggagatgtttttgagatgtgctgttcacaattccccttctcagtgggcaaaatggttagactcagcagagttgtggtacaacacatcctatcatacttctataaagtgttctccatttaaagctttatatggagttgagcctaatttgggatgcattcctgtcactgactctttgaatccttcagaagctcaactcaccttgcagcaaagacaggaattcttggaagtaatcaagacaaatttggcatctgctcaaagcaggatgaagcattatgctgatctgaataggtcttttagacagtttcagattggagatctggtttac

SEQ ID NO: 38901 - DNA, 3249 bp, Zea Mays
ggtgacagttagttgaaatgttggaagggctttacaaataactaaatagaagagactataaagtgaacttatcttgcttggtctgctctatttgcacagaggaaaccaaggcctggttatttgtggagcaatactcctcctgtaactcttctgcacgtggtaccactgtagagttcagatatttgaggtctttgctagaacaatacagtcatgttatcagtagctaccaccaatggcagccaagggaactccatggaaacagtcatggcaacaatggagcgtcaaacagctcgcaggacccagactaatgtgacacagatgatggaatctatttttgccagtgtcagtcttgctaaagatctttctgctaggtgcaaaagcagagcattgcaagtcacggatgatgagatacaaagcacagcacaagacctggagaatgtcttgcagaatatatatgatgatctttgcaggataccagcttcagcatttggcagtagtgcttacatggatgtgcctattaaatcacagccaatgagggattgctgtaaggctgatatacccataaatgtaatgggcaacagacctaggacaaggtctctccgagataatgatactccgaggctggtggactttctcaagggaatgtaccatgaatcgcatgaatttagtgggcagatgttcaacactctcctagaggttacagaatacattgagccactgtatgatgcgttcatctgtgcactaacaaatgagataatgactgatcctgtgatgattgagagtggtgtgacatgtgacaggagagccatagaggagtatattgagaggtttgcagacagttctgaacctgtctattgtcctgtcacaaagatgacaatgcaaagtaagacaatggtgagcaatgcttccctgaagtgtgtaattgaagaatggacaatgagaaatgagatcatgcgtgtcaggattgctcgtactgccctttccctgtcaactacagacacaatggtgcttgaagctatacatgagctaaagttgctggccaagttgagggtgaagaacagggagctgatgcacaagatcggagtcaccaagttcttagcacggttgttggacaaccacaatgaccagattcagtttgaagctctcaagcttttgtgcttgttagctcaagatgaagaaggaaaggatatcatcggaaaaactaaggccattgccaggacaataaaattactgtcaagtaattctactgatgaaaggcatgcagccatctctttcttgctggagctttcggagtcacagttactgttggataatattggatcaacacctggaagcattctgatcctcactacaatgaagcttaacagttcagatgatccaattgctgctgcaagagctggagcagtccttaagaacctggagaagtgtccgaagaacatcaagtacatggctgaaagtggctacttagaacctcttcagagtcatctagtggaaggctcagaagagatacagatggagatggtcggctatctatgtgaactagtccaagagcaggagctcaccattgatatcaatagaagcacctcggaaatcctcgtcaagatggtgcgtggctgcaaccccatggtccgcaaggcagcgttgaatgtccttgcccagctttctttgcaccgccccaacaacaagatgcttgtcgacacaggcgctgtccctgtcatgattgaggaactgttcatcagaaaggtcgatgacgagcctgtgaactccatggccaatgccgccactgtccttgctaacattgtcgagtcaggcattgacccagacaccacggtggtgaacaaggaaggccatgtcctcacctcgaagtactccatctacaactttgtgcacatgctcaagtgcttcatgccggacgacctcaacctcagcgtcctccgcatccttctagcgctcaccgcgctcgccaagccactagacactgtggtctcggtcatcagggagaactaccgcggccattctatcatcgagctcatgggctcaccaacggaggtgctcagcctcgccgcgacaaggctgctcatcaccctgtctccacacattggacacaccatcgtagagaggctctgcaagacacaaggacagccacacaagctggtcaaaagcatcagccatgctgggcgcatcacagaacggcaagctacgttggccacgctcctcgcgaagctaccttaccggaacacctccctcaacatcgcgcttgtgaaggatggtgccgtgccagccatgctgagggcgataaaagaggtggagaacggcgctggtagatcaagcaggcaggctgtgccatacatggagggtctcgttggcacgctcgtgcggctcactgcgactctgttcagcccagaagtgttgaaggcggccatggaccacaatctggcctcggtgctcactgagctactcgatggagcagccggaagcgacgaggtgcaacgccttgctgcagtggggctcgagaaccttagttacctatccatcaaactgtcccggccaccgcccgatgagctgcagttcaagaagaagaataccctactgaagctcctgaaggactcaaaggcgcacagcaacaagaagacctcactccaccaggtttgcgtttgcccggtgcaccgaggagtctgttctccagcggcgacattctgcctcctcgaggctggcgccttggagggcctcttgggatgcctcgagaacgacaacatccgggtggtggaggctgccctccgagcgctgtgcactctcctcgacgagagggtggacgtggagaagagcgtagcggcccttgctgagctcgacgttgctcggcgcgtgcttgctgcgctgaggcagcaccggcaaaacgtgctgtggcagaagtgcttctgcgtggtggagaagctcctggaccacggcgacgaccgatgcgtgagggaggtgacaggcgatcggatgctgcccacggcgttagtgagcgccttccacagaggggacgagagcactaagcagacggccgagagcatcctccggagactacacaagatgcctgattactctgcaacctatgtatccatggagttctagtcgttggaatctaaacagtatcgaagtgtgtgcatacactacttttttttacttgcttgtttgaacaaaattacagaacggatcatttttgtgcagcactatgattttcacaacctgaatgttttaacaagtgaa

SEQ ID NO: 38902 - DNA, 2555 bp, Zea Mays
cacacctgacgttctgcctcccatagtcccacccgacatcctcgcccagatcgcgtcgctaatctcgcggtcgcgcctcggccgatccgcgcccgcctgccgccgcctgcgattgtagctcaccccgacaccgcgccccctcctctcccctgacgtgatgcccgcctcccacccccttctccgcatcgcacggatctagcgcgggaattgctcggccacggctccgcacaccctcccttcccatgagacggagccgccgtatcctgctcgcgaggcaacggaagggtacgtgatcctctgtctacatggaaggtgaggcagatcagggggagagtggctcgtggcagtcgcctcgacggcgtccttcgcgccgtccggcgaggtgtcgtccaagcacggcgtcgtcggctacgggatcgtgggcgggcccaatggcaacgccgtcgcgcccgccgccaagtccaccgtcgtcgagaccaccgtcgagagggttatcttcgatttctggttcctggcgctcctccccaccgctcgggaaccactccaccgccgagaccgtcttaacgatcagctccgttgtggcccgcccgcgaccccgtatccgctcgcgctcagctagggttcagatctgaaaatggctgatgacggtgcgaggaggggaatgcccgctgaaggctgaagctgcccccacgggctacagtaggtgccatcgctcaccacaccgaacaccccactgcccccagaccgtgctccagggccctacggcgataggaggccactgaggatggcccggtgcggtactgctgccttccagaggacgccgagcgccggagaggggctcttctattggacttggagcaagcccacggcgacaacgccggaagcaaaatggcctcttctctagaaggacatgagttcgatccaccacagggaggcgcgcccgccaggctccatcttcggatctgatcgcccaccaagtgggttgagttcgaaaaatgaagtcagcaaggaatacttcttaaaaactgtaaggaatattgttggtgataaaagctgcttcacgatatcaaatgcaggtaaataatatttccacttcattgtgttatatgtaaacataacctatcttgccaccatagctttgtatttttggtgtgatgcaatcttattagtcattcttactagcactttttgttttgttttgtgggttatttactcatgtttgctcaggcacaacgaagccctcagacaaacccaagcaactattctttatcaggtcaagtttttggtcagcagactgctcccagtggttctgtgataggagatgaacagaagggatatccatgggcgcacaccatccctatgagacaagctattgccagcactcgaccacctcaattttggccttcctcgtctggccaaatgcggagtaatatggtacaaacaatgcagcatcacatgcagtgaccacaaacatcttcaccagtgtttggggcaaatagtattcatgcacgtccatttccgcggccagttggaggtccaactgcaccatttagaccacaaatggcagattccaatccaagagcacacttgattcagggagctgcgaccacagtatctgggagtgtgccaacacgatccatagtgtctggaaatgcgccagtcaatcaagccttgggatcttcaaaagtcagtgctggcatggaaagccagtcacaacaattgagtgcgcctaagcctttagctgcaacaagcttaagtcagactcaatctcttggcattcaagaagagcctaaaattcaggggaagaaacaactattattcgagagtttgcctgcaaccgatctaaaggttagagcgagcggcatgtgatgcggattacgaactaaacttaaatcaaatacttcagtattggtctctagagaggaagctctgccaaccattactaataactgagaagatgttcgcgtacagggagacggtgttggaggaggcacatcggggcatggagctgcgtgagcactgccgccatatagttgacaacgatgaccgacactatagattccattctctgtgtgtacaccaaggtgctcgaaccattagttgggctaaggaacacggagcagcagcaacaatatcgtaaggagagtgcagacgttggacaaatggaagtagctcttccactactggagcaattgttggtggagtggctgctggcgcagccttgctatttgctgttcctgctatcagttttgcctattggcggcacaggaaaccacaagagcaagcatttttttcaatgtatctggcttcaaagttagtctttgattattatctttctcgcaacataagggcaaacaatgtttatatgtagcaaacaaatacggtttgcaaacgttttaggaacatgtttttacaataaagatatacttatagtttcaccaatggatggccaaaaaatacaaccttttacatttgtcaaccttttagttaaggaaatatagaacaacagcaagtagattttgataaacccattagaatctcaatataaatataga

SEQ ID NO: 38903 - DNA, 342 bp, Zea Mays
cggtttctagaacccgtcattgtatagcggactcctgacggacgccatcagctcgcaccaaatctattgccacggaagggggccttcattgcttgttctagacgcttgggaaaaaccagccccaagtacgatgtacaccggtgagcacccctgatcccccacccaaatccgagcaatcggtgctcagcggtgcttttactcgccgatggcttatgggaggtcgcaggggccatcttatatgtacctgggcagggccatgggggcggcagactcctaggattccggtgggggtttggccggtgcaaccccccggatttgatgggatagcagcggcaccgggtg

SEQ ID NO: 38904 - DNA, 1857 bp, Zea Mays
atatacgaggggcagggccccccctcctctcccttcgtccattccgatcactcgctgctcccctctctcgccggagcgagccccgggccggatggcggcggcagcagcagctcctcccgcctccgcgatcgcgtgatggacgccgacgccgacgccgccgcgatccgccgatggacgacgccggaagggcaccaccacccgcgccagcggcggtgaccgtctccgccaccgccgcacccgcgcctaccccgccctccgccacggccgccgccgacaagtcctccctcgaccccgacgcgctttatgaagaggggatgtggcaacagatggccatgaacagcggtgccacaatgcaacctgggtcatatcctgagcgaccaggtgaaccggactgcacttactacctcaggactggattgtgtcgatttggcatgagctgcaggttcaatcatcctccggataggaatctggctattgcctctgccagaatgaagggagaatatcctgagagagtgggacagccagagtgtcagtattatctgaagaccggaacatgcaagtttggtcctacatgcaaatttcaccatcccagggaaaaggccggaattgcagggagggtgcagctaaacacattaggatatccacttctcccgaatgaaaaggagtgtgcgtattatttaaaaacaggacaatgtaaatatgcaaatacttcgctggtccacagtcatatactggaactatgtcaagctggacttttccacgagcttcttttataccaagccctaggtggcaaagtccttcaaattatgcaccaatggttgtacctcatggccttgtccaagtgccgagctggaattcatatcctggtcagctgcagtcacctggggctcaacaaacttatggaagttcacaacaaggcgaagctagtgcaggaaatcagggaatgctatcaccctatagatccagttcatttcctgtgcctcaatatgcgttgcagagagataatgtatttcctgagagacccgatgaaccagaatgccaatattacatgaagacaggagattgtaaatttggtgcagtgtgcaagttccatcatccccgtgtgagatcacagccccctccggattgtgtcttaagtccaatgggtcttccaatacgtccaggtgaagaactttgcaaattctattctcgttatggcatctgcaagttcggcgccaactgtaaatttgatcatcctacaatggctgctccaatgggagtttatgcatatggtttctctgggtctgcttctgtcgcacccgcttcaactaatgcacctatgacgcgacatcttcttggatctccatcaggttctggatatatgtcttaggtgtcttttttttcagttgacctactttgatgtataaaatccacggcatcgcctcaggcgctgtgaatgtttctcctaacttcccgccgggatgaagttctgtaaattgagttgctgctggagatgtacagcccccccccccccccccccctccccaattaatccagaactttgggaataactgttggaacctaataaacttcagatacagaaacgctggttttcaggtgtttgcactattttgacactgctgcacctatggtccctaacagttgaggtaggaattcttctgaaggagctgaaacctgtagctgcagtgtatcccagcctacggcttctgccaagacagtaaactcaggacctgtttgggactgttccactattcaaaaaatgaatttgaatctgggattcattattaaagtttcgccgacgaatctgagatcctttttagatagcagcttattcacgtaaggatattctgtctgaaa

SEQ ID NO: 38905 - DNA, 2690 bp, Zea Mays
caaaacgccgcccttggatgagccaatcttcctctcgcacggcccactccttacccccgtctcacaaaacgccgccgccgccgtcgacagccaactccccgcgcccccaccgcctccgcgcaccgccccacacctgattgcgcgtccagaggtattcagagctctctgctgtgggagcaacgagggcagggatgagggaggtggtgacggtgcaggtcggcggtttcgcgaacttcgtcggctcccacttttggaacttccaggatgagctgctcgggctcgccgacgaccccggcgccgacccggtattcaggaccgccgcgctcgacatggacgtcctgtaccgcgccggcgagacacaccagtatagtggtgatttaattctgagtgatgagagagcacaaatccgtaacagtgtgataggatcatggaatcttgtgataactggtctcagttgttgcaggtctggaaaggtaacaaaatcagtagcaaaacctcatgagcgaaacttgttcctacaaagtttatctgaagaagaacagaacccaagctctagcgatggccaaaacaatgctagtgttgaagataaggacctggtcgcaaatctggagaatggagtcaaattttggactgattattcaaaagttcagtatcaccctcagagcttatatgagttgtatggatcatggacagactttgacaggtttgataactatggaactgcaaaggaggtggtttcagaatggtcccaaatggaggaaatgaatgagaggctaaggttctttgttgaagaatgtgaccatatccagggtatccagtttcttgtggatgattctggaggctttgccagtgtagctgcacagtttttggagagtattgttgatgattacacaaatacccctgtaatgctgtattgtgtgcggaatccagactcctatgggtcttccagaaatcagtgtgaaaccatcataagatctttgcatgatgctgtatcgttgtcgaaactttcatactactgcaatctgatggttacttgtcacctttgctttctataaaagatgagaagcacttccactccagtgccatttgtgcagcagcaatgcattcattatctattccattcaggctacaacacgtgggcccggcctcagattcagcgcattcatctggtaagcttgatattggtgagcttgtgcacatattatctgatcaagggaggcagaacatgatcactgcgctggatgtagcaatgcctgccccttctttgacagatagaacagatttgaggaacatacagaggagcttgcattctctgacacctgaaatcagcgacgaggatgaagatccttacgctgttgaatccatggtggttcatggagtcctagatgcaggcgggaaaagggcttccatatctcaggtgaaggaatccatctgttcagcactggaaggcagggcgacgaaacccaagttctcccacctctcggtatcgcggtgccccctcccaatcccgctcccgttcccgtcaatcttcagcagcagtgttggccagcagggcgagatcctcggcaccagccacgcaggagcccggccaaagggtccgcttgccgtcggctcggtgccgatggcagcgcgcctgaggtcgagcagcgccatagcgccattcatcgagaggaggtcggcgagcctccagaggctcggtgtcgccaggggcacgctgggctcgcaggtcctccacgactggggcttcgggagggaggaggtcgaggacatggctgagcacctggcgaagatgttgcgcccgttttacccggaaatggacctgacgtcggattctgatgattaggtttcactgtcattgtgtctcgtattaccggatggtaagcagctgggttttagtctgtgggaactagaaattgtgatgcagatgcagctggcgtgagacgccgtgctgcgatgcattcctctggtctgtgttgaagggatgcagagtactggaaacgagatctgagagagcctgggcgtgtgaccgtgtcattcagcgctccgcatgtgatgcacatgcatttgggcgacgacgcggacgtccgccgccatgggcagttgttgttgtggtaacattgtgcaatgatccagccctgatgcagatgtccagatctgtgctgtacttacctgcaaaccacacagctaatgaaactaaagaacagtctttctggtctgagatgttttctttgttcgttttaacttcgcgagcaccagaactgtaaacctggcattttttctagtatgaaaaaatagcattatttggctcgacaaaccgcattgttcagttggatcttcatatcatcacagccagaacaagagggcaaatgcagcattcttgcatgtgttggggttccctgaaattttgtatggtagtgtcaccgtaattgatctctggaatatgtaatgtaaccccctctgttgtcgtgtgcatgaatttcttcagtctgtgcatcgctcgcacgcatgcacatggtcgcaactcgcaacattctgcgatctgatgttccagacaagctcaagatccagatcagatacccaaccaggccaccttttccaatttatttcctggggacaaaaagagaaaaggcttgtactgtatcactgttcttctcatatagtacaatgtatcggtatggtctcaatggacg

SEQ ID NO: 38906 - DNA, 1546 bp, Zea Mays
catgcgaatactgctggagttggcctaacccaacgaccagacgcaacacgacggcgacggccatggcttcgccggacctcgccgccggcgacggcagctacgactttcaccttcgctctctctccgcggcctcacgggactccgctgcggcctccgaccccgcctctgaccccaacctcctccaatctgttaggagggtgtgcgagatgtgccgaacggcgaaggaagcgaaggacgagatggtggcgcgggcgttccccgtgatgggcaagctatttcagcgatgcgccgccgctcccacgcaggccgttgcctccaccggcgtgctgctcctcaccattttgcaattcttcttggattttggggaggctgttttgcatgatgctgatggtagcttgaaaaccttcttccgctcttgcttaagtagggagtttgcagatcctattgttgcagagcgcacagttgaattccttgtaacaaacaagacaaagatccttagctcctttcccaatttgattccacaggaggctgtaggccaaaaaggtagagaaaaaacagaaaaaaccatatttgtatgataagctactcaaccaatcttttgtaagattctttatagaatatctctcttctcttcctattttccatattcgacttaatcttgttaacacatgccaatgcttgtgtatccttgtttatacacagttctatccattgttgttaaagcttattgcatcaaacggtgagaggtatgtgctcgtattgtcatgaacttcacatagctctatcatccatgttccctttaaatgactcagtacaggtaccataaatatccaatagcaatcccgttgaactacctaatttgttttctaacattctagactggagaataagttttcggaagtacttccattaatgatgtcagcaggatcttttcttcccctcttcctatcccttatggatttgccaatgttggtggtggcactggaaaaggtggaaagaagttctggaactcttattggtagtagtatagctacaatccagaagagcgctgctcctgagatgcttcttgcactgatggacgaggcatatactggttctgccgtagaagaacctagtggtaattcaggttctgatgatagtggtcccctagaccttactgacccaatgttcttagaccttctaaaagatgagaatgatggcattgccgcaaaacattggatatcccctacgatatcttcaacgttacaagcagcatttaacagcccacagtcggacagattgaaacagtcactggaaatggcacctcgctttcttactttatattttgcaacagcattgcgagacgttaatgactcactgctgtgtgctcttattccagtagttatgtcaagatatgctgcaatgttcccagacaaagttttctctttcaaggtgagggaaaggctttcagacttcattttggctgcattccagcggtctcccaacatcattgcagtactgaagattatctttctcactgtaactgaaatttactgatggactgtgg

SEQ ID NO: 38907 - DNA, 2929 bp, Zea Mays
gttacatggcccgctctgttcccctttccggcgcccgcgacggactgcgacgagcggatagatagatctgtgccccgtccctgtctcgccatcctcctttctcctcctccactccctatcgactatcgagcagagcgaatccttagcggggaagtctttccgagctcagggagtggggtttaaaacgcggctcgacgaaaggaaggccgcactcgctgctgctgctggtcgcttgctttcggtggcgagcgtctcggtaaagcggcgtcggcgtcggaggcggcggcagagactggacttgcttgctccttgctgcgcagtgtagtgctgtgctaccttggagacaggatcctgccgcagggactcataattgatcagtgtgccccaacataagagcgaaacgtgactgagtttgccagctcccccttcatccactgtggtcgctcgtctgctaatgcccgcatcggaggattgctcacggatatgcttctggtgatgggcaacccggggcgctcgcggcagttgtcagcgctggttgcttccgccgccatcttgctgtcactgtccgcgttgccaatttgtcggccctacacctacgagcaagatgtgtttgcgataaacggcttgtacacggcacttggagcaccacagctgcctaattggacttcaaatggtggtgacccctgcaatgaaggctggcaaggtgtttcatgtgtagcgtcaaatataacctccataattctcagcggtgcaaatttaggtggacagctgggcaacactttggggaattttacatcattaatcaccttggatctcagcaacaacaatattggagggaccataccagatggtctaccactcacaatgcagagatttttcctttcagctaaccaactaagtggtagccttccaagtacattgtcatcccttacacttttgacaagcatgtcactcaatagcaatcatttgactggagcgataccagatgtattttcagcactcactggacttgcaaatttatttttctgataacaatttgaccggtccgttgccaccttcaatgggaaatttgacatcattgactagcctacatattcagaacaatcaaatatctggaactcttaatgtgttgcaagatctccctttccaagatttgaacgttgaaaacaaccttttctctggtcccgtgcctgtgaaattactgaacttgccaaacttcaagaaggatgggaacccattcaatacaagcatagctccatctgcgcagcctcccatcgcgccaacaccattaccgtctatcccaccttcgtcagggcatgtcccctcaaaagaacctgcacattcttctagtgttccaggtggtagtacttcaggatcaggaaaacatactacactcaaattagttggatatattcttattggagtggtattagcagtagttcttgtgctaattgcaatgtactgtttatccaagtacaaagaaaaaaggtcgagagatgatatttatatgaaaaacaagataggaagggtacctcagaagcttggagagcctaaaatcaaggagccaccattaaaactcaagaatgatgctgagaaagctccgaatgttgtttctgatggaagagaggagcataagttaaaagtgccaacatcagaaacttcaaatgtggtttatgatccaagtccaagggatggggcagaacttagattcatcaccgacagtttcagtgaggaaaatatcataagagacagcaggtttggtaaggtgtatctggcaaagcttcctgatggagagctactggaaattttgaagattgactcttctaactcaaaagtgccagtagatgcctttcttgagctagttgtgaggatttctgaactgaggcatcctaacatacttggtcttgttggatactgtgcggagtttgagcagcgattacttgtctatgagtactgtagcaagatgaccctacatgatgaacttcgtcatgtggatgactcaagcaagccattatcgtggaatgctcgcctccaagttgcttcagaggcagcaaaagcattgcaacatcttcatgacggttgccaaccaccagttgtacaccagaattttgaaccctctgttgttctgctcaacagcaccttagttgtgcatatttctgaatgtggccttgcatcactagcatcaaaatcagtttctcagttgtctggacacaccttattccattatgaagcacctgaagtgcatgaatctggatcagtaagcgatcgaagtgatgtttacagcttcggtgtagttatgttggagcttctaacaggacgtaaaccttatgacagttcgtatccacgagctgaacaacatctagtacgatgggccacttctcaactctatgatattgatgccataacgaagatggttgatccttccattcgaggacaatgttctgataaggcattatcccgttttgctgacattattagccgctgcattcagcatgaaccagaattcaggccaccaatgtctgaagttgtccaagacttaactcgcatgatgcctttgacgaccattgatgcggtagtaggatattttggccaatgcaaaatgggtggaacacagtggcaggatgcagagactgcaccacgttttgtccactgccagtaatgctcctctgaatctctggtcaatttatagttcaaagctattgttgtaattctgtagtctgcactctgcacaatatatttcttagtgcccagttccagatcacgtggtgtgattatgcgtggttatctagaccatatgtaaataccaagaagttaaacaaatgtattatagcgtgcttgtttgaggaatgagaaagtacatcttcttactcctcactttattatttgatttgttaaatgaaatgagttggtccatcatatttcattcttt

SEQ ID NO: 38908 - DNA, 590 bp, Zea Mays
ctaaaattgaaccccatattgtttatgcaacacaagcttcgattccccgagtaccggaattacaggccgagcgggatgcaaccggaaacgatcgagcatttgctccaggaacgtcatgtcagagcgggacgccgacggcgaactttgtcctgaagccacgaaactgccgacaggcttcagagaacgccaggcgagtataaaaaagtactagtagcagcgcagaggagaaacactgtgcatgagatgagtgtgccgcactgccgcctgctctgccggtgcctcttgtccaacccctgtcctttttttttctgacgacgcacgggcggcaggatgggaaggcagcccaacgggaaaccggtctcccttcctctctctctacgcggtcacggccatcacacgccatccagagggatacttactgcattgacacacatcgatcggatgtaggcatggatggtgctgtagcggcgtggggagaccggggacaacggcgggcatgatccttggatctgccggtccctccctgctcgtctcggcctctcgtcccgggacgggaccagacagctaattcgatcgggatcgagtcgcgc

SEQ ID NO: 38909 - DNA, 1672 bp, Zea Mays
tctccaacaacaacaacaaagatctgctacgttgcaggcctggcggagacgcacaggtcctcaacccgtcctgtctgtctcttctgcagctattcgaggctgacgtttacagtgtgctagatggatctacaaacaagactcataaaagtgttaccggaaaaaggttagcttcatgctaggcaatctgtctagactattgttcccacatcatggcgacacttttacatgcatgccatggcaacaaactttacatgggtctcacacatcaccttccaagaaggttgccaagaaactttttagagatgaagacaaaggagacgatgatgttgttggttccgcagacgctgatgctgagtaacgtgctactggacacgagcactaccagctgtgaaggttcgcttttgggaactgtaccagtccgtctaggttactcttagaatttgtccccctgctgtgtaggatctatggtttcatgcttgtaagatatgggcagcgctatgctgcgtggttggctgcaggatgtctttttgtgtttttagggtagtaatgaactatgctatgcgtgcaatcctgcaaggaccatactcatgtacatcgcgagtatgtagtctagggctgaacaaatcagagaggcagagacactgctccccttggtatttctactatttgctgctactaccacccttctctttgtcgcagtacaccaaaatagtgaacttcttagagcctaaaccctaggaagttagccctaaactctaggaagttagctaaactctcaaaagtgaagccatcccgtcggaagtttggctctcggaaattttttgtcggaagttagcttaacttcctagagccctctaggaaattagctaacttactacaaccaaaggagcctctcggaagttctgtgcattcgtgggatttcgtttggtcaactgtgtcatgttcggcgatttagcgtgatccagcagctaacatgtttaattatgaattgtatcgagggatgtctgatttgtatttgttcacaagatagctacttttgataaagcagctggtttccaggtaacgtgttctcctgccaatttgcttacacactattctattctacattgagcttaacagtcagacttttgacaggcacttatccaccccagctgctcttgaaggttaccacagctcttagtctgaggttttatattcaaccgttgcttagctaagactccacaaagctctgctgaaaagataaaagccttcaccttgtcatcgagtcaaagctaacctaagccaatcgaggtcgaaggaggtagcttcggggtgatgcgctgtggcttactatgcaagagacatggatacatgcaggagacgaagataaaggttacggaagacttgatctgcaagatgtatagatgggaaagtacaatattactgtcgtaatgtatgtagcggtcatgtatatggtttgtggacatgtttgtaatttcatacaaagttatatcccacgattctaaatagaggaataatgccatgcatagacacacactttcgagcctagatcacagaaccactcagtcttcgaagataccttcgagctcccgcttgtgaagttgaatgtatacttgtaatcatttggtatcttgtaaggagtaaaataaatatgagtttgcacattcagatg

SEQ ID NO: 38910 - DNA, 2743 bp, Zea Mays
tgactttggtaatatgtatttagcttctcgaaccttaaatatatgttataaaaatatcagtgacaacctttacgaaacgaaggtagtagtttttgtacattttttagtaagacaaagtttaactttgatttttaaaagtcaaacattatttgaatttaaaacgtgtgtggaattgaaaaatcgatggctagctaatcaaattggtcaataaactagtcaacgtgatcaaactaaaaaaatgttgcactttattacttgagaaattttccagtagaaattttccagttgaaattttaaaagaataaatctaaataattaatgaagtgtttcttggcgcgcttaaacttctcgaaaatattgtgctttcggctttcgcgctctgtttatccgcgccaaaaaattcccccccccctaaagtgttggaaccaccctcccatgtttctcgatcacacctcctagaaatctcctccggttcttccacctccctgtagttctcgctctcctgccaccattctcttcgtgctcctgctccatatgccctcctttcagtctgctgcttgatgatccatcgcccagctgctggttgatccgtcgcccagctggtaacagatttcttcgtgggtgcagtagtaccataactgacccaccctctaatctttactccgacctacaagggaaagaagtaatgccaatgaaacacagaagactacaaagtctgaacttagaagctgagacacaggaaaacgtggaacaacatgaagatgtccaagatccacaaccagagctcaccattgggtttcctgagggagaagcgccaacaaggaataagtcattcaaaataatatggcaaaatggagttgttcgggaggtttttagaaatttccgaacagctgaattgtgggatctgaaaggaggaagagtactagttgaaactgacaagaatggcattcccaatcagtggtctgaatccattctctcgtcataccttggtgagcttgcacagaattcatcatttgcaccattacacattccgagatgggacaacaaattattcaaaggtccaaaggaacgcatcatcaaagatgttgagaaaaaatttatctatagtagtgagacaaaatggtctactcgagattggattcttaagacagtgaataaaaggtggagagactacaagtcagacttgaagaaacaatacttcaatccagataagaggtcttttgaccagattgaaaaggatgtccctgatggtgtgaatgaaaatcaatggagttttctgttaggcatatggtgcagtgaagcacatcagaaattatgccggacaaatgcggaatctggaaagaagcagaggcatccacacactagcggtaggaaaagccatgctagacttaagaaggagatggaagacaagaagaaaggaagcatcactaaaattgatctttgggacgagtctcataagaagaggaatgggaactatgtcaatcaaaatgtgcaaacacttatgggtaaggccttcgatgaattagagaacaggaggaaaggacaaggggacactttctactagtgattatgatgatgtgtttgagaatgtcataagaaaagacttgaacattcgtgggtactatgatgatacacattggagcaatgaaactgattcacatgttcaatcagaggagaacaaaatgattagaagggacctagagcttgctatttctgggtttaggaacattagagcattcctagaaaaaagtttccagaagaggaattgctaagcacaattctagctactggatctggaagcactacagtaagtggctttgtcatttttgcagtatcaatttaatgcacactttggtaatctactgtcttccattactttccagcaggttgatactaaagacaatgaaaatgtctcattgcaatatgataatgtagaacgatccagttatgagaaatcaccttcaccatacaatgaacagatttatactagagattataatattgccaaggtgggttgctctgatcattcagtaccaaatgacaacatagctttcagggaatcacaagttacaaggtctagtgacttgaaccaggaactcaacaatggatcactatctctagataaagaaatgtctgataaggaaactcaaagcaagcaacaacaacaaagcaaattgcaacagactgtcttgttgtactcaacaaggaaaagaaaactaggccaagtttttgctgttggtaatcttatatctagagatactactcatgaaattggaggaactgtacttggggatggatattatgctgttgcggttcattatcttaacaatgttgaagatgaaagattacctcgaccacacggagatcttaaaactttggaggatgctgtgggcatgtgtgttgcttggcctcgcacacatcttaaaagggtgaagccaactactgagaagcgcacttgaatggttagaagactgaagatgcaactaatgaatgagcaagtgttatagtggagagtagttctaggatcaaaagttctagttgtcaatctacttgtttaattgtgttaggaacctcattttattcactcttgtatgtctaatctacctcaagaccacttcgtttggattgaaaatacttatgtattgttgcttacacatgaagcatttaattgatctgttatatatatgaaccttgtgtcttgtatatatatgtgctcaaattgagtgtttgtgtataagcaaaa

SEQ ID NO: 38911 - DNA, 2884 bp, Zea Mays
taaacccctgtgtcctcgtacaaaccgaaaccgaaaccaaactccgccacgagtggggcgagcggatacacgagctcgtgaaagcttgatctgctctccttgttttcgatctttcgcagtcgccgatcccccctcccgctcgagacacaatgttgacatatcctatattgaacgaccgatcaattgatcagtggacggttactgagttgaaggatgagcttgagcgaaggtatctgcctgtcagtggttcgaaggatgagcttttgaagagactctttgaggccatgcaggatgagatacttgatggtgagggaaaaacaactgttgtaacttcccctcctgaggaattgaaaggtggtgaaactcctggttccattgatgtatctgttaaccaggcttcaattgagcaacatgttcataaaggtgcttccgaggttgcgaaacagggggtaggtcttgttatctctgttacagaagcttatgatgaaagtacatttgctacttcagaagttactcaggaggctgtggttggtactgcagaagttagtcagagaagtttggatgctgttgcagaagttgagtcttgtctagttgatgcagctgcaactgatgaacccgatggtaatggtcaaggttcagcttcaagtggtgatactatagtgaaggaaggaagtccgcgctctgaaggtcatggcaatactattgagaagaccccagaagatggcaccaataagaaaatagctgtcgatgatgaaccttctgaccttactggtggtgacatcaagttgggcctcgatgtgcacagcaagattctaaagctggaagatgaacccgcacctcctcatgatatgttgcataatcatgaggattctgatgttgttgcagttgctgagccagaagatgacacaagcaaaaaaatgataagtgatgatgtaccgactggtcttatgcataccaatgttgagttaggtgccaaggtagactgcaaaattgaacaggaagaagtatcaacattgtctgatgctgctgcattgcattcttatcctaaggaacatattgtggctgtggcaaaaggccttgcgctcccaaggaggatgctgatgtcaggctacacaagtaatatagacttggacagaaaagaggagagtcctgacataaattcttgtgagaaactgaacttaaataggagttcaggtgatgaatcaatggatgaggatgtgatggaaaggaagcatgccgattcctatatcaaacctgaagatcttagaggaaagacaaaggttacttcggagcatgtgtttaaagatgtttctctgcttgatactcgtgctgagggttcccctgcacactcaaaggaagttgtcactgaagagaagctatcaactccaactgaaaagaggaaacttgaagatcaagaagtcattgaaaataatgagccaatcaaacgccagtacctatggaacgaggatgctgtcaatatttctgatcaacaagcatccaaaataactagtactggtactcagaaggaagttatttgtcctgctccagaacgttcttttggcaggcctaatacagtagcaagaagaaattctccaaaggagcggattgaattgatcggtttgtgcgcccatttactctgaaagctgtgaaagaacttcttggtaaaactggatccatctgcagtttttggatggatgaaatcaagactcactgctatgtcacatactcttcagtggaggaagctgtggccacgaggaatgctgtctacgacctccagtggccctcaaacaacaacaattatctgatcgctgaatttgtcgatccagaagaggtaaagctcaaacttgaaactccaccatctcaaattcctcctatcagtctgagcacagctacagcacagcagacagcaaccttccaacaggcaatggctaaccaaactctagtacctccccatgttcctgctacttcgagaggtttattgcccactccagcacggtttgccaaggtgcctcccacctctgaccctggaccagcaagggagagccttcctccccctccactgagcctggaacctgcccggacactggatgagctcttcaagaagacacagacgtacccaaggatttactacatgccactgtcagaagaggaggtatctgctaaacgtgcagctcacgacaaaggtagaaggggatagtgggctttagtttgtcgctcaagctggtattttggtaagtatcttgtacttgtcacagctgttttcagatgcaaccatacttgtcacggcacagcgatcgacaggctctcttctccgcagctgactccaccagaccagcagctgcagctctatgaagaactactgcaccgtacttgtccctacatttagctggtattgtgttgaaaggctttagtagtttgttgtgagggaagacctgattgggtacgtggtattttggagttaaggataccgtggcttctccaaatcacgatggcgtgtaattttggcattccatagagtaccacggtttctcaaaactaagatgatgacaaaacatcagggatttgggtccaagtgatggtgtaaatgcagaaaattgacagcattttggcttctccaaatcacgatggctcgttgagtacttttcatgctctatcacactttgttaatagcatcgcacttattgtaggacaaacactgcaaagcaaagtgtattttgtgtccatgttttgagtggcttagtgtccaactcactagtgatcgatagtcttcatgttgtatagcgagtaagcgttcctattgcagtgaattgagtaatttgtttgagtggcactagatggagtgttgcaagattgtgatgcttgttactcttagggctgatttggt

SEQ ID NO: 38912 - DNA, 1138 bp, Zea Mays
cacatgggcactccaaaggctgaagtagtcgcgtgcgttttaggccaggaatccaacgtgcttcaccccaaaaatccatttgctccaacattgcattttaactaccgttactttgagacagatgcacccaaagatgcacctggtgcaccaagacagtggtggtttggcggtggtactgacttgactccctcatacatcattgaagaggacgtgaagcattttcattctgttcaaaagcaagcatgtgataaatttgatccaagttttcacccaagattcaaaaaatggtgtgatgattatttctatattaagcaccgtaacgagcggcgtgggcttggtggaatattttttgatgaccttaatgattacgatcaagaaatgcttctcaacttcgctacaagtgaaaccatttgctagaatgattggatggaattatttgtattcagaatgtgcggactctgtacttcctgcctacataccgatcatagaacggcggaaggacaccccattcaatgaggagcacaaggaatggcagcagttgaggagaggtcgttatgtggagttcaaccttgtctacgaccgtggtacaacattcggcctaaagactggaggaagaatcgagagcatactcgtgtcccttccactcacagcacggtggcagtatgatcataaaccggaagaagggactgaagaatggaaacttctggacgcgtgcataaatccgaaggattggatctgattagccgaagtttctttattcttgagatcttttgttagttttcccttgtgtagcgctaagatatcagaccacgtgtagtttctttatttcttttgtatatctgtaggatcgtgaacaaatctgatataattctgcagctgtttgtatctaatctgctgctcccccccttccccccccccccatgtgaatgagagaatcattgccttgtgtatctacaaaggcttcaggtgtatcatttacctcctgcctattggaaatactcactgatgcaggcaggtctgtatatacccatagtgcttgatgttgtgcatcaacagcaacaaatagtttaaattgtttagggccacaaaacatttacagtttcaacaattgagccttatcatattattaggaaataaa

SEQ ID NO: 38913 - DNA, 1505 bp, Zea Mays
tttcggtccggcgggatcgaaactctcgcacccgagagccctttatatccgctagggtttacgcgcatttttgctcctcactgccgcgccgccaccctctacagataaggaagaggaggagggcaggatgtcgcaccgtaagttcgagcacccgaggcacggctcagtcattccctagggatgacgccaagaagccttgccatctcactgccttccttggctacaaggctggcatgactcacattgtccgtgaggttgagaagccaggatccaaactccataagaaggaaacttgtgaggctgttaccatcattgaaacccctcctcttgtcattgttgggctcgtggcatatgtgaagactcctcgtggcctccgcacactcaactctgtttgggcccaacatcttagcgaagaagtgaggagaaggttctacaagaactggtgcaagagcaagaagaaggctttcacaaagtatgctctcaaatatgaaaatgatgctggcaagaaggaaattcagctgcagcttgagaagatgaagaaatatgcttctgttatccgtgtcattgctcatacccagattaggaagatgaagggtttgaagcagaagaaggctcacctgatggagattcaggtcaatggtggtaccattgctgacaaggtggactatggctacaaattctttgagaaagaggtccctgttgatgctgtcttccagaaggatgagatgattgacatcattggtgtgaccaaggggaaaggttatgagggtgtggtcactcgttggggtgtcacccggcttccccgcaagacccacaggggtctccgcaaagttgcttgtatcggtgcatggcatccggctagggtctcctatacggttgctcgtgctggtcagaatgggtaccaccaccgcactgagatgaacaagaaggtttacaagatcggcaaggctggacaagagacccacgatgcctccacagagtttgacaggactgagaaggacatcactcccatgggtggcttcccccattatggtatcgtgaagggtgactacctgatgatcaagggctgctgtgtgggtccaaagaagagggtggtgaccctccgccagtccctcctgaagcagacttcccggctggcgctggaggagatcaagctcaagttcatcgacacatcgtccaaatttgggcacggtcgcttccagactaccgatgagaagcagaggttctttggcaagctcaaggcgtaaggtgctgcggtgcagcgaagtcccatttctcaaaatcatcaaactgtgatacttttgtttgtaaccttgctgtaccaagttttgtagccatggtccagtcgtctatggattgttccatgcttcagaactgcactgtctatgttttgtgctattttggttgtttaatgccccaatcattgcatatagattctaattgttttggtgtttgatgatcaatataactatttatactaattgtgtttccgaagcttgatcgag

SEQ ID NO: 38914 - DNA, 1214 bp, Zea Mays
gccgacgcaaggcaagctttccgcttcctatttcggattgggatcatcagcggctgtagcgtggacccgacgggggtgtccggaccacatccctatttcatcttggtaccccgtccgtctccgatttcagaagcacggcgggctccccggcagcctctaccgagcagaaagctgagttctaccccagaaccgaggcatggaggacgaagaaaacatcgagggagaactgttgctcgtggagtcacaactccacgacatccaaggacaaattaaaacattactcgatcgccaagaggagttgtatgaacgccaggcacagttgaaggctttgctcgaagcatctaaattgaccagaaatacaacaattaacacatcttcagttgctccggaagattggtctgggagcttcccatgggatctggaggctgacgataccaggttcaatatatttggcatttcctcctaccgatcaaatcaacgagaaataattaatgcagtcatgagtggaagagatgttctggtcataatggcagctggtggagggaagagtctatgttaccagctcccagctgtacttcgtgatggaattgcactggttgtcagtcctttactttcccttattcaggaccaggtcatgggactgtcagctttaggtataccagcatacatgctaacttcaactaccaacaaggaagttgagaagttcatctataagacacttgataaaggagaaggagaactaaagatattatatgtgacacctgaaaagatctcaaaaagtaaaaggttcatgtctaagctcgagaaatgccatcatgccggtcgtctttctctgattgcaatagatgaggctcactgctgtagccaatggggtcatgattttcgtcctgactacaagaatcttggcattttgaaaattcaatttcccagtgttccaatgatagctttaactgcaactgcaacaagtaaggtccaaatggatttaatggagatgctccacatcccgagatgcatcaagtttgtcagcacagttaacaggcccaaccttttttataaggtgtctgagaaatcgccagttggaaaggttgtcattgatgagatcacaaagtttataagtgaatcatacccaaataatgagtctggaattatatactgcttttcaaggaaggaatgtgaacagaactctttgtgcatatgtaacaaggagagggagg

SEQ ID NO: 38915 - DNA, 2979 bp, Zea Mays
cccaccgccccattccatccatgacggtcgcccctaacccacggtgtcgactgctccaccgtaagcgcctgtttcaccgccaccgccgacttcggttggtcctcacccgcgcgtggatggcgcacgcgcctctctcctccaagtgcgccgtcgacaccaagctcccctgcctcaccgcgcgatctccagccccgccgcgctcgcaagtcttgagatcgagcagatccaccatcctgcgccctcgccccatcacgcactcaccttggccccgcatccctgcgccgccataccctcggcctcgccctcgcctcatcctcccctgcccccgcaccgcatccaacgcgtagatccagcgtcgtcgccgcgatacctgcccatgccaccgcgtgcgcaccccccgtgccgtcggcaaaccctagcgtgatccccaccctgcccccgtcctcctcacatcatcggctcccccgtcatccatatcccagtggacatctctggcgacgagaggatgacgtcgtccggggtggtggccgcccggacaacccgttgctcgccaggccgagtctcctgagacccttgagcttgctcagtgacggagggatgcttccatggaaggaattgaaatacagatcaagaaactctaggctctagcactactccagctcttctggcatctgaccggagaatttgttctcggatagcgctagctgagcaaggctggtgaggctggagacgtcaggttggctacagtgtcggggatgaacccactcagcgcgttactactcagatcaagctccactagctgggcgaggtcgccgatggaggatgggattggccccgtcaaccggttcccctgcaacgccaacttcgtgaggttcttcatgttcccaatccctgttgggatggtgccgttgaggaggttggattcgaggcccaacgtcgtgagcccgatgaggtcgtcgctggccggtggaatagacccggagatgctgttttcccctatgttcagtgcttgaatctccctcgggaggcgggcaatggagcctggcaactagccaccgagcttgttgttgtcaagggcgaggacctgcaggctgccgcagttggtaagatggtccaggaactcccagccttactcgtcgctcgccgtcagctggttgcccgacatgtacaacgactgtgggcagagcatgccgatgactcactgctcctttgtatccttatgctattgttttcatccgacaacatcaactgcaataaacataagatggagagatttctgcaccatggcagagatggcgagcaatctgccattgcagctgtaggttcgctaaaaagtatggatccaaatcggatcattctgaagaaaattgttctgaccatgtatccacagagtctcgaatctgaaatcgatcgtgttgtatatgttccacgatcccaacgacgtaaaatggttcaagcctattgagcggtggacaaaacatggtcgtcgtggccgcatcatggagaccgttggtactcatggtgccatgaaatgtttattcaacagcagcatgatactgtgtgcatgagcttgtacaaacacgtgtacctaaaatggccttaacaactctaccacgtataaggttgcctgacgtttcgctagatctgtaccagcaggctatccaaacgacgagaatgaaataaccttggagctagcgtggtgtgtagcctatctaaatatttttaggattagaaaattgttttgtattggtccatcttatacttttctttaacattacaccctcattcttcttggtcttagacgactcttttcagtatcaaatccaaattcatgtttaattgcgtgttgagataatgccaacttattccatgttggcatatgtactacccagtacccacaatcatcggagggtcttataagaaacattagggggtaactctacctacatctatcttatacttgaacatcacacccccattctccttggatcaaatttaaaccaacaacaaattcacttgtatgtggaggcatctattttactacttacaggtatgcatcttgactagctcgctgagggggatggcctggtggatctgttgttggtttgcttgtatcctcggcgtctggtggagctgcgccgcctccacgccactgtcaagcgcttcctcggcgtctgcttcggccactagctgccaatcccatacccgtccagatataagcaagctataatgtgcttttgaaatacaagcgaatattgctatagcatgctgcttgagcttagcattcctctttctttcttttgcagcataagaaacactcttacgaagctcttaccaaatctaacggttacaagattcagttcatacttgggttttgctcattgtattgtcttcaagcagggtatgaggaatagtatagatggaacaatttcttctctgttagtggcacattgtcaatggtgtgtctgacaacattctcaaccacatcatcctagagaacaatgagaacaagcctgtcacaaacagtcgtgacactcaggagatatgccttgaacaaggccttcatatcctcaagatattcgaggattatcatgtcagcaaaacatccatcctgaacgaccttgcctcagcaatgggaaacactccaaacccatacgagcaagccatgtccacttgtgtgaatgaccaagcgatgatgctatcgcatatggtgtggcatgagtctacaatttcactgtagttatgaaaactgatcagtcaatgatgatgaatcatacgaaccttttttacttcagcacgttctttaataggggacgaatttgcatgaggtgttatgaactgcaggtggaggtgagcagtgggagcgtttgcgtattaaagtgcattgcactacaatacttgtttgtggatgttgagtgtttactttagcttaatcaatcttatagttttttaattaattaatgttatctttgttgtcca

SEQ ID NO: 38916 - DNA, 995 bp, Zea Mays
atcccagcccaaacccctcaggactgatttgggcctcaggcagcccgcagccggtcagtccttccttttcctgttcgcgtccacgatcctgccgccgccgccgctcgcacctccacgatcctgcccagcgccgtgcgcctccacccccgccccgtccgccgcccgcctggtccatccccgtcccgtctggccggcgttgccaccccgggtcccgcgcgcgtggagccccggcctctaccagccgcacgtcgcaaccgacgaggacgcgcgcgcctgcagctcctgcccggtcccggctggccggccgccggcactccggctgcccctcagcggctcagcccctgagcttgtctgcttgaatgcttcagtgcgggtgcagcacagcggcagtgccccctgtcagtgccagccgccttagctactgcttactacgttgcattttttttcctgttttgtggactgtggtaattgactgtgtatcgagcaggcataccctgttaaaaatcctggttccactactagtcaggccatggctgcagcagaggcatgggtgcggcaggagaaagttaggaagtttgaggagttcgtggaccagcggttgaaacccgacctcaccaatgccatcgcacagcgtaacaaggtgtttgagcagcagaagaccttcttggatttgaagaggaacattgaaaatttggagaggaatggtgttaccagcatgcggtccatggtcaatcttggctcagaggtgtacatgcaagcagaagtaccagatacaaggcatatttttgtggatatcggtctaggttttcatgtggaatttacttggcaagaagctttacagttcatatctgtaagagaggcaaggttgactaggaggggtgagcgtcaaatatattgaaaataagagtatttacaaaatgttaacagagcaatctatattacaacctaatttatgtcaattggttacaccaatgcctaatggttggaattttttc

SEQ ID NO: 38917 - DNA, 1141 bp, Zea Mays
cccgaaacccctatacgtaaataaaaaaaaatccataacgcaatcgcaaggcgctgcctccaccgccgccacctgcacatccatcgtcgccgttcgcgtctccggatcccgcgaccggagtccggaccctcatcccgcggccgcatattctcccgtccgtgccctcgcgtgcgctctgcccctccggcgtccgccgccgccgtcgccctacccgaggtgccgtggtctccatctcccggagcttcgccggcgacgagaatcttccagagccatgctgggcgcgcgtgtgcagctgaaggggtggcaacaggcagctgttgcatttggttctgcgtttggggccttgcttgaccctaggagggctgatcttatagctgctcttggagagactactgggaaaccagcgtttgagcgtgtgctgcaacgaatgaagaacagtgcagaagttctctcggagcgtccccgcgtggtatcctcgcaggtttcccatgcctgggacctgcctcagaacacatttggcgcggcgtatgctcagttcatgggatcaaggaacttctcaccagacgatcgcccgcctgtccgtttcatggacaccgatgagctcgcctacgtcgcgacacgtgctcgcgaggtgcacgacttttggcacgtgctgtttggtcttccgacgaacctgattggggagaccgccctcaaggtgatagagtttgaacagatgttcctcccaatgtgcatgctgtcagtcgtcgggggctctgcgaggttcagcgacaaacaaagggcgctgtttttccagcactacttcccatgggcaacaaaagctggtctcaagtgtactgatctgatgtctgtatattacgagaagcactttcacgaagacctggaggtagtgagaaggaactggggaatccttccttgccccagtcccaaaaagagcagtgtatagggcggcattttctgcgtgaactttctatctgtttcatctttggtttctgttagttgctcagttctttttggaatagcatcatgagctaatgttgatgaatactgatacgttaccgagttggaagtatggttagcaagttgatgtgcagtgctctggaataccaacatgttactttgatatcctgctttagtctag

SEQ ID NO: 38918 - DNA, 1029 bp, Zea Mays
taacttgcacctcttctaatgttgttccaactatattacagatttattccagagaatggctacaatgtcagatgaagaaattgcaaaaattcatccagaccacaacagaaaatctttgagttcattactgccacgcctacactattaccagggtggtaactgtatggtacatgacatgtttggccatgaggttgtggggaaaataaaggaacaatattgtgatgcatttctaacagcacactttgaggtccctggagaaatgttctctttggcaatggaagcaaaacggagagcaatgggagttgttggatccactcagaatatcttggatttcattaaggatcatgtgatgggagctctggacagaaatgtagatgaacaccttcagtttgtgctaggaacagaatcagggatgatcacttcaattgttgctgctgttcaggaattacttcatttgtattcttctcaagagagagcaaacatcgaagtagaaattgtgtttccagtatcttcggatgcaatttctaagacatcgaatggttctcatcatgttggttcttcaatggctactgatttgaatagtcttactattgttcctggtgtgagttctggcgaaggctgctccattcatggtggttgtgcctcgtgtccctacatgaagatgaataccctggggtcgctacttaaagtttgccatcagcttcctgataaaaacaacaaattatctgtataccaagctaacagaattaatgttaggactcctctcggaaaatcagttgcagaggttgggtgtgagcctattctgcatatgcggcatttccagaaaacaaggaggttacccgacaagcttgttcaccaggttgtaaatggtaatggtgacaaacccttgcaatagctgttcatcaatacttgtatttattttataaaggtggtatggaggatgaatatatctcaagtgaatgccatgttgagctggcataccgaagataagattatttgccctgtacggtagacatgtggacttgccca

SEQ ID NO: 38919 - DNA, 3163 bp, Zea Mays
acatgctggatgtgcacatacttcaactcatgttgcgtataatagagtttttgggccttcgacaagcaccgaggctgtctatgatgttgcagcccgccctgttgtaaaaggtgctatggagggcataaacgggacagtttttgcctatggcgtcacaagtagtgggaagacccacacaatgcatggtgaccagaattgtcctggaataatcccactagccatcaaggatgtcttcagcatgatccaagatgtatggaaagtcctggaagagaatttttgcttcgtgtgtcgtaccttgaaatctataacgaggttataaatgatctacttgatcctactggccaaaatttgcgtgtgcgggaggatgcacagggaacctatgtagaaggaataaaagaagaagtagttctgtcaccaggacacgctctttcatttattgcagccggtgaagaacatcggcatgttggctctaacaacttcaacttatttagcagccgaagtcatactattttcacattgatgattgaaagcagcgcccgtggtgatgagtatgatggggccatgtattcacagcttaatttgattgatctagctggttctgagagctccaagacagagactacagggttaagaagaagggaagggtcatatattaataagagcctcttaactcttggaacagtcattggaaagctcagtgaagggagggcaacacatataccctatcgtgattctaagttgacccgtctactacagtcatcattgagtggccatggtcatgtctcacatcaagtaacatggaagaaacacataatacattgaagtttgcaagcagagcaaaacgtgttgaaatttacgcctctcgcaaccggataattgatgagaaatcattgatcaagaagtatcagaaagaaatatcctctctaaagcaagaactcgatcagctaaggagaggaatgattggtggtgccagccgggaagaaattttgagtttacgtcagcagttggaggcgggtcaggtcaagatgcagtctcgtctggaggaggaagaggaggcgaaagctgctctaatgagcaggatacaacgtttgaccaagttaatacttgtttccaccaaaaacaatattcctgccttgacagatgggcatcagagtcacaattctctcagtgagcaagatttaatcacttcacaagatagttctacacttgtccaaactgagggcaccacaaaagaccccctatcatccgctttgccagactccttagatgagatcaatcagttaagatctggcaccggtgaacaatcttcagttaccggttctgcaacagattcaatgcaggtgggattcacggcatcagatcatatggatctactgattgaacaaattaagatgcttgctggggaggtcgcatttggtaccagttcactgaaaagactaatcgaacagtccatagatgatcctgaagcaacaaaggaccaaatcgagaatttagagcgtgaaatccagcaaaagaggagacatatgcgagccctggaaaaacaaatcatggaaagtggcgaggcatcagttgctaatgcatccatgatggatatgcagcagactatcacgaaactaacagcgcagtgcagtgagaaggctttcgacttagagttaaagtcagctgataatcgtgtactccaggagcagctacatcagaagaatttggaaatctacgatttacaagaaaaagttcttcgcgttgagcaacaactctcagcaaaagtggatatatcccctgagaaggaaactgattgtgcacagcaggagactattgatttgaaatctaaacttcagtccaaggaagctgaaatcgaaaagctgaaatatgagcatctgaaaatttctgaggaacattgcgatttaatcaaccagaaccataaattaagtgaggaagctgcatatgcaaaagaattggcttcttcggctgccgtcgaactcaagaatttggctgaagaagttacaaagctatctgtgctaaatgcaaagcaggcgaaggagttattagttgctcaggagatggcacattcaagggttcatggtagaaagggtcgtacagctagtaggggtagggatgaggttgggacatggagcctcgatttggaggacatgaaaatggagctacaggccagaagacagagggaggctgctttggaagctgctttggcagagaaggagcttctcgaagaagagtacaagaaaaagtttgacgaggcaaagaaaaaggaactatctctggagaatgatctagcaggcatgtgggttcttgttgctaagttgaaaagaggggctttaggcatatctgatttgaatgttgacgaccgaactgttaacctagctgatataactaacagcacaaaggagaacaaaggtggaaagaattttgctctagttgagaagcaagcatcagaagattctgtgaagtcactgagttcagaagaacatacaagtccggagtttgaaccacttcttgttcgtctgaaggctaaaattcaggagatgaaggaaaaggacattgatcccctgaccgataaagatgggaactcacatgtctgcaaagtttgtttcgaatctgcagccgctgcagtattgcttccttgccggcatttctgcttgtgcaagccttgctcgcttgcctgctcggagtgccctctgtgccgcacaagaatcgcagacaggataatcaccttcacgtgagctgcgttctagcttcaggtcattctgaagcacacatcctcttgtaaaatcttcaatggtatatgtttctctttttccttagcaaagaaggtgccttttatgttccttctgtgttgtatcgccattctttgggttccccttcccctatagcttcacgccttcaccttacgttctttgttgtatcgaggagttacaaatgatgacttctcgctctgcaaatatgtatagatacgcaactcgacgctgtaacacattttgattctctactcctgaagaaaagcagcgaacgacatgatgacgtgtgtatactgtgctcctagtcgtccctgttagcatggaaggctatattctataattgctgagctacgcccctataattatagatgatggccttcacttttattatcatggttgattagttgcctaca

SEQ ID NO: 38920 - DNA, 2367 bp, Zea Mays
aacaacttgaggcaagaatcagaaaaaaagacaaaacaaacatgtccataatcttcagccaaaacgctaaaccaaaaagtcccatcatcccccgaccctttcgccgcgcccgtgcacaaacccgcgccgtcgaagctggccccttgcctcggagtcttgaacgcaaactcggaggatcgcctcgctactctgcgccgtcaccgcccacctcctcgttcttcaatctgctccctgtttgccgtgcagtggagaccagttatccgatttcccttgtcgttggtcgcagatttctccaagaaatctggggacgctgataggaggccgtacagaacgcagcggcagcaatggtgatgtcggagtcggacgacgacgacgacgagccccagctcaacgcggtggagagctactacttcgttgactccacgaacgacaacgagcctgtctgcttctccactctgcctttcctgttcggggacactgatgatcttcctgactgcaagaaaaggctggtgctgcgcgggactggtggtgacccgggcgtcaaggtgtacagtgaggtggtggcctggagtctggggctcgaggggaagcaaccccagtttgcggtgctcacagcagaaggcagacgttgggttcgtctcgttaggcccttgaacagctacgaggagatgatcaggactgtgctgatcacagcgcatatgctgcattttctcatgaggaagcctcatgagccagagagaacgctgtggaaccacctttgcaaagttttcaacaagtttgacgttagaccctcagaggacgatttcaggaaccacatctcactgatgaagcagtttgtggcaaaagatcctatcttagcaaaatcagagattttgcgagtatttgttgaaggaaaatctggaaaaattttcactgaggctggtgcagaccatattgatgttaagcagccattcataactgatgatgaggacatagatgagatgattgtggaagatgccgataatgaatctgatgaagaggaggatggagatttgtttgattcaatatgtgctatttgtgacgacggaggagacatattatgctgtgatggtccatgtatgcgctctttccatgcaaaagaaggaagtggtgaagactcctattgtgatacccttggctacactgaggcagaagttgaggcaatgaaattatttctgtgcaagaactgtgagtataagcaacaccagtgtttcatctgcggagtgttggagccttcaaatggagcagcagctaaggtttttttatgtaacaatgctacatgtggacacttctaccacccgaaatgtgttgcccagcaacttcatcctaataacattgatgaagcctcagaattggagaagaagataacagatgggttttcatttacatgcccaattcactggtgctttcattgcaaaggtttggaggatagaacacaagggcctttgcaatttgctgtttgcagacgctgtccgaagtcatatcacagaaagtgtttaccaagagaaatttcctttgatgaaattgaagagaagggtgtcatcatacgggcttgggaattatcaaaaatgattttgatatactgcctgaaccatgagatcgatagtgaacttgagacacctgtcagagatcatataaagtttccaaggattgaaaaaccacttcaatttgtaaagaagggagctaacttgttgcctaagaagaaaaagaggacttacagtgagtcaattcttgagcaacctcccaaagatactgtgaaaatgaaaagcaaggttcgcatgcaagaaagcgagcaaaacaaacacgacaccagagaagtttctgtgaagagtttcactcaaaacgttgttgacacacctgtaaagaaaaaaggcaagttgaaagagaataaacagttgccttatgtggccaaggatcattttgtaagcagtccaaaatctgtgaaagagcaagaacaagagttggtacctttgcccttatctggaatcaggaagagttcatttcctaaagtggacagtgaaattgaaaagagggtgattagcatactgggaaatgaaatctcttcgttgacaataaaagatgtaacaaggaactgcagtttgccatcaactcatgtatactctggcagaccaactgacaagatgccactaggaaaaattgagcgttctgttcaggctgtagaagctgctttaaaaaagctgaaaaatggaggtagtgtcaatgatgctaaagcagtatgtgaacctgatgttttaagacagcttgcaaggtggcattcaaagcagatctgcaatagatgtggttctgacttctgaagcacgatatatattttgttaatttatgtctcag

SEQ ID NO: 38921 - DNA, 2287 bp, Zea Mays
atcccgggcaaccaaaggagccctcaaggtggagcgatgacggaagtggaggcgccgctcatcaccgaggtggagggggtggagggccgtggcttctgcggttccgcgtccaccggagggggcagctctggtctcggcagcggcgtgcggggcacgaggcagtaccaccgccgctcggacgcgctcgcctacggcgaccgctaccagaaggcggcagcactcgtcgacctcgcagaagatggtgtcggtatacccgaggatgtcttgaatgacacaaggtttgagagggccatgcgattttatttcgtgtatctccgattggattggctctggtcacttaacctatttgctttgattctattgaatttcctagagaagcctctctggtgtcaaaagtacgccccacatacttgtgatcaaagggatctttactttcttgggcagttgccatacttaagcaaaacagaatcactcatatatgaggcgctaacccttgtcattcttgtcttggatatcttctacccactttcctacgaaggtttaaatctattctggaagaactccatgaataaattgaaggttcttcttctcttcatcttagcatgcgacatacttgtgtttatgcttagttctggacctttcagagtagctccgtacattcgtgttgtgtttctaattatgacaatcagctggctagcctatgtaacatttgaggacacaccacaaggaaagaccattttcacatcatacggtacaacattatatcagatgtttgtcctgttcaccacatccaataatcctgacgtatgggtccctgcttacaagagctctcgttggaacgccctgtttattgttatttatgtgctgttaggagtttatttcctaacaaatttaattcttgctgtcatttatgatagctttaaagagcagcttgcaaaacaacttgctcaaatggactctataaggaaaagtattctacagaaggcatttgatctcatcgatactaacggtcagggttaccttaacaaagaacagtgcatatcgttactggatgagctaaacaagtacaggtcgttgcccaaaacctggagggaagattttgaactaatcttttccgagcttgatcggagtggtgatttcaaggttacctccgaggaatttgctgacctatgcaatactattgcaataaaattccagaaagaaccaccaccttcatatctggagaagtacccatctttctaccattcaccacagtgtgaaaggttgaagtcctttgtacggagtcgcctgtttgagtatattgttgtctttgttcttctggtgaacctaattgctgtcgttattgaaacaacgctagatatagagaacagctcttcacagaaagtgtggcaagaagtggaatttgtctttggatggatctatgttgtggagatggcacttaaaatattttcattaggatttggcgcctattggatggagggtcagaataaatttgattttgtgattacttggactatttttattggagagactctgacatttgccttcccatcaacgcttccttttctttctaatggagagtggattcgatatcttctccttggaaggatgttgcgtttaacaagaattttgttgcaaattcggcgtttcagagcatttgttgcaacattctttaccctcatgtctagcttgttgccatacttggggactgtgttttgcatactttgtgtatattgctccataggtttacagttttttggtggcatcgtgtatgcaggaaacttgaagttggaagaaacagatctctttgggaacgattatcttcttttcaacttcaatgactacccaagtggtatggttactctgttcaatttgttagtcatgggcaattggcaagtctggatggagagctatgcacacctgactggaagttcttggagcctggtttattttatcagtttttaccttatttcagtattactgctgcttaatctgattgtggcatttgtgttggaggcgttttttgctgagatggaactggagaaagctggagaagctgatacgcaggattctaccccacaaggaagaaacaagcggcgatccatgcgtgtgaggacgaagggtactatggttgacattcttctgcaccatatgttgagcaatgaacttgatggatctcaaaactcggattgattactcatcttaatgtgtggaatatgccgtattgagtagacagtattggttgtattaagcaactcgtatgaagcgaaataacagttcaaaggtg

SEQ ID NO: 38922 - DNA, 1339 bp, Zea Mays
tttcccgcccaatcaaacccaaaccaccgctcacctccgctgacggccgccagcccgccacgatggagctctccgccgccttcgaggaacgcgtccggcagatggaggacgcccgcaaccaacgcctcgccctcctcaacgcggagaaggagacccaggccgccaagtcccgtattctctcggccaagctcgccgccacgcgccgactcgagtgccgccgtctcctcctcgagcgccgcgccgccgacctcgccttccgcgccctcgccgcccgcgccgacatcgacgccgcccgcgcgcgccgcctccttgtcgcccgcgacctcagctgaaatctacactgcaagagctgcagagcagcgagatgtactcgaacaacacggagattgctgctgcagaagctaggaagtccgacctgactgctaagaaggcaaagatggaggagagcctggcttcagcccgccagttcagagcgctgcttcagcagcagctccagaaagcctttcagtcacaggtggacgatggggatcaagaggcagctcaagctaccatttgaacttgaagtgctacttcaggtccaatcgtgcgtaaggaaagcgagcgagggcgcctgcatcggtacgcccggtgacttctttcggtttcatgcttgacgcattgcatcggttgtacaggtggaagaaatctggcagggtccaagaaacaccgaatgtcttttttggttgttcgccgaagaacaccgtatggcacttctttcacggcaatggaagcatgtttctcaattgttacctggtaggctggtactatagcttcattgcgacgcttgaccagaactcatcaggcaggaggcatgtgccttcgccatatgcagcaagtgcaatgtactcatcgcatttgcttcaggatctttggcgaagcgtgagcctttttcacccagctagcggactggattggtactgacactgcaaagtgttcattaatgtgtagggctagtcaccctcatttgcatatttgcatgcagccgagaggcaaagtggacgctttagggtttgtgcctcctctccaactactctcgcacttgtaccatctcgttaaatgctgctgcatgaggaagcttttcttgctatgtcaggtgaatcgtccgtgcattgtagaacagcgaaatacggctgtaattcgtaaattcttggaaataaatatcgtgtcagtggctggatatcgaaaaaaatcacagagcacagttgtgagaggatcgtgatgttgagagggggtgaatagagtttctgaaagtgaaatgggctttaagccattttttattgattttggtgtttgtgacaat

SEQ ID NO: 38923 - DNA, 1760 bp, Zea Mays
atatcctttaatctaactttacttcataaaaatgaacatgattaaccttgaaagctatgatggtggtttggcttcttttatagtaagtcttgttcagccatggggattttttagtgcagacaagctgaagtttacccgaaaagggctgacagctatgtacactgcaaaatctgcactagactagatcttaaacgttttccccaaaattctgcaactcccattttcaagaaaacctttttgcaccaggactacatagatgtgtttttgtacttttgtcaagtcatgtctcaactttgccactccttaattcggtcaaacctcttcaagtatgcagcactgggcgttgagaaccttcacaatctggagagttgcttgtttgtgcttttcccatacttctcgtaagctttatttgaacttcacttatttttatgttttgtttagggctggtttggttgcatgggtttggaggagattgaggggcatataatctctttctaatcaaaaataattagcaaggaattatatgcccttcaatcccctccaatcccaacgcaaccaaacaaacccttaaagatttctgttagttaccgtgatttgtactaggtacatgctagcagaaggcattggtctatctggcattatttctattctcttcacgggtattgtgatgaagagatacacattctctaacttatcagatgattctcagcgttttacagctcgcttttttcaccttctttcttcactagcagaagctttcgtgttcatatacatgggatttgatattgcgatagaacgtcaaagctggtcacatattggattcatatttttctcaattatcttcatactagttgcaagggctgcaaatgtcttctcttgtgcatacatactgaatttggcacgacctccacattgccaaatacctaggcaatatcagcaggctctttggtatagtgggcttagaggagctatggcttttgccctcgctcttcagtctgttcatgatcttccggatggacatggcgagacaatttttactgctaccacatctattgttgttctaactgtactccttattggtggctcaactggaacaatgcttgaggccctacaggtagttggggacagcaaccgttattgccaactgtatgagctgcaggagagttctaatggcaacgacactggttacacgggacaaaattatgatgaaggagcatccacttcaagcaaattcagatctaaacttagagatctaaggagaagcacctcgtctttcgctttactggacagaaattaccttactcctattttcacttcgcaaaacggcgactgcaatgataacactacagaaagtcccaatgaagaattgacgatattcagaggacctggggatttggaggtacatgattgatgactgcagatatgaagtgcttatcttccatgaatctacacgatactccttgtaccttcctcggcgacccaaagtggaaagtgcaaccagacattcggccatagcattgccatattattaatctataaacattagttagctaggatagttcaacgtaagtctttgtacgtagaatataggtgtaatttatcagccttgaaattctgttctgatccgtttcagaaactttgtgcgtacggacgcatctgccttcttgtgcacctgcaacactcgtaggttccttgaaatgccttcttgtgcacctgcaacagtgcaggttcctccaaattgaactcgcccagatttccgg

SEQ ID NO: 38924 - DNA, 1142 bp, Zea Mays
cacaaatgttcttctagtgttgcttaatgcacagtcacatatatgtcacctgagagaattcgtaatgagaactattcttatgctgctgatatttggagtcttggactaacaatattggaatgtgctactggaaaattcccatatgacgtaaatgagggccctgcaaatctaatgttgcagatacttgatgatccatcaccaacaccaccagtagatacttgttcattagaattctgctcattcatcaatgattgcttgcagaaagatgctgatgcaaggcccacatgtgagcaggtaaagataattaggcttctgtcacacccattcatcaagaggtatgcaggaactgaagtggacttggcagcatatgtcaaaagtgtagttgacccaacagaaaggctaaagcaaatagctgagatgcttgctatacattactacctcttgtttaatggacctgatgggatttggcatcatatgaagacattctacatggaacaatctactttcagtttctcagagaacgtgtatgttggccagaatgaaatttttgatattttgtcaaatataaggaaaaagctaaaaggtgataggcctcgagagaaaattgttcatgttgtcgagaagctacattgtcgtgcaaatggtgaaactggggttgcaattcgtgtgtctggatctttcattgtgggaaaccaatttcttgtatgtggcgaggggataaaagctgaagggatgcctagcttggatgagctctctattgacattccaagcaaacgcgtaggccagttcagagagcagtttatcatgcaaccgggaaacttaatgtcatgctattacatatcaaagcaagatctgtacattatccaatcctgattgaacatattatttgtaagattattctctgaagcacatgtatagaggatttagaagaattcctttcggacctggttttgaatcttatttactttgtggaactgaaattttgggccaaacctctgacaagaattgaaaagtttaagtcttcaactatattcatgtttagaactgtttttatatttggttggtattgataattttcgttttgtcgtgaggtcccaggaggatgtgtgatttgagtaatggctgaaatttatcatttttta

SEQ ID NO: 38925 - DNA, 1900 bp, Zea Mays
ctatcccttttgcttctcccttgctgttgttttctccctctagagactagagaccccatctctagaaagagaaagcaggacaagcaaagctaccggccagacagcagctagctatagctctaaagattgccctgacctgatcagatgatatgagctttttgcaagatggtggctatagcagctagagtagtatttctgttgtgatgtgctcaagccaagcatgatatgggtggagaattcaggagctctttgatgcagcagatggtgtggagtagtagtggcggcggtacagacagcaagaatatgatgagtagtagtttgatgccttgtgccgaggagcaagaagaagagggctccaacaagatgccccctttatcttctccttccatgctcctcctcccgcagcaccacctccaaatcttctcgggcctgcctctgcctctgcctcctgaggtgctgaacgacagctctgctacttctgatctgcatgatggccgggaaagcagcatgccggagtcatggagccagctgcttctgtaaatactgcatccctttcttgttatctttccctagctaccgcgctctgagttctcttcaatttggttcttccatgtatgaattcatgtctgcaattaaccacaaaattgaacagtgggggattagtcggagatcacgagagatacaacgctgccacagctttactgtcaaaaggattagaggagcgacctgcagcttacaattgctatgaccctggacatggtggtggtgaggagatccagacatcggggaccaacattaggtctcatcaggtgagccaggcgctcttagcgtcgtcctctcctaggtcctgcatcaccacaagcctcggcagcaacatgctggacttctcaaacaccaccgtgccgccggcaccggatctgaagaatcatcactccgataactcttctgagggtaacagcgctggaagtggttcggctccaaagaaggctagggttcagacctcttcttcagcacagtctaccctaaaggtaagaaaggagaggcttggggatagaatcactgcacttcaccagatagtgtccccatttggcaaggtatatatacacggctagctctgcttacctagctaactatatactacatcaattgtaaagattaaagaatatatatcactatatgcatgttgatagattaaaaaaggaccataccactagatcgaattaagagctcggttatttacctcgtcatatcaaactaaaggatatatatcactgcatgcatatattttcttctctagcagatgtcagcatgcatgatcctattgtcactgctgtctgtcactcatagatgcatacaaatgtggatgcttttgcccatgcattctgctgctacgacgccatgcattcattcgtttcttctccttctagctgctccgccccctttaattctcccgtttcttttcagcccatgcatacaaatgtggatgcttttgcccatgcattctgcatgcagtttctttcgctttagggtttaggaggtgcgcggagtgacaatcactgaaaacaagcaagtccctgacatgcatatatgcatattacttgttgttgttgttgtttttttttttttgcagactgacactgcctccgtcctacaggagactattggctacattagattcctcctgagtcaaatcgaggctctcagcttcccttacttgggccatgacaacggggactccatgcaacaacataatactaataacgtacggtacgtgtgcgtgcgaataaaggtgcatgcgcaggcacgtcacgtgcgaataaagatggacttgtcactgatggcacgcatgcatatgcatgtgactgaatgatagtacgtccaccggccagaccgtttcagc

SEQ ID NO: 38926 - DNA, 722 bp, Zea Mays
ttgtggcgaggaggaaaccaggattgaggacagagagcgatcagccgaagaagtcggtgcgctgccgaccgttgtggtggtggatcctattcgcttccaagaagacacgaaatatcatcatcctcaatgcctcacagtcatctatgctttggcatggtgtggttcattgttgcagcctgtaaaaaattcacagtgcgtgcctttggggattgccgtgtatgctacttaggactagagctgggagtctgggttaccttagcttacctttctcagccgtgctttgcatgttataccatccgacaacaaacggcatcccaaggaagcttataatatcacgtatgagtgtggaatttctaattgttagctattgctgaaaagtatctatgtgatctggaaatatatatggtagtaacaatagatatcggagcatgcatgcatactcagtatttctgtcaatgggtggatatctttttggcaccctttgcagtttaatgggtcatattgctttttattgtcttccacaacaaactggactgatatagtggtgctgatccattttattccttctcagttatagtgtagacaaaatacatttttttatgcgcatgtgcgtcctgtgttgactatgggctcattggtcttcatctctgtctacttcattaggattatgaattcagatttgttcttaacgtcaatgttccttcccttcaatccatagatgt

SEQ ID NO: 38927 - DNA, 1419 bp, Zea Mays
gaactctggagacatacattgcattacactggaagttccaaattcgttatgtaatttttacacctctctttgctggtgcttgttacattttagagcacgttcctttacacacagtggcattcacttcatcatattgtaatggtttcgtgagggtatcattaagttgaccggttagattggatcggaaaagggtagctgaccttactagtgatttcgtgtatagtgttaattaaaaaaggaacgttttttttttcatcatgttcatttctatttttatttaaaacctcttggaaacatttgtctggtattttctgggcacgtctgtccatggcatttctgaatccgtgtctcgtttttccctctgtttgctaaatgctagttaccttgtcgcattcgtacgtgatgcaggaagcttcatggaaagaaacaatccaccagctgtacggcacacgggtggctgtgctcgctggcgattttatgttcgcgcagtcttcttggttcctagcaaacctagaaaacattgaagtcatcaagctcatcagccaggtaattaaggatttcgcgagcggcgagataaagcaagcgtcgacgcttttcgactgcgacgtgaccctggacgactatctgctgaagagctactacaagacggcctccctgatcgcggcgagcacgaggtccgcggccatcttcagcggcgtgggcagcggcgtgtgcgagcagatgtacgagtacgggcggaacctgggtctggcgttccaggtggtggacgacatcctggacctgacgcagtcggcggagcagctcgggaagccggcggcggggagcgaccttgccaagggcaacctgacggcgcccgtgatcctggcgctgcgggaggagccccggctgcggggcatcatcgagtccgagttctgcgagcccgggtccctggcggccgcggtggagctcgtgcacaggggcggcgggatccggagcgcgcgggagctcgcggaggagaaaggcggcctggcgttgcgcagcctgcagtgcctcccgaggagcgagttccggagcgccctcgagcgggtggtgcactacaatctccagcgggttcggtagaggaaggtgctgtgcttccatgtggcagtggcatggcagtgcgtgttgtttagtgtaaccgacactgccgcgtgcccaccaacctcgtggagcatgcatctgtaaggttctccatttctttggggggtgagtgagggcactagtagcatggtgtgcagtggttgtgaggttctattgttgttgtaactacaagcaggtaaactgttctggacgacaccacgatgtatatgtacatatgaaatgcactgctgctgtgggatgtatgcaatgagccaatgagtaggtttatctcacaatcatcagctgatgctagctgatggc

SEQ ID NO: 38928 - DNA, 2116 bp, Zea Mays
atttcgtgaattcgttgctgtgtaaattgctaatcccacgttaagtgtactcatgattcgttgcctgaggtccaggcgaaagacctggcgcttagttcttagtgcaaatgttgagtggataaggtgattttaattaagaaaaggtgtatcctttggcaacaagattggcttcagactcgttgattttggaccaaactgtggctaagggaatcctttgccaaggcccatccatgtgctagcgctagcgatctgtactgaacaagggaggaccaagagcaaaagtatacggctaaagaagctagctttgttctttgcttgcgctggtaacttagcatttctcaaaagggtggaatcattggctcaagtgcggaatcatttgattcctttgattataaagtcatatgttgttgttttcccttctaatctgacagatctgagatgaggcatgaggtgctccatgtgagagttttccctagacctcttacctggctcttgcttgtgactttatttaattgggaatgtagatcacatctaacatgctccattgatatgattatttaatgcctttggttgatccacctgcttctttctttttctgccttcccgaccagttttgtttaatgcctttggttcccataaagtctatatatgacctctctttccttgcttctattctccattcttgaatgaagttccataagcttctccaagaagagggaaaggtcctgtaggggcaaagcgtcattttgctgatttctgagaaaatggcgagaagtgcgggaactaggaggcgtgtggctcgccagctcaagtccacacatcccattccttcataccgatggaagtcaaagcccatgaaaaagccgatgaaaaaatccaaccgaaagcaagtgttgccaaccttgcaaaagatggactgggaagatgccaattgctctgtgtgcatggaatacccacataatgctgtgctcatcctttgctcatcccatgataagggttgtcgtccttatatgtgtggaactagctaccgccactctaattgcttggatcagttcaagaaagcttacaccaagggggcattgcttgaggaagttcctgcaaatagtgttggctctaatctggattcggcgccattggctgcagaaaaaactgactccattgaccttgcatgtccattgtgtcgtggcaaggtgaaagggtggacggtggtggaaccagctcgaagctacctcaatggaaaacgaagaacatgcatgcaggatggttgctcatttgtggggacctacaaggagctccgcaagcatgtcaagttggaacaccctcttgcaaagccaagggaagttgatcctgtccttgagcaaaaatggagattgctcgagattgaaagagagcggcaagatgcgctcagcacgatcacggcaacaatgggcagagccgttgtttttggtgattatgtgctagacttggaggatggaatggactccgaggatgttgacagtgatgctgataatgatggccgtgggacagaaaacactcgtaggatgctactatttattatgcgccaagttgctcaacatcaccaaaaccaaaggctccagaatgcgactggtgcatctgacaatgctgaggacaattatgtggtgagcagtggtgccaatggaaccacaccatactcttaccccttggagggggaggacgagaatggtatggttgtggccggaggcagaagcactgatgtgctgagaccagagaggaggcgccgtcgtcgccgcaggaaccgtgggagattgtttttaggtgctaattgagaggacaggtggccaggtagggtttagccgccagaggagtacatacagaaatgcttccctggtgcctggcattcatcaattcctgtctcaatttacttgatcatgatcatgtaccaagtagttatcttaacatcagctcattgtcataaatttatggtatctcacattcttcgttgaaaaaggaaaacaccgcatccatctcttgcggtttgtgtagcatctatttctgtctattgcttttgttaaagcatttgtttggagatcgtattagattttttaagtgaaacatatctcgttcgatcaggttt

SEQ ID NO: 38929 - DNA, 2148 bp, Zea Mays
cagaataggagtgagggaaagcccgttgctttcgcttcggttttctcccagaactccaccgagagaggggaaggactccacaaggagaggggccgaggggggagtaaactcgggtccgtgtgacggcagagagtttccgacgaggagagagaagcagctgggaagggcactcacggagcttacagagaaaaaaggggtcgaggttcatgcccgtttggttcctcggttgctgcgtgaggcggccggaggagtcgtgaaccgggaatgacgggggtggtggtggtttccagcgcggggtgcaagggtggcggcggggcgaagagggccgccggcggcagaggtggcggggaggaggagcggcggcggcgggcggcggttctggagctgctgctcgcggccgtgcggcgctccgtggtggcgtgccgggtggagcgcggggccgccggagccgggtggccggcgagagaggaggacgcggcggtggcgctcgaggagatggagatcggttggcccaccgacgtccgccacgtcgcccacgtcaccttcgaccgcttccacggcttcctcggcctccccgtcgagttcgaggatgagatgccctgccgcgtgcccagcgccaggtgagcaaccgtccccaccacctccttgtctccctcccgcgtcaccgtaagattcaaaatcgaagcttccgtagaaaatttcgcttacggggcaagagtcatactgaaaaaaattgattttctgaaggatgagtttatgattttgagtgctcccagtttggactttggagcatgttcttatctgaggatgctgttccgccagagttctgataactagagcaaaacttcagttcctgcagatcaacattggcactaatccggtggaactcttattcctgagtcacacattgtaacaagtctgaatttgtgttggaccgtatgaattgtcccccaagctttgccagttgaactcatcaatccatgacttgtgaattcatcaagctcattctcttttattttctctagcgccagcgtttttggtgtctcggctgaattgatgcaatgcacatacgatggcaagggaaattcagtccccacgatattgctgctcttgcaggagaggctgtatgcccacggggggctgaagtctgaggggatctttcgcattaatccagagaatgaccaagaggagcacgtgagggaccagctgaacaaaggaattgtacctgatgacattgatgttcactgcttggctagcctgattaaggcatggttcagggaacttccagaaggtgtcctggatggcctgtcccctcagcaagtgcttcaatgcaattctgaaggggagttccttgagcttgtgacactgttgcgccccactcaggcggcactcctcaattgggctgtcgagctgatgtctgatgttgtcgaagaggaggagctcaacaagatgaatgctaggaacgtagccatggtgtttgcccccaacatgacacagatgtcagatccactgacagcactcatgcatgccgtccaagtcatgaactttctcaagacactgatcttgaggacgcttcgggagcgcgatgatgcagccaccaccggagagtacacaccatactcatctccagcatcatccagtaagcatgatgacgccgaatgctgctatggcagtgagcaggacatggacaggagctgtgagatgagtgacatgcatagccagatcagcaagtctgggcgacatgcagactatctcgtacgctacaatacctgttttgacagcgaacaagaggtcgacgatcatctgagtgaggttgaagaaggtttcttgcgtcggttggagcgtgatcttggagcagacagaccagaggtttcttgcagaaaaatctcagagatcatggccctggaggatgctgagccgaaagctgaaactagagcagtggagaagggcatacagaatgagaatgaagaggttgctgaacagctataatgatggaagttctgtgtttttaggcagtaaagcttattattgtaagtactgaacactgaccaatggtctttatccaacacctcggttgaatgtattgctccagtgtatgatgtaaacttggctgatccttttaatgcttggtgcccctttgttacctgg

SEQ ID NO: 38930 - DNA, 1291 bp, Zea Mays
caatacaaacaaacgaagatccgccatccggctccgcttatgtgatagcccggcccaacactacaactgcctctcggccctctcctcggcgacgccactactcctgcctcacgccgccgctcaaaccgcagaagagagaagagaagcacgcccaaaaattccgaggttttcacctcttggagcgcaccaacaccacccggagaccggagcgactcgccaccggcgcggaaaaggtacgaatcagagatatattgccgacccgtgcgggctaaggcctagttgagggcggaggctcgatggcggatgagaatcaggctggaaagaaagaggaggaggaatttagcacaggccctctgtcagtcctaatgatgagtgttaagaacaacacccaggtcctcatcaattgccgcaacaacaagaagctgcttggccgtgttcgtgcttttgatcgccactgtaacatggtgctcgagaacgtgcgtgagatgtggacagagatccccaagactggcaagggcaaaaagaaggctctgcctgtgaacaaggatagattcatcagtaagatgttcctcaggggcgactcggtcatcatagtgctgaggaacccgaagtgatcgcccaaccagtcaccttgcagcagttatgccccttctctgggttcacggaatccgtgcctctgttgaaaaaaactgtagcttatgtatgtcttggcggattagctggttatcttgaactgacgttcatgtgacatggcaatggcacatgaacatacgtttcatgagtttggttgttaattggcgcttgcagtactttgatccctgaatgttgagattgcacttctgcttattgtcttgccccattgcgtgacgtggaatacttgctaaatggcttgtatgacaaagtcggtgtggctgcagcattggggcgaacgagcgcagaagggagcaggcgacaaagtggagagcacagaggctggcgctgacggagtctagcgctccttttttgtgtgacttgtgtccgttacagcggtaacataaacagaattagggtctgtttggtttgtggctaaatatgccacactttgcctaaggttagtcgtttgaattgaataactaatcttaggcagaaaagttaggcaaagtgtggcaactgagtcagtgaaccaaacatgcctaggctgttttagggagccgtggagttgaattgttggacgggatgatgtatgtgtgctgcagttttgcctttatatacttactattttttttccaattcacatcatattcaatgttca

SEQ ID NO: 38931 - DNA, 2361 bp, Zea Mays
gggaatgggaattgttaatgccagggcctagatatttaatagtattttcataacagcacaaagcgtcatggcagcaatagagagaacacaagtcagcaaggcatgaatgctatcagggtgcaaaaagaaatgaaaaaagaatgggcaagacctggaagagttttcaatagaaatattactagaggaggctactctcgaagttcattgcctgtaccacatctgttcattatgtcgttatcctgtttctgaagctcaaccaaaaagcttgctgcccaacaccacttggttacttgcaatgttaatgggcatggagcggcccatgctgacaatggtatcaaaattgcggctcaagcccatgacaaggaagtcaagccttctattgtccgaaaaatggaacaatatgaagggacacaagcatcattggttggatctcatgcagttcttggaaagggcaaccagaacacggtggacactgcagcatcagggaaaaataattttggtggcgaactttgctgttcttcatcagatccaatccatgtgccctctcctggttctaaatcagctggaacttttggagccataaagcgtgaagttggagtagttggtgctaggcaaaggccagctgatagtgcagcaatatacacatctacttctaatggcttagtcaaagtggtatcagcaccaaaggttagcccacatttggaatggaagcccaaatcagtaagccccagcactgctgcacctcctggtgctccatcacctgttgatgatggaagtaaaacagaagtgtctgctttgtctaagaagctttcacatgctaatgtatcacatgaacatgtcattataccggagcacatcaggataccagattctgaaagaactcatttcatcttcggttcttttgaatctgaaatttatccaaaggcttctttagcagcctattatgatgctgtggctaaagaagacttgaatgatcactctccatcaaggatggataatgttggttcctgcagtccacttccacagtcagagcctgctgtttcagtttctgaacatgagcagtcattgacggagtgtgtggatgttcggagccctggtgttgtcggtggaacaaatgagacgatttcaagcaaggtaacacattctcaacctcgactccagcatcaggaagctgcacagaattttaaggcatatgagccagattctggttatgggatgtcatttattactaaagttgatggtgaagcagcccaaggtatagcttattcatctgaggctatggttttacattctgtaaatggctatcagttacctgcatctacagcaactcaacaaccagtgccccagatgttttctcaacaattccaagcacctcagtatccaaactttttgccatatcggcatgttttctcaccacagtttgggtctctaatggttgttccaaactattcaagcaaccatgcatttcctcagttgccacatgccagcagctatctggtaatgccaaatggagcctcacaactagctgccaatggcatgaaatatggatcaaaccatcagtataagcaagtatttcaaggagcccctgctggatatggctacggaaatcataatggttaccctaacggtgttattggcggcacaggtgctattgaggatatgaatatgagtaaatataaggacaactgcctctatgcacccaatccacaggtggaaacagcagatgtatggattcaaagtcagaaagagagtcccaatatgccatctgcaccgttctacaatatggtgggacaaccagtgtctccacatgcagcatacttaccaccacaaagtggccacactgccttcagtcccgccccttcccatcctggtcacttgcagtacccgggctttgtgcatgcactgcagccaacatccatgaccatggtgcagaacccgcagaccatgatacatcagccggctgcaccgccattggcaggaaatctaggcctggacatgtcggccatggttcctggaaatcaagtaggagcgtttcaacataaccagcttgcccatcttggctggaccacacaatccttttgagattttggtgtgcttctatggctggataagtgaaatttcggttccgtgtggatagaacctaattgaagtgatatgctgtaatatgcaggataggcctgatgaataccaggtttttctttgttttaattataaaaggggaaccgttttttcgtgccgttgtgatttgcaagaacgtgtttaatgttcacttccagtttttgttccaaaattttgttgtaagtgctagtttggaaactcaaattctctttcgggattagaatgaccctacaatctccaatc

SEQ ID NO: 38932 - DNA, 2406 bp, Zea Mays
cgcgattctattctacgccgctataatcagtcgtgcggcgtcgtcggcgaccttgccgcctgcggcgcggaccacgcggttattatacagctaaccggggctttgagctacagccttctcttgtggggaggcatccccgtcctctacttcgtcgctgccctctgctgcgcctggactggcgtggagtggagatccatccacccgcacttgccacgatctcttccttctcgtagttggttgcggatttgcttactttggtgcgccgcccggcaatccaaacaatcctgcttgggttcgattcgcttcgccttcgtcttcagcgctcaagatcagtttagccgaggtgccgggcgcggtttggctgtccggaggcttttagagttactggaaccccgatgccccaagtgaagtccagctacgatggcgccggcggggactacattaagtggatgtgcggcgccggcggccgcccgggcggcgccatggccagcctccaccgcggggtgggctcccttgttcgtgacatcagcgacccctgcctcaatccctccccagttaagggaaacagaatgctgaaaccagaaagatggcacgcgtgttttgacagtgacgggaaggctatatgtttccgtaaagcccttaagttcattgtcttaggaggtgtggatccttctattcgagcggaagtttgggaatttcttattggctgctacaccttaagtactacagcggaatataggggaaaactaagagctgctcgaagggagaaatatcgttatttaattaagcaatgccagagcatgcatacaagcattggtacaggtgagcttgcatatgctgttggatcaaagctgatggatgtcaggaccttgcccaaagaaactgaaggtggagaagtcagcacaagtcagcaagctgaacatgaagtgccttgcagtttagcagaaaattcgaatttgatttatggttctggttgcacaacgcggccccataaaaggaaaatttgtagtaaatcagctgaaacagttggtttcaatcaacataatgataactctagaggttctggagattgtgatgtcattggtgaaccaaggtatgacagtgatgccttcatcgattttccttccctaactggtacaaacttggtcgcaaatggtgacggggatagcaatggagttgaagaaaatccttgcaatttcttggtctctgaacatagagtaaggccccatgatgaacacatgcacagcttccagatcaataataacatagatctcataatagagtcaaatacattctccaatgatatatttcgacctagcagtagtgactcagccatctttcactcagatgcgtacaagcatgatagatggttagacgatactggctatagtgaagaaattatagattccttgaggatatctgatgcaccagaatcagatttagttgatggaatgaaatcaaatggttcaatagctgacaaagatagagtctctgaatggctttggacactgcatcgaattgtggttgatgtggtgagaacagatagccaccttgatttctatggagaatcaaggaatatggctagaatgtctgatatacttgctgtttatgcatgggttgatccttccactggatactgtcaaggtatgagtgatctgctgtcaccttttgttgtcatatatgaggatgatgcagatgccttttggtgctttgagatgctactgagaaggatgcgtgaaaatttccagatggagggaccaacaggagttatgaagcaattgcaagcattgtggaagataatggaactgacagatgctgaattatttgaacatttttcggcaattggtgctgaaagccttcattttgcttttcggatgctgctagtcctttttcgtcgagagctgtcctttgaggaatcacttatcatgtgggagatgatgtgggctgctgattttgatgaagaagcagtcaggcatttagaagagaactgcctagaaccattgctagtagatctgagcaatggcttatcatctgaagtcaaagaaatgttcaatgataatgtgctcaaaataaatgtaaaaagatgtgtacgcttggcaatcaagctaaggaagaagtacttgtacaagtcattgaaaggtggctctagtgatgataaagaaagctgaagaacctgcacttcccttgtagaaaaaactagatatttctccatcatgcattgctatctaggtgtgctggatcagtattgacctgaagtatggtacatgtccaagatccggcattattcaggattgcaaggcaatctgtacatattatacttgaaaacaacagatgaagctgtggaattaaagaaaagaaatcaagtccactgaatggttgtatttctggtggtgtcattgttttttt

SEQ ID NO: 38933 - DNA, 2023 bp, Zea Mays
ctccagtcctccctcccggctccctcccagtacccacggtcccaccccacccggagaaaacgaaacaaaccaaatctcgctgcgagctgggcggcgagggcgcgcggcgccatggcgaggagcaggacgtcgggcggcggcgagtacgagagcggcagcgaccacgacggcgcgctgcagaagccgctgctgcccaacagcgggagctggtaccggatggggatggggtcgcgccagtccagcctcaacgccgccggcacctcctccatggccgtcctgcgcgagtcccacgtctccgccttcctctgcacgctcatcgtcgcgctcggccccatccagttcggcttcaccggcggctactcctccccgacgcaggccagcatcatccgggacctcaacctctccatctccgagttctcggtgttcggctcgctgtccaacgtgggcgccatggtcggggcgatcgccagcggccagatggccgagtacgttggccgcaaagggcaattccaaacgtcattggttggcttgcgatctcctttgcaaaagactcttcatttctgtatatgggacgcttgcttgaaggattcggtgtcggtatcatttcctatgtggtaccggtatacatagcagagatatctccacaaaacatgagaggggctcttggctctgtgaaccaggtttgcctatacttgcaagcatctcatctatttgtgaggttgaggtaaacacttggcttgtttatgcggatctcattgtacatttgaaaatttgttaattctgcagttatctgtaacccttggtatcatgtttgcctatttgctcggcttgtttgttccttggaggcttcttgcagtaataggaaccttgccctgcatagtgttgatacctggccttttcttcattccggaatctccaagatggctggcaaagatgaatatgatggatgattgcgagacttctctacaagttctgagaggattcgatgctgacatcactgcagaattgaatgatataaagagagcagtaatgtcagcaaacaaaagggctacaattcgtttccaagagttgaaccaaaagaaataccgaacgcccctaattataggaattggtctacttgtgctgcaacagctaagtggaataaatggtatactattttatgcaagtagcatcttcaaagctgccggtctgaaggacagtgacttggacacctttgcacttggagctattcaggttcttgccacttttgttacaaccatgttcttggacagagctgggcggcgaatcctccttattatttcttctgctgggatgactctaagtcttcttgtagttgctattgtattttacatcaaggataatatttcacatgactctgacttgtatgacatcttaagtatggtgtccttggttggtgtcgtggcttatgtcattgccttctccttcggtatgggtgccattccttggatcataatgtctgagatcctcccagttagcatcaagagtcttgcaggaagcttcgcgacccttgccaactggttgacatcctttggaataacaatgacggcaaatttgctgatcagctggagtgctggaggtacgtttacctcctacatgattgtgagtgccttcactctcgtgttcgtaatcgtttgggtgccagagacaaagggaagaaccctcgaagagatacaatggtcgttccgctgagcaccaacatcgtcaaaatgcgaaatggttcttcgagttttgtcgctttagatactcaaatcactcgacgaaggccacacattctttctgttcataaaaggtcttgtacatgagattgcatacaccgttgttataactttacccccaatagacttgtaaatgcttgtgcagtaactcttatattacttttgcttcaacattgtaagatagaagacttgccaaaataaaatctgaaccttgggtccaatattccatgtaaacacgagcatgtttcttgatcaatcaaaatctcaagcatttttgttgaagtctg

SEQ ID NO: 38934 - DNA, 408 bp, Zea Mays
gtttaatccaaatctccaatcattattatattattgttattatttaatgcacaaacatacaaactccaacatgatgcatgtttatatttttattagttatttgttgacttacataaggtgttttcatgttgtaatgagtggaatgcaaaacaattaaggaacatctctcctttcttaggttttacaatttgggtattacaggggcggccatggcaggcgtcgaggccggatgggatgcgcagcaccggaggcggcaggaaacgacgacggtgtcgaggcggagccggcgtggtggtcggtggcgctggcgtcggggcggagggccggaaatggcatcgagcggcagagtcgggggcggccatggccgccaacgaggcccaatgggctatgcagcactggagacagcgg

SEQ ID NO: 38935 - DNA, 395 bp, Zea Mays
cgactaccttatcggcagcgagatgcgcaggcgtggaccggcacgtgctggcggaggtgcgtgtcgggacgctgggcttatcggttaccgttgcgcgagggggccggggcgaccggagactgccggtggaaactgtgggcgtcgtccattggctggctggatctcgcctcgcgggagggaggacgctttttttatactgggttggtgtgtgtgcgggttggagtgttgcgcacacagagacacacagacctcgcccacgataaaaccaaataatgaggagatgggtcgccgacactccggcccaaacatttccgtgtgctatcattcgcagacagacccgaatacgtttgttctttattagaagaaaaaatattcgcttgttaccactaaaccta

SEQ ID NO: 38936 - DNA, 1602 bp, Zea Mays
gtgccacaccctgttctcccgacatcgacgtcgggtccctgcctcgtctggtcctctcggtgtgggaaggaaccaaaccgagatggaggcagagtgcgacgcctgccttccctcttccgccgagcgcccgctgcgtcattcttgtccctcctcttcatcttcatcggccaaccgattaccactgaatccagccatcggcgactgtccctcggtttttctttaacgatttccgatttgattccatggccggctggaccgattccagcgcatccctcctcctcgtgatgcccgctccccaaggacctgtgcctgcggcagcgggaggagatcaggacgctcaaatacgtcatcctattcctgcacgtggagccggagccagagctcgaccgccgcctttgggacgatatttccatgctcaccgaccagatccagtgcctcacgcaggagctcgccgctcaggttaaggccgagaagcactcagcaaggtcgtgctttgacgaggatggatactgatcttcccctaggacgtcggggtttaacgaggataccgctttctctctggtgtgttcgattactccaccatctcactctcacagcgaaacgattggcatgtcgatacgctgtttccaaaacaattgggccctgtgtacctctccgccattctcgagtatctcaccgccgaggtgttggagctggctgggaacgctgctcgtgacaacaagaaccgtatcgtgttgtgccacatctagctggcggtgcggaacgacgaggagctgagggttcgaaggaagtagcagtgttttttgttcctagagggaggaagagatggcaaagggggaggtgccggcgatcgggattgacctgggaacaatgtactcgtgtgtcggcgtgtggcagcacaaccgcgtcaagatcatcaccaacgaccaggggaaccacaccacgccgtcctacgtcgccttcaccgacaccgagcggctcatcggcgatgccgccaagaaccaggtcgccatgaaccccaccaacaccgtatttgatttgagtaggatcggatggattaacgattaggtggatgcgagctgatttgtggaattcgtcgaactatgtctctggtgccttcatgtaatcctttttgaacttcctaatagtaactgcagtaagagttttttttcgatcagatttgcaatcagtagtttccattgtcgcccctggtatagccattatatatctgctttgatggattgcacattttttgaactgaatttctactggaacgctgtccttcagaaattgtcactgtcagcttgggtagtaatttcacactgcagtattcgaaaatataccttacctgatcattgaaaatataccttagctgatatgccatattgaactgtgttagactccttgctgacagatgtcgctcttcctggatgcatgcagacgcaaagcgattgattttatagcaaacaactacaaaatcgtggtagaagttgaattgcttctgtttctgtgggaacagtaaacactgaggtaattccagtggcatagcttcgatgctatgtatgactttctgaagaaaaactgggagatcacaagatgggt

SEQ ID NO: 38937 - DNA, 486 bp, Zea Mays
gcaccttacgattgggagaatagtgcctcagttgatgatccacgcaattccgatgttcgccgccgggaagtcgggaggcaccgcccacacctgtcgtgtggagaatatgggaggaagcgttgatttttcggtggacggctcagattgaatgtgtgttccccttcgcaggtttgatctgagcggttggatccgatctgatggccctggtgggatcacgactatttaaaatatgggtcgtagatctcagaacgtacggttctgattagatcatgtgtaacgtttcggccaggatctatgttgatcgtagatttttgatcgggtggttgtaagctcatgttgctcaagatccattttggaaggtaggatcgggatccattgacccagactgcgtaccgattcataaccacgccgctctaatctgggccactaatatctgatcggttggctcacaacaaaagttaccctttcggtctagtaaaattgtta

SEQ ID NO: 38938 - DNA, 2271 bp, Zea Mays
agattcgtcactgcggctatactgaaactgggtcaagcaatcttggatatcatcttgagctggaaagcaagaagaaacatgtctcttgttgttaagctacgatacatcttgaagttactatcagctgcttcttgggttgtgattttgcctgtaacttatgcatacacttggaagaatccaactggtcttgcaagagcaattaaaagttggcttggtgatggtcagaatcagccatcattatacattttggcagttgtgatttatttggcaccaaacttgctgtccgctacactatttcttttccctgtaattaggagagctcttgagagatcaaatcttaaagtcgtaacattcataatgtggtggtcgcagcctcgcttatttgttggaagaggaatgcatgagggcgcattctcccttttcaagtatacaatgttctgggtcttgcttttggccactaaattggttgtgagcttctatgtggagatcaaaccacttgtgcagccaacaaaagatataatgaaggagccaatacgaacatttaagtggcatgagtttttcccccatgcaaataacaacattggtgttgtcattgcgctttgggctcctattattcttgtctatttcatggatactcaaatttggtatgcaattttctcaacgctaattggtggtgtctatggggcttgtcgccgtcttggtgagataaggacattggggatgttgagatctcggttcgaatccctgcctaaggctttcaatcaatgcttgattccatctgacacaagcaaaaggagaggattccgggctgctttctccaaaccttctaagacatctgaggataccagagaacaagaaaaaatagccgcaagatttgctcagatttggaatttaattatcacaagcttccgtgaggaagatttgatagacgacagagagaaggacttgttacttgttccatactgcaaagatcgtgatatggatataatccaatggccaccattcctgcttgccagcaagattccaatagcattggatatggccgcagatagtggtggaaaagatcgtgatctaaagaagaggatgaaatcggatccatattttacttatgctatcaaggaatgctatgcttctttcaaaaacatcatatatgaactagtgatcgattcacgagagagaggttacatacaaaagatcttcgatgcggtggatgagcacatagcagaagagactttgataaaggagctgaacatgagtaaccttcctaccctaagcaagaagttcattgagctgcttgacttactggaaagtaacaacaaagaagatcatgatcagatcatcatattgttccaagacatgcttgaagtggttacaagggacataatggttgaccagctcagcgaactactggaattgatacatggtgcaaataataaaagatctgaaggaatgacatcacttgaccaacaagatcagttgttcacgaaagctattgattttcctgtaaagaaaacccaagcatggaatgaaaagataaaaaggcttcgacttttactcacggtgaaggaatcggctatggatgtccctacaaacctggatgctaggaggaggatatctttctttgctaattctctttttatgtcgatgccagatgctccaaaagtgcggcaaatgttgcccttctctgtcttgactccttattataaagaagatgttcttttctcttcacaagcactagcagaacagaatgaggacggagtttccatccttttttatttgcaaaaaatctacccagatgaatggaaaaattttcttgaaagggtgcattgtgagagtgaagatcaactccacgagactgagcattctgaagagcagcttcgcctttgggcatcataccggggacaaactttgacaagaactgtaagagggatgatgtactacagacaagctttagtccttcaggcttcccttgatatggccagagatgatgaccttatggagggttttagagcagctgacctgttatctgaatctgatgaatcaccactattgactcaatgcaaagctatagctgatatgaaattcacatatgttgtatcatgccagcaatacggtattcagaaacgttctggtgatccacatgcacaggatattctgagattgatgaccacttaacaaagtaatcgaggttgaggtggaggcggttgaagtcgtggagggagcagccactgctacccgaaggcgggcagttcaggtggacgatctttctca

SEQ ID NO: 38939 - DNA, 319 bp, Zea Mays
tacctggttcctgttcacggccgcaaatggcatgacgagccgtcgcgtgtggacaccgtcgtcctgtctaacgagtgtgggcaaccgcgggtcgccatgtcggccacagcgcgacacgactcatcgtgaatggatctggcagagcacgacatgggccctgagctttgtccattgttgctcttgttggacccagagctgatatgatgctcctgacattggtgtgtgtgcactcaccgtcgtaagaaacccctcggtgaagccctttgatggagccgcacacggcttacacgcatgcagcgccggcgagagggcccgtgag

SEQ ID NO: 38940 - DNA, 1868 bp, Zea Mays
agatatgcttatctttttggtagagctgaaagcgatggaatataactttgacctgtaaaatgaggccagttttttgcgggaaccttgactatgatgttcgcatctctgaggtcgagcgccttttcgggaagtatggaagggtggaacgagtggatctgaagacaggaatatcatggagcatatgtgctcttcctggttgatggactggttctacctttactgcctctgcctgagcccccacctcatgcctggtccatctccaggagttcactgtccaccacggcatctgtgcacatggaaacgaccacctcgtgaccgatgtcttacttttacgatcaacactgcatcctcgtaccctgcctgatcaccattccttcgccaatccaaccatgccaatctcatgtctggctggagagtggagataagtggaggttgcaccaccaattccttgatgtaccatgaatgtttggattgttgtattctgaaatcatttagttcaacatatacaaggtctgttcctgtttattctagcatatctgactgtagatttgcgaggcggccttagaaaaatttcctgcaaaggctgcatctcgattcatgttgttgccctttctgttcccgggaccatactatgatttctttgaacaatcagtcacttctcttttcaccttgtgttcaacatgaagggtttgcattcatctacatggaagacgaacgtgacgctgaagatgctatcagtagacttgatggaattgattttggcagaaaaggaaggagaatcaaagttgagtggaccaaggaggatcgcactgctgatcgaagaggcaactcaaggaggtctccaaccaatgcaaaaccgaccaaaaccttgttcgtgatcaactttgacccgatcaacacgagaattcgagatctggagaggcactttgataaatatggcagggtcgcgaatgtaaggatcaaaaagaacttcgcctttatacagtttgaggcgcaggaggatgctactagagcattggagggtgctaatgggagccatttcatggacagggtcatctcagttgagtatgcgctccgtgacgacgatgaaaaaggtgaaagggcgacgaacggatacagcccagacaggagaggccgcgaaagatccccaggtgcaagacggtctcctagtccttacggcagaggtcgggagagaggtagcccagactatgggagaggcaaggagaggggcagcccagactacggcaggggaggccgcagccctgataatggcaggggaggccgcccagccggcggtggcggcggcggcagaggtgatcacgccaggggaggaggacgacgacgcagccctgactattatgaccgcgagcgccgagaagctagtcctggctatgacaggccccccagctgctcacctggaactgggagggacgcgagagactagaaaagcgccccatgcctgtgttgtagaattcaagcatcaaagcctcccgcgtcagatgaagttagagttggtgatgttagccagcaggaaactcgtttacttatgtgcgttagctcgtgctgactttgcaagttagcttaccatttcccatttgcgactccagaatgtaactcgtatggtctggaatggtagctttcaggactcgtttgaacctttcttggagtttttttcttcttttccggctaccttgattgccctgtgcatgcgctgatgaatctacagattgtttcgtctgtcaagtgttccgctgtaatgtaagagacgaaattatttgttccttgttgatgtagtccctgttttgtgcagcgagaaatttcagtatcttacgctcagtatgcgcgcctctccagatctgacacctaat

SEQ ID NO: 38941 - DNA, 4284 bp, Zea Mays
acacctctctaggggtcttgtaggttgaaactactgttgactcgtgacttcttgagtcatgggggtcatgaggaaaccgatgacttgctgcacaagcgccgcccactgggtgtactccagattgggttcccctgatgaattgtcacatttcctgctcagtttgctagagtcattgccatcacttgctatacatggttttgttcttccactagctctgcaatggatatcgccaatgcttaaaagggactcaaattcggttttgtatgctatggctgttcgattactctgcaagatatgggctgtaaccgactgggcatttccaaacttacaagtggttctggatcctgagaatttttccaatttcatctctgacagagagatctctgcaagtattgccacatcaatacgcgatgtttgcaagcaaaatccagatagaggcgttgatataatattatctgtctctttttgtattgagagtcgtgattctgtggttcaagctcttggcctcgagagcctctcgtacctttgtgaagcagatgtggtcgatttctacacggcgtggaaagttatatcaaagcaggtgcttgattattacgttgagcctgctgttgctcacagtttgtgtattctgttgaggtgcggagcgatggatgctgaggcatattctgtaatatctggtaaccttgtaagaacattgtggagaattggaacatccaagaaaaataatcccgatccactctgggataaagcaagaggaactgcttttcactccttgtccaactacaaggtatcacttattcaagatgctattcctgatttctggaaactaaactatgagttctttacgaacgaacataatctggcagttctcaaggccatggagcaccttcaagatgagatcatcagatatgagcacataaatcgtcgtcgagtgactactgacaaaagaactgcagtgcataaatttgagaagctactggaggtttttcctcgggcggtatttaaagggatgttatctcatcatcagttgcctggtgctgctcttttaactctcaattttactccaaaggacatacttaatgaagggaaacctaaggatttgcctagagttcattccgcttttgagcaagcttttgtggaaattgctgaatctatgtatgtgtcaagaaacatagtggtagctcttcttgccttgcagtcatggaagtcatttgtttccaactggatgcaagcagttgtggcattgcttgacactaaagactcgtcaaagttgaacaaagcaatgaaagctgctaatgatatatttaagattctgtgcgaccaagttccggtgtctactcctcaagttgttgttaacatagctcttgttattggggcactggccttgattgttccgccaactgctcatttggtagtatcttcggtatcagattttcttttaaaatggttgcttcaatacgagcatgagcacaagcaatggttatctcaaaaactgaaagctgtcttgtaaaaggagcttgtggactggcattaggctatgtttgccacggtcttttgacaagagcacataatgctgttgattcagaagtagaggctattacacaactcaatgagcgtgcatcagttgaggatattcttcatgctttggttaccttgttaattcaactatgtccatcctcatgctattctctgaagaagcttagtatatacggaatatcctccatgggagggatggaagaaaatattcatagcttcagtgatgatccttgggctgtcgctggacttgtcattggtctgggaaactctgttgttgctctgtatagacttggagcttatgaagcagttactgaagtcaaggatgtattgatatcatggataccaaatgttgattcgaactctgcattatttgatgaaatagattcagtatcactatgtatgggttcatgtcttgctcttccatctgttgtggctttttgccaaagagtggagctgttgaatgacgacttggatgcattgttcaatcgctacacttctttagcttctgagctcctgaacctcaataaatctgggattatctttcagaatttgttaatggcaatctgtattggtgctggatcttttctctcttctatattgaatgatggcgtgcatgctatggaatttaatggtgttaaaggctttctggacactctcagacatatatatacccacccttttcctccccttgttcatttgggaggcatgtttggtgtggtcaacgcttttggtgcaggtgcaggagatcttactggggtgttttcaaagcctatgacttctcaaatcaaacatgaggtttccttcatacatcttaacacttaatgttctgtaaaattgttagaataatctatttagttgtgtgcacaggagtcatcttttgtgagtggttcattactgacaagtcctgttggtgagactctgtcaacatcaatgattcaggaaatatttcttcttgctaaggatgctaaggataagcacatacaagattatgctgcatgggctatttcatttctcagaagcaggtggtcgaagaatcagaatcagattctttatgaggacaatggttctaatagaagtcctgatgatcatgatcaagcttcaagtttttctgaacaaagcttagtttggaacttaagtctctggttgagtgatctaaaatttgaaaagtctggtgatgtggtgccaataagtacagttggaacagttttaaaatgcctttccaaagctccccgattgccaactacagactggggagctattgtacggaggtgcattaaagctgaggcgcagatttctcataagttaaccaatcaggaagatcctaagatactaaaggaggcatgcttatatttgactctagctcatgctgctcacataagtccccttctgcagtttttggatgatctgactgacatactcagattccagagattagatataaatgttcagtctattttgctcaaacatttgttacacctaatgaagctattctctgattcaagattggataaattgcatgaggattttaccgaatacttgtattcccccacttcttcatacttgaattactcatctgaacagaaaagcatgctaagaatgtcgttctgggaaggcatttatacgtgcctggtggatgtttctgaagaatctggtgttttttcattcattgaaaaatgcattcagtgcttgttgcctcttttgacgctccatagtgatggtcaacctgaattcatgaaagagtggtctgttgctatcttatgtcttacaaacgcccagaaaaaatggctggatgatattttgcaggttctcaacatcatagatctgttctttatgaaccattctccgtgaataatttatttcagtatttttttcattgtacgtttcacagttctatgttaacctttcctttcagattcgcagtactgccttagtcaatgaaggacatgttgatgttgcaaaaaagattatcctcagagcaagattgtgtgcaactggttgtggttcaacacatgagctgggaaatataaagacagcaatattgtgtacaaaagctgatggtgtttggtggagtgtccttgttgagatcacttcagccttaaactcagccgaaaacatcatcaaaagacagtggcttctggatgcattagacattggctgtgttacagctcacccctcaacggtgctgtgttttgttggcttgctttgtggtagctgctgcatctatatgccgcttcttcttgttaattcgataaatgtactgagcgacttgccggtcaccctgcctgcctttctctccaccatcgtttctgatgatttcaggaactctgtggcagacaggctatggctgttgactactgacatctatacttgggctgaacaattagctcacggacacgatcaacctggacatgatcgtattcatagaagtgaaactgagattgcgacttttttggccaatattctgctctctacatgcattacagtcgaggactacctgtctgttgataagcggctaaagcttgcaaatcttgaagcactctaatcaaagggagatgtgtttcttttctattttatgacaacatttctctaattgtgttccattagtacgatacagggtgtctcagcgttcagagtcaagatcggaattgaacttgcttacgcttctgttgaagaaaattgtcattgtgaagtgcagcgcggatcccaatttgtggtactccagctcttttataatccagctgctgtaga

SEQ ID NO: 38942 - DNA, 2890 bp, Zea Mays
gcggtggcgccgaggcggaggatgcatcgccggggtgggagccttgctgcgagcctgcgacagaggagacagcgttggcgatggcgtccacagtggcgggagcttcctggaagtggatggatgagagcgcaggaagttgaaaggccgattgcgcaaagcagaacagatctcaacgtcgtgatctgccacgcatcaagcttggggaggatgagcacgtcactgaagaaattgtactgagctccttgaggtcggctctggaccagttctcttcactgcaagccagcgatgggcactggcctggtgatttcagcgggattatgttcatcatgcctggtttgatatttgccttgtatgtcactggatcactgaatgttgtcatatcaccagaacatcggcatgagatttgccgctacatctacaaccaccagaacgaagatggtggatggggcacacttatcctgggttcgagcaccatgtttggcacatgctcaaactacatcaccttgaggcttctcggtgaggagccatacgccaacaacagtgtgttggctaaagggcgtgcttggattctatcccatggtggtgcaaccttgattcctcagtggggaaaaatatggctttcggtacttggattgtttgattggtcaggaaataatccaattttccctgaactatggtccattccccagtttcttccatttcatccagggaaattctggtgctttgcccgtatggtatatctaccaatggcttatctttatggcaagaaatttgttggaccaattacaccaactatattggcactaagagaggaaatctatgacactccttatggaaagattgactggagtgatgctcgtagtaaatgcgcaaaggaggacctcatctgtccacgcacactgttgcagaatgttatttggacttcactttataggtgtgtggaaccagtattgagcagttggcctatcaacaagctgagagagagagctctgggaaacatcatggagcatatccattatgaagatgagaacacacaatacctatgcatatgtcctgtgaataaggctctaaacatggtctgctgctgggtagaagatccaaattcagatgcattcaagcgtcaccttgcaaggataccagacttcttgtggatttcagaagatggcatgaaggcacaggtatatgatggctgccagagctgggagacatcattcataattcaagcattttgcgctacagatcttgttaatgactatggttcaactcttcagagagcctatgagtttatgaaaaattcacaggtcatgaggaaccatcctggtgaccaacgttattggcatcgccatagatcgaagggttcatggacactttcatctgcagacaatggatgggctgtatctgacactacaggagaagcacttaaggctgtactgttgctgtcaaagatctcaaacaaaaacaaccttgttggggatccaatagaaagagaaaggttgcatgacgctattgattgccttctatcttttgcgaacaaagatggcaccttttctacatatgagtgcaaaagaacttattcttggttagagattctaagtccttgtgagactttcccaaacattgttgtcgattacccttacccagaatgcacttcatcagtgctccaagctctgatattgttcaaagacttatatcctggttaccgcacagaagagatagaagcattagttagaagtgcagcaacgtttattgagaccaaacaacaagaagacggttcatggttaggtaattggggtatatgtttcacctacggggccttcttttcgattaaaggtttagtcgcttctggaagaacgtacaagaacagcccttgcatacggaaagcatgccacttcatattgtcgaagcagctcagtactggtggatggggagaaagtcatatcgctattgaaactcaggtgtatgtaaatctcaaaggtgaccgtgctcacgctgtgaataccgcctgggcaatgctcgctttaatttatgctggacagtttgaacgagatccaacgccattacatcgtgctgcaaaggaattgatcaacatgcaactggagacaggagagtttcctcagcaagagcatgtaggatgcttcaactgcagcctctacttcaattacccaagctaccgcaacttgttccccatctgggctctcggtgagtaccatcgtggccttcgtgcaaagaaagacaattgagtccgtgtgtgtatatatatagtacgtatagcattgtgaggaataaaacaggttgcgtcggtggtgagtgcgcaaaaacaagatgtgcttttatgtaggtgtaccacagtgtacaatgttggtcgttgttagactgtaaggctatcatgacgtgtatattgtaatatatatactacgtgattggtgtcctgtatggtcacggccatactcgctgcgtgcgtagagcgcatgattggcttcctgcgcgcgtagaagctaggctgccacgcgccggtgcgatgtaggatattttttcattcatttgctgcatccatggagaagccagggagggacgtttcccacgggccaggatggcgcgcgcctggcgacggtgagcgcgcgaaccaatcacacgttatagtgttccatatgtttcaaattatataagacgttttatcttctctaatgaacgagcagtctcctttcccaaaatatgttggtgagcataccaaattcagagcacgtggtacgctaaatcgcgatcatacgccagttcatcatcttcgtgtggagtgcagctgggaccatcacacaggtcgaacgttccatattacagtacatatatatccctttgttctactcttgtttagacatgttcagttaacatctcc

SEQ ID NO: 38943 - DNA, 2324 bp, Zea Mays
ctcgccatcatcctgcacgccaccagcgtaccaacccgaagacgaacacgcgcacacgccgcactcgaacacacactcgacgcaatgcaacgcagcgcagcgttgtcacaatgtcacgccaggacaaatccagcgctccctgaagcagagaaagaccgcgaccaaaagcaagttcgatctccgctcctccagtctccaccgcccgccaaccccgagatatacctcccttcctctcgaagcttcgtctccagagtccagacgacgtcgccggctcttcactcggcgctggtgctggtggttgccagtggcggtggctgggtggccgggtggcggtgttgctgggatgcccgccgcgacggcgaccgccgcccgcctccgactgccgctgccaaaagcagcccaccgctcgccctgctcgagccggcgcctctccaattgccaccgccactgacgagcgaccacacgcttggcgcccgccatggacgccttgtcccgccccgctgttgtcatcgacaacggcaccgggtacacgaagatggggttcgcggggaacgtggagccctgcttcatcacccccactgtcgtcgccgtcaacgattccttttccggttcaggccagccggcggcgaggggcgcccctgccagggggaactggctcgctcagcacagtgccggcgtcatggctgacctcgacttctacatcggccaggaggcgctggcccgatcccgcgccagcagctcgcacagcttgagctatcccatccgcaacggccaggtggaaaattgggattctatggagaggttttggcaacagtgcatcttcaattacctccggtgcgacccagaagatcattattttcttctaactgagagccctctgactgcccctgagatccgggagtataccggggagatcatgttcgagacgttcaatgtgcccggcctctatattgctgtccaacctgtccttgctctagctgctgggtacactacaaccaagtgtgaaatgacaggtgttgtagttgatgtgggtgatggggctacccacatcgttccagttgctgatggttatgtcattgggagcagtatcagatctattccaattacaggcaaggatgttacccaatttattcatcaacttctaaaggaaagaggtgagaacattccaccagaagaatcttttgatgtagcaaggaggatcaaagaaatgtactgttatacttcttcagacgttgtgaaggaattcaataaacatgacagggaaccatcaaagtatgttaaacactggacgggcatcaaaccaaaaactggtgcgaaatacacatgtgacattggatacgagcggttcctggggcctgagatcttcttcaacccagagatgtataacaatgacttcaccactcccttgcaagttgttatcgacaggtgcatccaatcatccccaattgacacaaggagggctctttataagaatattgtcttgtctggaggctcgactatgtttaaagatttccataggaggttacagcgggacctcaaaaagatagtggatgcacgggtccgtgcatctaatagtcggcttcttagtggagatgctaaggcccagcctatagaagtgaatgtggtcagtcatcctattcagagatatgcggtatggtttggtggatctgtgcttgcttcaactgccgaattctacgaggcttgccgcacaaaagcagagtatgaagagtacggtgcgagcatctgccgatcgaaccctgttttcaaagggatgtactgactcagcctatcatagtcctgttctcaagggtatatatgtatttaaaccgagatctgttccctgtggctgacgtcgtgaatggcgtccactcaagcgtaaatggggagatctgacagcggaaacggactgccaagagggatcctggagaatcctagccgtaggagctgtacaaaagtaaagtgcaaatataggttcattttttatcatacaatttagatgctggtaggcctgacgggatgggtttgccacctctgctgaactgggtggcattgtaatttgtagcgtcaacattggtgcttgtatacatgtagggatggcgttgggggggggggggggggcggcggttgggtcgtggttccgttaccccaaaccaattctccatcgtgccttgttgggacaggagagaattagggggattaagggtatgtttggtttgctatctaatttgtcacactttgtctaacttttctgtctaagattagttctttaattaaactactaaacttagataaaatgtgacatagttagctataatctaaacatg

SEQ ID NO: 38944 - DNA, 2456 bp, Zea Mays
ccaaccaaactgacctacccggaaaacgagccccccgactcccgcctgccgccgccgctctgccagccaaacccaaactaaaaccctcgccgacggcgcgcctgttgttaaaccctagaaaaaccagcggcgacaggagtggccgcaaccccgccgccggagggggctccacgaccagatagaagagggagagaggatggggatcttcgagccgttccgtgcgatcggctacatcacggcgagcggcgtgcccttctccgtgcagcgcctcagcaccgagaccttcgtcaccgtcagcgtcggcaaggctttccaagtctataactgtgctaagctgaatttggttcttgctggaccccaattgcccaagaagatccgtgctattgcatcctacaaggattatacatttgctgcttatggaagtgatattgcagttttcaaaaggactgaccaggtggctacttggagtagacatgaagaaaaggtcaacatgctatacctatttggagaatatgttctaagcgcagatgctaaaggtaatgtattcatgtgggccttcagaggagcagaaccaaacactgaaccagttggaagcatatcattgggagacaagttcaccccaacatgtatcatgcatcctgatacttatctgaataagttgctgtcggatgttctgatgggtcagttcatgttcataatgtaagatatgatgaagaattgatgtctttcaaccaccagattcgtggtgctgtgactgcactgtcatttcgaacagatgggcaaccccttctggcttctggaggttcttcaggcgttatcagcatatggaatcttgagaagagacggctgcattctgtgattagggaggcccatgatggttcaatagtttcacttcacttttttgcgaatgaacctattctgatgagttcagctgctgacaattcagtcaaaatgtggatatttgatagtaatgatggaggtgctcgtctgttacgatttcgaagtggtcacagtgcaccacctaggtgcataagattctatggcaatggaaaatgcatattatctgctggccaagatcgtgcatttcgccttttctcagttatccaggatcaacaaagtagagagctttctcagaggcatgttgcaaaaagagcaaaaaagctaagagtaaaggaggaagagatcaagctaaaaccagttgttacatttgactgtgctgagatacgtgcacgtgactggtgtaatgttgtcacatgccacatggatactccacaggcatatgtatggcgtcttcagaactttgttattggtgaacatgttttgacaccatcatcaagcactgtgacaccaattaaggcttgtgtgataagtgcatgtggtaattttactatcttgggcactgaaggtggttggattgaaaaatttaaccttcaatcagggtttagtcgtggtagttacattgacacctcgttggcaatgcaatgtgcacatgatggtgaagttgttggattagcttgcgatgccagaaatggctttttgattagtgctggataccaaggtgatattaaggcatgggattttaaaacttgcaagctgaaatctagattggatgttggtaaatctgttactaaaatcgcatttcaccggccaaatggtcttcttgctacggtagcaggtgatatggtactcatattgtttgatacggtgtccatgaaaatggttcgtagatttgaaggacatacagaccgtatcactgatttgtgcttcagtgaggatggaaaatggctcatctcgtctagcatggatgggactcttaggatttgggacatcagtttagcaaggcagatagatgcaatgcatgttgatgtatctataacatctatctctatgtctcctaatatggatgtgttggcaaccactcatgttgatcaaaatggtgtctacctctgggttaatcaatctttattctcggtctcaacaaatactgaaaattatgccagtggtaaacatgtacggaatgtgtgtttgccagctgtttcatcaacagagagatctgaggaagaacaagttcagaatttaggagagtcatataagtccagtattaaaccttttgtcataacggatcatcaaataccgaatctagttaccctctccttacttccaaagagtcaatggcaaagtttgactaatcttgacattataaaggttcgcaataaaccaattgagccacctaagaaacctgagaaggcaccattcttcttgccttcagttccatccctttctggggagatattgtttgagcctcctgccagctcaaaagatacagacatcagtaccacgaagaatacaaatcataagatgtctgaactctcctctcatttcagtcagcagttgcaattttgtggtgaaacaaagaacttgcatctgacacttatcgaccgccacatcagttaccg

SEQ ID NO: 38945 - DNA, 984 bp, Zea Mays
aggcaaagcattcgtcccaccttgccaagggaacaagcactagtgcccaggttgctcagatatgatgaaccaatctctcttcttggttggagaaatcgggggcaatgactacaacggacctcttctttctggagttcccatggagaaaatccgtgccatcactccgagtgttgttgcaaaaatttcttctacaatcagcgaattgattcggctaggagccaagactcttgtggttccaggaaacctcccaattggatgcatcccagactatctgatgatattcaagagcaataaggaagaggattatgaaccacagacaggttgtcttaggtggatgaacgagttctcacagtatcacaacaaggttcttgtggagcagctcaagaagcttcgcaagcttcatcctggagcaaccatcatctatgctgattactatggagctgctatggaaattttcctttcccctgaacaatatgggatcgaatatcccctagtggcttgctgtggtggagaaggaccctacggtgtgtccccatctacaggctgtggattcggagaatataagctgtgcgataatccagagaagtatggatcatgggatggcttccatccatcagaatctgcatacagggccattgctatgggcctgctactaggttcctacacaaggccgtcgatcacttccaccaccacttcatgtccacagcttatggagctcggctcttctgctgaatacaaacccctctacgacctgtagtaattttgtaattatattttattgtgtgtactccctcgcccagttctatcagtaccattttgtaagtatttgtactttgtaacttgtaactaataacttatcaaactagctactacatatttgttagagtgcacggttactcggttagattcagattcgtttgaaactgaaaatgcggaagtataaacaaatagaagaaaatacataagtgagaccaataccgaggc

SEQ ID NO: 38946 - DNA, 2336 bp, Zea Mays
cctccgcctcgtttttaccgcataaagattcgaaagccctcctctctcgctttcgtctccacgcctagggtttctctgcctcgccggggaagcgatgcagccgctgcaccaaccgccgatgaacgggcaacacggcccgcctcctccgcagggatccggggttcccacggcttcgcagcagcaggcgccaccgccgtcgtactaccagcagcagcagcagcagcagcaggggccaccgcctcagtactaccagcagggtcccccacagccgtgggcgcagcagcaacagtacgctccaccgccgccgcagtacccgcctcagatgcagcagtacgctccaccaccgcagcagtacgcccctccgccgcagcagcagtacgccgctccgccgcagcagcagtacgccgctccgccgccgcagtacgcgcctccgccgccgcagtacgcgcctccgccgcagcagtacgcgcagccgccgcagtacgcgcagccaccgcagtatgggacaacgccgggaagcggtgaggtcaggaccctgtggattggagatcttcagtactggatggacgagaactatctccactacaacgccttcgcgcctgtggcccagcagattgcctctgtgaaaattatacggaacaagcagactgggcactcagaaggttatggttttattgagttttactctcaagccgctgcagaacatactctgatgaacttcaatgggcagatgatgccgaatattgagatggcttttaagctgaattgggcttctgctagcactggggataagcgtggagataatggttctgaccatgcaatatttgttggtgatttggcccctgatgttacggactccatgttggaagatgtgttcagagctaactatccttcagttagaggagctaaagttgttgttgataggatcactggacggcctaaaggatatgggttcgtgcattttggagatctgaatgagcaggcacgtgctatgaccgagatgaatggaatgatgttatctacaaggaaaatgaggattggggctgcagctagcaagaagaatacagatgctcagcagacatatgcaactaatggatgccatgccatctgcatttagggcctggaaatgtcttcagatgtctcctgtaacctgtgactcggttaggtgcataccagagttctcaaggcaattgttcagagaatgatcccaacaatacaacagtctttgtgggtgggttagattccaatgtagacgaggagtatctaaggcaaatttttactccgtacggagaaatttcctatgtgaagattcctgtaggcaagcattgtggatttgttcaatttaccagcaggtcatgtgctgaggaagccatccaaatgctgaatgggagtcagattggtggacagaaagctcggctttcatggggccgtagtactcaaaacagacaggcttctcagcatgatgccaacagccagtataatgggaacaactattatcgataccaacagccgggtaatgaaggttatagctatggtgcacccaatgcacaagacccaagcattcaaaactactatggataccctggttatggtaactatgagcagcagtcaacacaggaacagcagcagcagcagcctccaccagcacaggagcagcctccaccggcaccacagtaacaatcatcgtggtgacgattgcttgggcacttctggaatgctatcagattagagggactacagtcagagcagtgccgtgccgaatgagacgtcctgaagatatggagggcatatagtcgcatgggtgttcttgggccggtgttaatctacgatgacactcctgatgtctcttttgtttgtcattgagatcttgacggctgaagtatgcaccgttgaaattgatgtattcgtcgtcgtcggattgtttatttgctcggaaccattttttgcactttacatctgggacgccaaccacgactcattccgcacctaccgttggcccaccagcccgtagtagatgtacgtaggggtggtggcaatggatcaagatctaaatggttcttcataaaatggttggactataaataaattttagttaaaaataaatagaaatatagcttgattttaatttgatcgtatccttaaattttatagtgtaaaatttagagcttattgtcagttatagctgtatctggttcggttcctttgaaactgtggcatggaatagtttctagcaagattttttgaaactgtgacatggaatggtttctagccagattgtttgtgtattttttgtaagccttgatcagttagaactattcctgagtggaattcaggac

SEQ ID NO: 38947 - DNA, 818 bp, Zea Mays
gtttcgtgcccccaaccaacccctatccgccccccgtcttttcccttttctctaccctctatctacccaccgttcccgtctctccgccgcttccttggaagacgaagaaaccctcctccaccaccaacccgatccagctacatccgttgagggccaggagcagctagccgtcttcgttcgatccgttcgcaccccccaacgcggcaggaaggagcgtgatggccaagacgagctcgttcaagctggagcaccccctcgagaagaggcaatctgaggctaaccgtatcagagagaagtaccctgacagaattccagtgattgttgagaaggctgagaggagtgatattcctgacatcgacaagaaaaagtacctcgtccctgcagatcttacagtcgggcaattcgtgtatgttgttaggaagagaatcaagctcagtgctgagaaggctatcttcatatttgtgaaaaacacccttccaccaacagctgctctgatgtcttcaatctatgaagagaacaaggacgaggatgggttcctctacatgacttacagtggtgagaacaccttcggactgctctagatggcccgcaatggggtcgccttgcccttgcccatgcctcctgtaaataagacctgccaagcaactgtgtatattctggtttcgtcgtcgcaagtggttgcgctctactgctaaagcctacctatcagttgtggagttgtcgtcgatgttatggacacacttaatcaagtttattaattgactggacctgaatcttgggtcagtaatgtgacatctcctatgtcgtttacggttact

SEQ ID NO: 38948 - DNA, 5134 bp, Zea Mays
tgaagattgtgcctatatcgattgttctagttttgaggcaaataacatcccacggtctatccgttacctatccatttccatgcaagatcattgtgctcagaatttcgaggaacaaatgggaaaactgaaagaaaagatatacattaacaatttgcggagtttgatgatatttggaaaatacattatgttacatctgctcaatattttaagggacacatttaaggaaataagacgtcttcgtgttctatctatattcatatactcccatagttccttgccaaacaacttttcagagcttcttcatctccgctacttaaaacttttgtcaccttattactcagaaatgtcattgccaaacacggtctcaaggttttatcacctgaaatttctagatcttgaacaatggggaagtgatcgttctttgcctaaggacattagccgccttgaaaatctatgccattttgttgtttcggaaaagattgattccaatgttcctgaggtggggaaaatgatcttcttacaagaattgaaagaattccatgttaataaagagagtgttggatttgagctacaagaattgggtaaactagatgagcttggagggaagctcaatatatacgggcttgaaaatgtgagaaccaagaaagaagctaaagaggccaagctgatgtcaaagaggaatttagttgagttgggattaatttggaacatgaaacaagagtccaccgaagatgatatcctagatagtatccaaccacactctaatgttaggagtctttttattgtaaatcatggtggtaccctcggtcctagttggttgtgcagcagcgacaccatatacatgaaaaacttggagactctacatctagagagcgtatcgtgggctaaccttccacctattgggcagttctatcacttaagagagctaaggctgagtaaaattgttggcatatcacagattggacctggcttcttcgatagcacgacagaaaaaagtgtctcacacttgaaggcagttgagtttaatgatatgccagagcttgtcgagtgggttgggggagctaactggaatctgttctcaggaattgaaagaatcaagtgtactaattgtcctaggctgacagggttgctggtttcagattggtctatttcttctatataagacagcactgtatggttccctaatcttcatgacctttacatttatgaatgcccgaagttgtgccttccacccttgcctcacacttcaaaggtatcccgtattcatatgggagacttttcttatgaaggtcgtaccatgttgaaaattaataacccctctagatttgccttcgaaaatctgggtgacctagagacattggtagcttgggatgcactacccttgtcctttatggatcttaaaaagctacattccttgagacgtataaatgtcactagatgtgaggaaacatttttgagaggactggatgatggtgttgtgctacccacagtccaatctctctaccttggacgatttacacctaccaaaaattatttgtcaaaattattcaaatgttttccagcactttcttctttgcatgtgatggcatcaccatcagatgaggacaacgaggaagtggtactgcattttccaccctctagctcgctgagagatgtcaacttcacagggtgtaagaatctgatcctacccatggaggaaggagctggattctgtggcctctcgtcgctcgagtcagtgaccatacacaaatgtgacaggttattctctcgatggtccatcggaggacgagcaactcagactcagagcatcatcaaccctctcccaccctacctgaggaaactcttcctttcttatatggaaactctgcctcaggaagctctgctcatgaatttgacatctcttgagaaactcacactatgtaattgtcttggctgtgagcaaagcaccgagcgaatggctgtactcgcgaatctaacatctcttaccacgctatatttatataattgcagaaatatcacaatggatggattcaatcctcacatcacatccagcctcaagtatctatgcgtgtacaatgagagaaatgatggaactgatccgtattctgtagcagcagatctacttgtagcggtggtgaggaccaaaacaatgcccgacgtttccttcaaactggtgggactttatgtggacaacatctcgggagtgcttgttgctcccatctgcaagctgctctccgctaccctcgagacgttaaacttcagtaatgattggcggacagagaacttcacgaaagagcaggacgaggcgcttcagctcctcacgtctctccaattccttgagttttataactgcagggctctgcagtccctcccccaaggactgcaccgccttccttctctccacggaataactatctatgggcctcaaaacattagatcactgcctaaggagggcctccccgattcactacgaatactacgtataactaactgttgtgctgagatttatgaggcatgccagcaattgaagggaacaaggccagatataaatgtacttgcctccaaagctcgtgtgcaaaattgaatacctgcttctgcatgtcttcacagtcagctctgcttcaacatgcctttcactctacaggtaaatactgtgaaaacatcttcctatacgtgagatagttgatcttcatcgattctacagccaggatgatgtcttattggatgatgtgttggtcatggttggcacaaaattcagtagactatgcttcatcgtaatgttgcacagcgttcaaggcaataaacgagaacaagcatgggatgtggaaaattttagaaagtaaagacaagtgaattcttgacgacgttggcttggcaccttagtttgagtacataatgaaagaacaaccttttagcaaccctggagcatctagaaaatatcagtcatgtaactatcgttaatcatttgaaaaccactggaagacaggagatgtagcaccacaagccattcctttgatcatttgaaaaccattgcggctctttctgattatatcaaccagaagggctcacaattgtggataataaggcatccagtattatagaggaaacaaaggaaattcaaattagacggaaacctgctagtccaagttcttatatgccaaattcatcagtagatacacatacactctacaccctaatcttctttgttatgacatttattgtttttttcatgaactacgtacatcttaattttcaattcatctagaatactgaataggtgatgattcatcaccaaattgataagtgaatattaatacatctgaaacctaaaattaaatatatattatataagttgttgttaatgttcattccatttttgaacacttgcatgaattttagttctctgtttcttttgaaaaattctgtgttgcaaaaatataaatttatatgaaaatatattatatggtgatgagaagtttgagtttagtatatggtttcatattagctatacattgttggtactatcggcttgttctctttttgtttgaaaaaaatactatcggcttgttcttaaggacacataaaggactagttcggaagcaagagaattagaggagagatggctaaaatccccttcctaattaaataggaagggaatttgagcaccctcaatcccctctaattcccttgctttcaaactagcccaaagagtgtcactgcatcctctgaattatgatatattgaacatggtgttataattgtgaaccgatgagtataacttattttctccatattctgaacaacccattacttaaacagatttgcatcctactggagacattgctggcagaggaattgagactggcataggagaactcaatatatgcttgtgaataacgcatccagtgaaagatagtagattttcatcaattcactacccaggatgttgtcgcattggatgagaatgacatggaagacggcgaactagaggaagacaacaacctcatctaagctgaaaatgtgttgcctgtggttgaagaaaatctagcagatgaacaacactgccttccctgtcctctctagacctgaatctctctgatggtttggattcgtccatgattgatcctgtacgatgaaggatcagctcgtccaacgtttttcaaggaacgaactcaatctgaggaattaccttttcattggtcacctggggtactacgaggaatgacttcacgatagacgactcggttttgcgacgcaaaccaaacgccatggttaggctcagatgttggatcagatgattcctcgtggcttcgtgacgcaaaccaaacgacatggctaggctcagatgttggatcgtatgatttctcgtggcttcgtgacgcaaaccaaacagcctgtaagtccgcacaccttatctatcatggtcattgttgagctgatcagtaattggagtcgtgtgataagcttaatggacctcctatttgtcgtgatcttcacagatcaacaagtgagcggcctttgcatgctgcatgagatcaagcaagccgccgactggcaatgctccacctgccattcagttcgttggtgaggtattaatcaccagccatgttggcacttggcggcatgcagatggagcagaacatccaggtgaagcggacagatacatgatcgatcatgagttggcgcagacacaggccagacaaccagaggctatattccaattcatacattccatgataagcaaaggaagatccaagacaacacaaatatacaaatagttagttatacaagcaaaaatcctgttgttttgtgcctcccattttctagtccagaattaatatgacaatttttcactgaaactggttggatcagagaccaggaaaaaaagggaaatgacaactacagctgtgttttttttttcaaagaaggcagctgcccgtcgatgatgtgctcacttgaggatttcctctgccttttcagtgacactgcttcatccttttcagagtcaaatgaatctctacctcatttcactgcacatacttccaaactgatttgctgtaacatacttgagtttcggtatgacattaatttttaactcataagagaacaaaatcagaagaaaaaaaaacaacaa

SEQ ID NO: 38949 - DNA, 475 bp, Zea Mays
gaggaaggatggcttctacctgcaagaatattttcattgggagcatggcgggatcttactgcaaagttccctataatgctcttttcatcctaaggaacacaaaacaatcctaaggatggaagtacttaaatcgagacttgggctaggaacaggtgatgctccaccgaggttaattaaggattggatgcgtatgtaggcctgtatgatcaaggactaccttaactggccacatgccctagatatgggacagggtaagcttgaacccggctattccatacgtgaaaagacaaccgcgcactgggcgtgggagatggtgggagtagcgtgtaccctcctggctagaggctggacggaggagtattgtgctcccgggtagcgcggaccggttcacgttgtggaggatctgtgggaacggttgacatatgcaagggttaagtgctacatatgtcgtgtggttagagatcctcaactgagt

SEQ ID NO: 38950 - DNA, 639 bp, Zea Mays
gggccctccatgtcatattccatcttcaacttttgccatggtctgctcacaagcgaatcgtttgcagcagccgccgcaggatgccatcgaggtcgcgattttctcttgtcgccacctcggcttgcacagctcgccccgacgcctggcctcctcgcctccccgccctctcgcatccgaaaactgtcgcgtctttcccttctcccactcccgcgcggcaatttctcttcgtgcagataacgctcgccattgatggcaatttcggttcctgattcttcacagattcaattcagcgcatcaattaaccatcaaggagcactaattcgtctttatattcctcccttcttctacctataaatactgccaccgagctccttgcttcacctgctgctccgcatacgcctcgtgcccctgttcgctggccgcgcgaagccaccgccgacgctgctgttcgccgacgctaggacgccccggtcgactgccgccgttggtgactgccccaacaagcccctcggccgcgcctctgtcgattgtcctgctgacgttcttctccgccgccgtagccggtgccccgaacgatcaacgcccttcatttttcccctacagttcgtcacgttgcagtcgtcacgttgcagctcgtca

SEQ ID NO: 38951 - DNA, 1678 bp, Zea Mays
cccggaggtccccccaatgtcggacggacgacgggttcacccacaccccctgctggcggatcccccccctcgcctgcctgcccgcgcgccaagaactccattcacctccccccacactgccaggagcttcgcccggcccccgggtgccggacggccaccaggttcacccgtgcctgctgccggcggattcccccctcccccggtggctaggagctccatctgtgttgtcgtcgtgtgctgctgggcgtctcccccaatggcgttacagcatgggcattagagaactctatgacggatggggagctactctggcgcgcgtcgttcaccccggcggtacctattctgacgcgtatggaaggttgccttcatgttcctcacgcaagggcaggtgccgctcagggggtgcctcactactacatctacgtccacgcgctatcggccaatttcaccttcgaatcaatcttctcccaacgccaaatacctagtaagattgagtatactgcaatagagacaatgaaggcagatgggtttttgcagactcagactcaagtttgattgattgctatttgctaccaacaaaaaataggtctcgacaagaaagttttattgtacttcagatttgtatatatgatcaacatctctgtgtgcagtatgcttgagaatagctttaaggctgagtaacaaggttcatcatttttaatgcagcaacaccaatgagccccttctcagcacaatgacattgtttacatacaaagtacgtcaaaaggcaacgtctaagtaatatgttgatacacaaagcactgatccttagagacttcatccaacgagatagaaggttacatgtgcgttgttactatctcacgccaactcagacctctactggataacgttgcacaccatgcgactagacagacactaaatttgggtacctctacaaagcacttaatttattgtgcctctttcgaaaaaggccagttgcgagcaacatatgggttgttctcgtgaaggaagttgaacacctcgtccaacagctgcaacagaaaagctcaaggtcaaatttcaaaaaaaggacgatgaccaatatagaagttatcttaacaatgacagactgtcatcaccacctaaaaagtatgtggcacaaagcacatataggatcaaggctagccaacttcacaaacttcaatcagattttactgaccctgaaaacgataaccattagatcgttgtgaattacatgaagaacgtgggcatgagcgtgcgcaatacactagtgttgggaccatgcttcgtcgccgaaggtcctgcaaaaagaaacagcttcggctgaagctgcttgaacatgatgccgaagacaccgttcacgaagcttcggagctacaacatatccgaagacgaagggtcgaaccgacttaaagatagaatgaccatttagcccataagggtctgagtcattgttgtaaacttttatgaggggcataattgtaattcctcatgagttgtgtcctgtgcctataaatagtgaacagtattcctttactgttcacggattcctgtaattgccaacgcatcactcgggaattattgtttgtcaaggcaaaggtataaatgtacctaaacattgtgttcagatattcaaaattcatttaacaagatatgtgaatgatgtcgtttattttca

SEQ ID NO: 38952 - DNA, 2475 bp, Zea Mays
agataacgtcttcggcgagtccagttcaccgtccctccctgtccttgccatggccatccccaccgcccccgccctcctcttcccctccgttctccctaactcattcccccgccggacaccctggcgacacctcgtccggcggcaaccgcgtcacctccgcgcgggccgcccgcgcctgcaggcgccggcgccggctcctcccccggtggcggaggtcgcggcggagcgggacgacacgcctccgctcaggctgctcgagccgccgcaggaggacgaccccttcccgcccgagatggagcccgcggaccctgatttctaccggataggatatgcgcggatgatgcgcgcctatgggatcgagttcctcgaaggccccgacgggatgggcgtctacgcttcccgggacgtggagccacttcgcagagctagactggacgtccatcaccacaccagttagtgtttggatgcagcacctgtgaatctgtgattgggtgggaaactcacatgagaataactggtcaaggacgttgttcgtgtgtagtaactgttagattatatttacactatatttagtaggtagtatacattaccactggaagtcaatggcttatgttaattgcctaattgttatttgctacatacttgctgtcaccaaaaaatatggcatctatagttataacacatgtttgctcgcagtcgcattaagctcacgaaatgccagacccatgtgttgaattcttcatcttgatgcatgctatagacctgtagtacgatggtcttgttcaaaagaattatatgatattcttggcatgctgaaactgtttgtataacatatttggttcttttcgttcgcaatgatgagcaatgttattgaaagatgtgctgatgttgctttcttttccaggtgattatggagattccgttggagctgatgctgactataactcaaaagaaaccttggatgtttttccctgacattattccactaggccatcctatatttgatgttatcgagtcaacagatccagagacagattgggatctaagattagcatgtcttcttctatatgcatttgatatagaagacaacttttggcagttatattctgattttttgccaagtgttgatgaatgcactagtttgctgctggcaccaaaggaagatctaatggaactagaagatgaagatcttgcttcacaaatgttaaaacaccaggaacgagcaattgacttttggcaaaagcattgggacaaaccaattcctctaaagctgaaacgccttgcacgtgaccatgagagatttctctgggcactgagtatagtacagtctcgttctgtcaacttgaagttgagaatgggagccttcatccaagatgcaaatgtgctagctccttatgctgatatgttgaaccactcacccaatgctaattgcttcctgcattggcgttttaaagaccgtatgcttgaagttatgattaaggctggacaagctatcaagaaaggagacgagatgacgatagattatatgagtggcgtcaacagcaaatttatggaaagatatgggttctcatcaccaacgaatccttgggagctcataaatttctcgagtcctgcaacaattcacatggattccttcttatcggtcttcaatatcgctggcttgcatgatgagctgtaccacaattctgcattgacctcagtagtagaaaccgactttgtggacggagcagtcgtagcagcagccagagcattgccgacatggtcagatggtgatgttcctgcaattcctagtgtggagagaaaatctgctcaggcactgcaagaggagtgccgccaaatgttggattcattcccaactaccatcgaacaagaccagcagatcctagattccgatgcgcatatcagcaaaacccgagaaattgcgatcaagtatcgtctgcaccggaagatgctcctacagaaaatcatggacgcactggacatatatcaggatagaattctgttctagctgtagaggcggcgctacctgtgctcatttagagcacagaacgagtgcccagttctactgctagtaaacctggggccattgtagaaaggggattttgtagggcagcctttcagttcatagcgtctgtaggttaacagcagaggatcccagaaggaaatcaacattaggataggctggttgccaggaaatatagctgctgtaagttcaagtcagcaagctgccatgtaacttgtttgcacagggcggcaatctgtcatagccacctgcatatctctcaggctcagcttcacaacaacttgcactgctgaaagaaatggcctgtgggctgtgtcctgtcacctgtgtgtgtgaaatactatccatatgattggttggccgcatcgctttgtcctgaaccactgtatgcattgattttagctgagcgcatgtttggatgcctgcacgtcgaaggcgtgggctgcacgagc

SEQ ID NO: 38953 - DNA, 299 bp, Zea Mays
attttaaaaaaacatcctcatatttctttataaactaacatgcggttctctttttcatctatccgtagtacgtacgcacacaacaggcttcgctcagccatgcggcatccctggtgtctcgtccattgggtttatcgtttcccaacgactgcacgaaccctccacgcacaacgcggggtctactccagactcatcgtgctctgacgccccacgatctcccaacagtagcgagaaacctccacgcacaacacggagtctatcgtgaacccaacgcacgcggaccgtccggtgaaatccag

SEQ ID NO: 38954 - DNA, 826 bp, Zea Mays
gttcagtgggaaataagtttctataatacatttatgcacccaggacctgagatctagaaggacacaacaggcaaggtggatgtattcgtagttgattatatgttaaaagcaaattttggatgacattggtggagattgcttatctctaagacacatctactcattctttgaatggaaatcacatccacgttctagaaagtctatttttacttcaaaaattattacattgtggtgttcggcttcttcagtcaagcagcaatcatgcaacatgccttactgtagttttttatcactgcacatgttgctggacaaatttatggactggaggattatagaggactaacaagtgctactgggagattctcgagcaccattgaactaagagattccaaatagttctttggagtctattgttgatgttggcggggataatctagcagagatttgtcagattttttgtgcaacacggaggctacatgaggcagcaacgatcccattcttctcgcatgccactttacacaagctaaggatagcttctggtctcactcatggttgtggcagggaaagccgagtcagtagggtttgtcatgtagctggagttatctcagaccacatattagatgcagtgatgatgttaatggaggatgtttacatttaccgtgcaagcaagatgacttatattatgccttaggacaataagtattgttttcactctaatgaaatacttggtaaaaagttgtctctgtagttgtatatttgactgtgaatatttgaacccactgttacaattgttgctaattgaggtcagatttcagaggccaaataa

SEQ ID NO: 38955 - DNA, 2178 bp, Zea Mays
ctattttatactgttcgtagagtgaaatttggtaaaattagtacaggagaggagtgagggagaaaaagaaaagaaacctaacatctgatgtggagacaaacccctcgccaaacctccattcacggaccacattaacgttagttattattagcctattatagaggaggattacagctcatcattggtgagtggaaaaacgattaggaaagcaggagaaggggagtggcggagtgcatagcaattagcaacatcatccagcggacagcattcctaaccctcctttctatctcacccgtttcttctctgcaagtagtactatttctccgtcatactgaagctctgctgtgtgtgcgcgcgcgcgttggaggaaggaggaagaagtgctggtgacgtgttggaagataaccctgttgggaggctcaaggtttacgtgtatgatctccccagtaaatacaacaagaagctggtgaagaaggatcctaggtgcctgaaccacatgtttgctgctgagatcttcatgcaccggttcctgttgtcaagtgctgtccgaacatttaatcctgaagaagcagattggttctacactcccgtatacgccacatgtgatctgactccttcgggtcttccccttcccttcaaatctccacgcatgatgcgcagcgcaattgagctgattgccacgaactggccttactggaacagatcagagggtgcagatcatttctttgtcacgccacatgactttggtgcttgcttccattatcaggaagagaaagcaatcgggcggggaatccttcccttgcttcagcgtgctacactggttcagacctttggacagaagaaccatgtctgcctgaagggcgggtccatcacaatcccaccatttgcacctccccagaaaatgcaggctcaccttatccccttggacacccctcggtctatcttcgtgtacttccgtggtctgttctacgacaccagcaacgatcctgagggtggttactatgcgagaggtgctcgtgcatcagtctgggagaacttcaagaacaacccgctcttcgacatctcgactgatcacccaccgacttactacgaagacatgcagcgttcagtgttctgcctgtgccccttgggctgggctccatggagccccaggctggtggaagctgtggttttcggctgcatcccggtgatcatcgccgacgacattgtcctgccctttgcggacgccatcccgtgggaggagattggtgtgtttgtcgccgaggaggatgtcccgaagctggacagcatcctgacgtccatcccaacagatgttatactgaggaagcagcgtctcctcgcgaacccggccatgaagcaggccatgctgttcccccagcctgctcaggcgggagatgcattccaccagatcctaaacgggctcgcgcgcaagctcccacatggtgacaacgtcttcttgaagcccggggagagggtcctgaactggaccgccggaccgccaggcgacctgaagccttggtagcatctgcctgcctagaacctttttgtgaaaaaaagcaagaacgagaacatggtgatatacatacatgcgcctttaagttaccatggttgtgtacttgtatagtgctgcattttggtatgttcttctttccctgtagttgttataccatatatcttcatttatccctctcttcttttctgccctttctcactagggtatgagaatgtcagccttgtcaatcatgcggataccatagtcgaaatctacaccattttactcactctgaatgttcactgccggacagccctcctgatcgagctgacaattgccatatatacagcacatggaccgccatctttcatcatctaatgcaaagggtagcatgtcgctgcagtctttgtctgaatgttgctgagttctcaaggaactgacgcgagcacataatcaacatcagcacgttcctttttttattttgtggcccaggaggtgtacgagctaacaatttgaaatggccaggttgtaggagctgtatttttttatatgttctgtctttaaaaaaaatctcagtttttttgggtataaaacttaggatcggagcatgatggtggcagtgtggaggtgtggcagactgaccaaaaactggaacttgcaaaacagtattttctgaaataaaattg

SEQ ID NO: 38956 - DNA, 3039 bp, Zea Mays
tggcggctgaaagcctgcaaccaaacaggccccctcgattagcgaaaaaaagcccagcgaaaactaaaaccctcgcatctttcctttcctccccaactgcggccgcctccacccgctccaccgccgatggccgagcctgagcctctgccgcaggtgtcgtctgaacctaccactccgccgcaggaaggcagcggaaggactaagacaaagaacaagaagaatcgttccaagaagcaaccgaagcgagccggcgctgacaccgacgggttatcctcaggcgccagcaccatggttgaggaccctttcttcgtcctcgccggcggaaaggaaggagggtttctggatttggaggagatcgatgaggcagacttcggcatcttcggaggcgtcttggatgacgtaggacagagcgtcgaggaagctgggaaggatcatgggaagaagaagaagaaaacaaagaagcggaagcgtgggggtgatggcgagggcttcagtggcgacgctgcgttggtagttgagaatgaccaggtggatgtcgagaaagtggagaaaaaggtcgaggatggggagaaaggggataagaaggggaagagaaagatgaacatgaagaagaggaaggtgaaggataatgagatgaacagggagagtgatgaggatgttgctagtgacaaagcagaagacatgcaagatgacactgagaatatggaacaaaatgaggacgatgagctgattttgggcgaagatgatgtctctgcatggagggagcttaggctgcaccctctgcttctcaaggcgatgcgcagacttggattcaaagagccaacacctatacaaaagtcttgctttcctgctgcagctcatcgaggcaagagacaggttccggaaagacacttgcttttggcctcccagttttgcaacgtctccttgaagagcgagaaaaggccacaagattgcagcaggaagatgaaaaaatggaggaacgttcttgtggaagccctcttcgtgctcttattctgacacccactagggagctcgccaaacaggtatgcgatcatctaaaagatgtggccaagttcttaggaatccatgttgttccaattgttggtggtctatcaatggaaaaacaagagagacttttgaaaaaaaagcctgaaattgttgttggaactcctggaagattgtgggaacacatgtcgatgaacaatcaacacctagttgagctgcactcattgtcattcttcatcttggatgaggctgatagaatgatcgaacgaggccatttccgtgaattacaatctatcattgagatgcttccactgaccaatggttctgatgaacaagctgcaagaacaatgccaaactgtgagactgtaccaattttgcaaataaagaagcggcaaacctttgtgttctcagccacacttgcactctcatctaattttcggaagaagttgaagcgtggcctatctacttcgaaggcatcgacgcctgatgatgtcagctctattgaagcattgtcaaaacaagctggaatgaaatctaatgctgaaatagttgatttgacaaaggcttcaatcttgcctgagaagcttgaagaatcttttattgagtgcagtgaagaggataaggatgcctatctgtattatatattgagtgttcatggtcaaggtcgcacaataatattttgtacatcaatcgccgcattacgtcacatttcttccatactgcgcattcttggaattaatgtattgacaaaccatgctcaaatgcaacaaagagctcgcatgaaggctgtggatcgcttccgtgaaagtgaaaattccattttggtcgcaactgatggttttgcaaggggtatggattttgatgatgtgcgaacagttatccattatcagttgccacattcaactgatgtctatatccacagaagtggaaggacagcacgcaagtcattggctggctgcagcattgcgttaatctctcctactgacaagtccagactctcacttgctcggcagattgacaagattgcccgtaaaacttcacaggaaaatgctaacaaatcctggcttcaaaggaatgctgaatctatgggattgattttggatactagtgacagtgaagaagaccatgtgcagggacacaagaaacgaaaggctacttctgcacatctccaaaagcttcaacaggagttgagtgatctcttgcaatgcccattgcagcctaagactttctctcgccgctatttggctggggctggtgtctcacccttacttcagaagcaactagaagagttggccaagagaaatgcaagcaacaatagcagcaagagtaagaataaaggatctgggtttgttgttattggtcaggatcgtgtcgagcccttgcaagcacttcaaaattctgggcaagaggtctgtgtgaacatagacaaagaaagggaaaagcgaagagtcgctgagaactggaggcggaagaagcatgaagaaaagaaacgtacacaagagcagaagcgaaaggataagagaaaagctaaagagatggcttgatgacacatgagatagctaggggccttcaaggggtttacggaagctctttaagctcgcgtcaatcctttcagaaaggaaaggaatgcattcatcaatgttttgctgtaatacaatgcgtgcgctaagttagcgcttgcctttaacagattggaggtggtagtttgattttgttttgcggctgaagaaaataaacttagaatgcacgagcactggctctggatgagaaaagaaattaagcagatagctcacgtataacctcattggatctgtaatatgtacgcctatcagatttaaggtacaaattaattttattagggatgggaatcgactgacctggcctatctttggacttggacctggcccattgccttaaggccaattttaggagtgatggagattatgatcttgctggctatcatgggtttggcctagatatttttctgctataatgcatggacatgaatcctatcaatatttctataaagtattg

SEQ ID NO: 38957 - DNA, 1910 bp, Zea Mays
  misc_feature (1909)..(1910): n is a, c, g, or t
gtcaatctggttccgctgctccttcctcggcaccgccgcctcgcaatccgctcccgcttcgcccgtaaaaccctagctaaaccctagccgaaagaaacaatgtctctcctcccctgagcgcgctcgtggccgccccttgttggccatggctctccagctccgccgcctcctcccgcacggatacgcccagcgacaccgcgccgtcatccacgcgctatcgctgctgccgccgccgcccgcaatgtaacaacagcaagagtgttactgatgctaagactgacactgccaagaggaagagttcaagaggaagcaaaaaggaagttgatggagatatgaaagaaaaggaagtacataccaataaaaagaggatatttgctagaactcgtaaagctgcaacaaagacgtctgataatattagcacgaaccaagaaaacaagaagactgataattgtaaattgaaaaggggtgctgatagtttcaaagagaaaaaagtaaataatagggcaaagtcaaaagcagaggtttctgctgcttcttctgtacctgaaatttgtatgcaatcctctattgatggttcagttattgagaaaaagccactggtgccattgtatcctcccagagccaaatcagttgtggttgtggaatcagccacaaaagcaaaagttattcagaagtaccttggggacatgtatgaagtgttaccaagctatggtcatgtgagagatttagcaggtagatctaaatctgtccgccccgatgatgacttcagcatggtctgggaggtgcctgctgctgcctggacacaccttaagagcattaaagttgcactgcaaagagcagaaaatttaattcttgcatctgatcctgaccgtgaaggtgaagcgattgcttggcacatcaaagaaatgcttgaacaacaaggtgtactgggttttgatgtgactgttgcaagagttgttttccatgaaatatctgaggatgcaataaagaaggctttaatgtccccgaggtatattgacatggacttagtcaatgcttatcttgcacgccgttcccttgattatctaattgggtttggcatatcaccacttctgtggaggaagttgcctggttgccaatcagctggacgggtccaatctgctgctttggcccttgtgtgcgatcgagaagctgaaatagaacagtttaaggcacatgagtactggacagtacagacagacttcaaaatacaatcagcagatccttcaaatgccacatgtattccattctgtataaagcatttgaattcaaaaaagctggatcaactttccataccctctcaagaagaagcgcaagctatagaaaagatgattcattcttctacatttgaagttttaggtgttaaaagaagtaaaattcacaagaatcctccattgccatatattacatccagccttcagcaggatgcagcaaacaaactccattttactgcaggatataccatgaagattgcccaaaacctttatgagggtatcaacctttcctcagaagaaacaactgggttaataacgtacataagaactgatgggttccatatttctgatggagctgtggaggacattcgttcactagttaaagaaagatatggtcagaagtacgtttcggaggacattaggaagtatttaaagaaggtgaaaaatgctcaagaagcccatgaagccattaggcccaccagtataaggaggccgccatcatcattggttggaatacttgatgatgattctctaaaactgtacactctaatatggaaaaggacaatggcttgccaaatggaagcttccagaactgagatgattcaagtggatgttggcattcctgaaggagagatgaattttcattccactgcatcaaaactggacttcaagggatnn

SEQ ID NO: 38958 - DNA, 1131 bp, Zea Mays
gttttttatggtcgtctttaatttgttgctcgcccgcttctcccagagagttcaaggtcgctggccttcctgtcgatgacagcagtttgggcccgggggatgaatatgagtttggactctatactcctaagctgcttgcagttactggagatgattatgtgtctaacccccgcatgccagacgaggatgagttcgaccatttctaccgtgttgtcgccaagaagactgacatgctgctcagctgccaccttccaaagccgcttgcagtttctgaagaggagaaggccgtgcaggagaagttcaaggagatggcgaacgaatgcatcgacctcctggttgatgcgatgcgccgcatcccagcggagaaaaggcgcccactgttctcggtgtttggtgagctgtacccggtatttgagtcagtgaggtggactgccgagggggggtgtgccaagtggtggatggcgctgcagatcatggagaagctggagatcgtgcgcaagatggtgtcgagcgcttgcggcggcacccctcttgacagaggcacggtgttcgccaggaaggtggacctcaccggtgtcgacggtcaggcgctcgccggccacggcctcgggagcaacttatcagttgaggacgttcatggcttcatgctgtttacgatgaatataatatgcttgcatgcatgttgtttcttaattttgggtgaaacgaacacaggtggtgatcttcgtgctgctccacaacgtcttcagcaacgtcaagtcggacatcgatggcatggtctctgcttccactccttattagccatcgtcacctagctacctacgtgtctacagatttgcagtcactagcctcaagtctccaagtgattggatctctgctacagtgctcttactactgccctagcgcaaatcttgatgtgtccgttctagctactactagtatctaccttggttatgttggatcatgcatgtgattgggttctgctagtactatggtttctgttctacccagtagatggctacttcactgtgttggatcagtcacattacatgatttctgataataatgatgcccttcaatccttctgtttttcgctgatgtttctacaaccatttattctggtaaaagaga

SEQ ID NO: 38959 - DNA, 1397 bp, Zea Mays
ctcctctctagctacgcacccacacagacacagtccaccactgctactccatggagacagcaggtcagacgacactccaggaaagcgctgtgcacgcccggaggcaggcggcgtgttggtggcctttggacaccacggcatgcagcagcttggacttggacgacgcgagcaccttcagcagcagcagcctcctccttggatgggaatgggatccacagctctgctgctttggtagtccccatgcccgagactctgagctcttcggccccacatgcatggagtctccggtgtccgaggcgtcagcagcggcggccaccggggagctggacgatgaactactactcatgagcctgtggggcgagtgccacctcttcagttcctgcagcgctctcaaggagaagacggccacctcttcccaacgtactcctaagagtttacaatctgatgatgatcatcattccgatctgccgacatccccggccaagactactccggcgacggcacaagcagcagagccttcgcactgcgacgtggacctacgggccagttacaccggcggcgcccagcagcagcagcagcagcagcaccgaaccactcgtgccgccaacagctcgtcgaagcgctcggcgaccgaaccagaagagaaaggagcagaaggcggcaagaggagccgcaaggcgccgggctccaccgcggtggcggcgtacccgttcgccgtggtgaagcccggcggcgcggacggcggggtgacgctcgccgacatcaaccggtggatcctcacgccgccggctcgccccgtccggcaccccgtgggggagttcgcgtgcgccccacgcgtgtcggctgccaaccggccggggccgtcgggcaggacggtggccggcttcaccaggctccgcaccgctggcagaggcacgataaccatcgtgaggacaagaggctaattaaatttggtgactgaagtgaaaactagtgactagctagctggttgtattgttcgtgccgacaagagcaaagtagatcgctgcagagggctttttcagaaactgggttgggtagtggttgtggttgtaccagcggacaagaaggctcgtactgagaaattgtacatttgtaccatttgggtagatggttgctgtctttatgcttcaacacctgaaagttcacgcaaccgtgcaagttacggcgctgtagatttaggctcaacaagacgtataacacctaatatgctttgcaatatgctttcatgtatgtctataaatatagattctctctgtaatttgtgttcttcggttgatagtggatctgtttactcgtggttgttcgctcctccatattggagggaattttccacgtaaatctttgtgtctattttatttcctaacaagtggtatcag

SEQ ID NO: 38960 - DNA, 2423 bp, Zea Mays
  misc_feature (2423)..(2423): n is a, c, g, or t
ctccggcctccatcctacccgccgtgctatataatccccacccggttgtcctctgtccggtttcctctcccgttcccctcttgccgcggcggtgtgccccaatcggccaatcctcctattctccccctcacctcctcaaccctactccgacaacagcgggcgctgggagcaaacgaaaactaaaacgagtgagatcgcggcgcccgattctgtcgcggtcgcgcgggtggccggattggattggatcctcggacccccgcgcgcgcgcggagggcaattcgggcacagatccccgcgattccgtcgccggaggcgggcatgagaggccggagggcatgcctgtggtggttcctggcgcaggacgagtgagccggtggcggcgggtggaggaggacctgttgctttgagcctgagaggtgcagtcgtcaaggaggaggaagaggcggcggcggcggcggcggcggcggcggcgggggtgggtaggtgatccgaggcccgaggcggccgtgccatgtctcgctgcttcccgtttccgccaccaggatatgccaagaccgcgcgccccgacggccagctagcctcgcacctgcagcagcagcagcagcttgacaaggagaaacaaaaggagaagaagcataagaaggacaagaaggacaaagttagaaaagaaggtaaagaaaagaaggacaaggacaggagtaaggataagcacaaagataagaaagaccgaaaagaaaaacacagagacaagaaaaaagacaagagcaaagataaaagcagggattcaggtgaaggaattgaaagaaatgacgaggctcaccatggtcagaaggttggagagagcagcaggagatccgaagaaattaaggatcttaaattcagggaggacttggtcagagacgtacaggatgagaaaggggcggcgagtcgacctagtgaaaattatggtgtttcaaatgatcgaaatcgcaaaggcttcagtgcttcacccgcgatggagactgaaaggtttgcgcttaataaagtgcatattcagtctagtaatgctccaaggaaaaatgagggactggtacaacagagcatcagtgccaatcgacaaaagaatgggacatcaatacggcattctgaaagcctcaccacttttgctcaaagaactgtgggtggctttccaccagcaccttcaacggaggaaaaattcaaagctgcaaggcctttatccaatactgaagctgcacccagaaaagaggggattggacagcgaatcagtaacattagcatattggttccaaagagaactgaaaacacaaacagagatgttgcgaagaaagaagttgggacctcctctccattgcctccaaatcctgctaatgctatgcataagggaaatgacaaggttggtaggccaatggagaacacacaagtacccatgcagagatttggcagcccatcgatgtcaactgcagcagtggggatggacagaggaacacctaggtcatccatcccaagcccgagcattacaatccggagaccgaatggaattgtacggccgcctaaaaacatttctgtctcttctaagaaacctgatgcaggagacgtttcacctgctattggtaaggaaaaggaacaaggtggaaggttgctgcaagcaaatatttcaactgatcagaaactggttatgtcaaaaccaccagctgtggagaaagctgcacacggaagtgctgaaaggacggagaaggtcagcagagatggggtgcctgatgttgccaagaaagaggacaaaaagagtgaccggcatgagaaaaagaaaaggaaagagaaagataaacacaaagagaggaaaaaggagaaagaggcaaagaaggagaaagagaagcataattacaaggagcatgataagacaagagagaacaatataagttatccggtagatagtcttaacttgaagccctcggcccctcctgtagccccaccagttgatggtggaaaatctgttgtgcccgatgagaacctgaagaagcgaaagaatcatgaaacgaatggttacctacaaattgccgagaccagccctccccatcaatcttgtggagaatggtacagcatctcatgtagccgcgccactctcttctgtgaagccagaagccattatcaataatattgaaaaggctgaaaggctgcacaaggaagagaagatgaatggcaaccaacaggctgagcgagcttcagtcgatccggtggctgcctatgagaatggcataacttctaggaagtcgcctcaccccgactgcaagtatcttagccagatatacagcgttcctgaagcacctcaaatgatggaattgcctgggcaggaaggtgaggactggctgttcgaccgaggtggcactaaatcaaggaagcccagttcagcggctgaggctgatgan

SEQ ID NO: 38961 - DNA, 4782 bp, Zea Mays
caagtatagtatatacgaggagtatattttcttagagatcgttaacctcatagtaatcgctccttttgcccaaaacctaaagggaagccaaagtgggagcaccaaaatactcgccgcgggtgcatagttgtttgtttagaaggagaagacgaggttaaggggagatgagcgagctggtgcgggcggcggctccggcagctgcggaggaggagaagaaggccgtcgcggctgtgactgtggtggcgaaaggaaaagagaaggcggaggtgacgccgaccgtggaggcctcatcggtcggcgacagggggaggttcgtggcctacccgtcgcgggtggcggagcacacggacgtggtggcggacgccgcgcgcttcagggcggcgctcgaggggctgcacacgcacatgggcaccaggctcaacctaccccaacttgcttgggacaaaatgctatgttgttgttatttaaatatggaagtgagaacacagaaaagggacaaatggagtattgaacaaccaggatgtcatatgtcagcaaaagaactgtggagtattgaacaatgaggatgtcttttgtcagcaaaagaactgatttgtcctacttggcttgctttgtgagattattgcagattgcaatacaatgtaaagtttatttggcttcaagcttagtgttgttttcattgaaatgtatggccatccgatttttttctctcgaacacgcaggagagctgcacatcatttaatttagagaagaaaaaggtccaaaatggaccaagatacaaagcctaaaaaggcaagataaaacacacccactcacaacctgccttgcaacaacgctgcagcctccactattactgagaaatcagcaggacaacaaaggccacagcgaaaaaactgcaggcagaccccactctccacaaacactacgccctgaccatattaagggcaacctctaggcctaaattctcaagatgtttagctccaaccttactccaacacgccaactcatctaaaaaaacacttcaaactgtgcttaaagtagggttatgtccattgaagactgccttgttacagtgaacccataggcaccaggcccccagaatgatgatgatgttcataccctttcgcttgcttctgtgcaccttcttacatattttctgcaaaggcgatctcatcactagacggagagaaattaccaaaccccaagggcgaaaggatggtatgccaaaattgtcttgcaaaaatgcatgtgcacaggagatgttggacggattcctgcacgtggtcacataatggacaagactccgggtgatccaaacctctcctttccagtctatcagaagtccaacatttattccatattgccagccaaaggaaatatttgcattttggaggagcccaagacttccacagcctcccctatggctcaaaggtaatggatcccatgaaaaaggccttgtaacatgacttggaagtgaactggtcagaggaggtatgcagccacacatgtctatcagcttcatgtgttaacaccactcttcttatagcatcccataaatgcaagaattgttgcaccccaatcaaagaaagaggggtctcgatgtcactgacccactgccggctttcaataagcctgagcacagttctagtgcaaagagcgctcttaccgaccttagaggcaactgcgggggcaatgtccttggcgcaaccaccatctatccgaccaaaataaagtattggtcccatttccaatcacaataataatcgatgatgcaaagaacttcctgacttgtttcggtataggaaagtttagcccatgccaaggtctgttagggtctgttttctccaaccacaaccatttagcttgcagtgcccagctctggaaatataagttaggaaccccaaatccaccaagctttagtggccttgtaatgatatcccaagagactacaatttcctccattcatgtcatttccccctttccataaaaatcctcttcgaatcttgtcaatcaacttaatcacccacttagggatatccatggcaatgaggagataaattaggatggctaacataacaaaccacaccatagtcgtccttccagcaagattaagcagtcgagcctttcaattaggaagtcgatctgcaatctttcaaaccaagccatggggtctatccttcttagttttttgtctgaaatcagaagccccaaataggagcaaggaaaagaagctgagctgcaatgtagaatgttgcagccctcctacacagcctgctcgctacaccttatcggaatggcacaactcttatgcatattagatacccaaccagaaactgagccaaaacaatccaagatcattttaacacaattcagatcttcctcaaaaggctgaataaaaaggaccacatcatcagcatagctggaaagtctgttccgaacattttctccctgcagactctgaagcagccccctattttcagccaacaaaaatagactgctgaggagtgaggacatcataatcaatataaacaacataggagatagaggatccccctgacgaagtcctctccgatgactgataagattaccaggagacccattcaaaagcacttgagtggaagaagaggccaacagatatgaaatcagattacaccaattaggtccaaaaccaaggtgagaaagcacctcaataagaaaagctcaatagatcgagtcaaaagctttcgaaatgtccaacaactttctggacacagaaaataccgcaactaagtttttgtttttttaaaaaatggcttgcatgttaggcaaagttacttaaagttgtctacctgaatagttaatactatgccatctaattttttttctggaatacgcaggagagctgcgcatctttgtattaatagaagaaaagaaaaggggggggggggggagaaccccaatacaacacacacaccactagagactaactacggatcaccgactaaaacatggaagaaacacgacccacaccgctgttttaagccagcaactcatcgacttggaggaaggacaaggccttggcaccagtcatggaccagagcaccgcctcttccctagccatcctaatggccatgaccaagttgggattacaaccatcaaaaacacacctattcctatgcttccaaatggtccaagcacctagaatcactaaagaattgcatctgagttgcattcataattttctttagttttattaattgccatgcttcatctggttcatttataacccttttttgggggtaagggtgccgatcattggagggaaagatttggatcttcatcagctatataaggaggtcacatcacggggcggtattgacaaggtgaaggcagagaatagatggagagaagtgactgcatcatttattttccctgccactgcgacaaatgcttcttttatgctgaagaaatactatatgtcactcttatatcattttgagcagctatacttctttagagtgcaaggctggcatcaacaagaaatagattccagaatgaattcttccattgaaattaaaaccgaaggccaagcttaccacaaaagaaaaaggggcatcaacacatcttcagatccagcttcgtcttcagataatgttgacgtagatgtgatagttgatggcaaatttgaacatggctacatagtgactgttattatgggatcgaaatccactaaagcaatcctctataattgcactgaagaacctgctttgccaactccggagccacctgttgcaaataacagcactggtttgaagggtgtacgtcgccgaagacgacgtaggaagaagctaagtacaacggatcccaggcaccccaaaccaaacaggagtggctataatttcttcttccaggatcaacatagaattcttaagccacaatatcctgcacaagacagactgatcagtaaaatgattggtgaacgatggaacaatctaagtcctgaagataaagctgtatatcagcaaagaggtgtagaggataaggagcgataccggacccagttggctgcttataaagaactgaggacaggccaacctatcagcaatgctgtgcctatccaacagaggctccctctgacagaagtgacgattgatgaagtagactccaaggtgagccaagatgatatgctgctgtcaaaccaagggtacagcagtagtgatgaaagtgaccattcaggagagaaaaatgtagaagacgagctcaacactgaaacatcccctgaggtgagcatggaaacaactggttctcctggacaccctgatccctctcgagatggggaccactttgagttgcggcggagagaaaaccccaaggcagatgagaaagataatgcaccacctgattcatgacttttcgctttgaatggtatgtattcgaagatccgaaagagaggaatttccaagaggtgacaagctacactacacatacatacctgttgtcgtaggaacataggctatatgctgatgtcaatcagagttctattagcagttggaatacacttcattttggtagttctgaatttgtattgctaaatttctttcgaattaaaagagagagggggggggggggagggggtactgggtaaattttccatccagggatgggtacttggtatattctttcgttcaatatttatcattacgttgatctatatgttgagtatgtgtaatgtcatgtcagcgaaaatccaaatctgcatatctaattgtagctatacatgcttagtttcatatattataaaag

SEQ ID NO: 38962 - DNA, 716 bp, Zea Mays
ttttctctatcaaatagttctaaatgtcttgtagcacaaattatagaaccaggtaaaaaagtttcactctttgagcttcttgggaatatttccattttttcctctttagcctttagtatgtaactatgcacactatcatttgatgctaatagctaaaaaactcagtacttttccatgccatttattggttcaacctcttaacccatatttgtgtagtaatatacaaggtgcaggtggaatcctcataatagatcctcttttccagtgagtacttgtgagtgagtgtagaagtcgaaaaatacctgtcatatttgatgaggtattttcaggattctggcgtcgtggtgtggagatcatatttgacaataccttttcagaggataaaaaggtattttctttgtattttataaccttgataacttctctttcaatctacttttgagttacttggttgtttacctgatatcgcttgctatgcaaaattgatgagtgagggaattgtaccattatctgcaaccttagcaacagaggaagtttttgaatccttcgaaagtgactctaagtttatggcgctcttacatgaccattcgtacactgctcatgctatgggctatattgcaacactaaaagctatggattcatattaggatcctattcaaaccttgatgccgaccacatgaaactcaagcaggaggcaactaatcaacaatgttcag

SEQ ID NO: 38963 - DNA, 4404 bp, Zea Mays
cgattttggtctgggaaagtattccctggtgccgactaggcgacgggaccaccaaaaaccactctcttgtgcgcgagcatcgttaaaattggccacgccgccgccgccggccggcgaggagccggtactgtctgcttgctcttcttttcaccgaaccaaaacgcccgccggaaagggtcaaaggggaaacagagatctcggtttgcagtgatgaagcttcgctgatgagctggcgcccgtccactcgcaacgacgctggacaaaagactagccgtcccgtcccgtcacggcccggcgacctggcaaggagaactgcagcgacagcgacagcgacctctggacaatcggctgtgacggtctttctcgtttgttttatagataggaaagaaataaagataagggttaaagctttctcgtagcctcctcagaacatacgggcgattgtcttttcgccggtgagccattaattccgtcgagctgatttcttcttgctggttttgccggttttatttttttcttttattggtaattcttggccgtggcgactgacgattccttttggcgcttgtaatagcacaagcatagctaaagtcgtcccgtttcctcctggtttcaatctgtttggaacttttgttagttccggtccatagggggaatcgtactatcctgtggtcaaaattgtcgcttctttcttttgtcgctctctctatacacaccaaaaagaaggaaaaaaaaccacgattttttctcccaactttgagtaattaccgagtgtttcttcaagtcggagctcggctctgtgcttagccgggaccctatacttggggttttggcgggtccatcggaatggtcagcgggaatctgctctaccggaggaagcgctcgtggcgtgccgatgagttcgtgagccggagcacgctgcaattgctcgactttgatgatggctcaccaccagagcatgcatggagaaggaaactaagtagtcatgctaatagattgaaggagttcaatgtcacattcagagaagcaattagaatgatgaaacttggtctccgactttggtcatacattcgggaagaagcttctcacggaaggaaagcaccaatcgatccattcactagagagggcaacaagccctcagcctcgcaaggagtacctcttggtgggatggggagtggtagtatttcaagaggctttaggggagaattcaagcattggcagataactcctggttcttgtgaaatgtcacctgtgatggccaatcaattttcgatctttgtcactcggggaggaaccaagaaatacgcttcagttttgtcgcctggtcaacttgatggtttgaagaaatctactgatgatggtatatcatcctgggactggaaattaaagggtgatcgttcaacgtatcatgctttgtttcctcgagcatggactgtttatgatggcgagccagatcctgaactgaaagtatcctgccgtcaaatatctccatttattccccatgattaccaggagagcagccttcctacctctgtttttgtatacactctagtgaatactggaaaggaaagagcaaaagttagcctattgatgacttgggcgaattctataggaggactttcacatcattctggggatcatgtaaatgagccattcgtagggaaaaatggagtttctggtgttcttctacatcacaagacagccaataataatcctcctgtaacatttgcaattgcggcatgtgaaaatcaaaatgtaaatgtcacagtattgcctgtttttgggctttctggagaaagttctgttactgctaggggaatgtggggcacaatggttcaggatggttcctttgatcaagataatctcaatactggtcctagcatgccttctttgctgggcgatacagtttgtgcagcagtttctgcttccacctgggttgaaccacatggaagatgtgcagttgtatttgcattggcttggtcttctcctcaggttaaatttaaaaaggggagtacatactacaggagatatacaaagttttatggaacttctccaagatcagcagtaaatttggtagaggacgctttgatgaggatgacacatgctgcgggagcaggacctcttcttgacagtggtgcgtgactggaattttcaagagcaggcctacgccaagcgctactacgacggctatcatcgcgacctcaagttcttcgttgacaattaggtgtggctgcgcttcctccattgccaagccgcctcccttgtggcccgtcccaacatcaagcccggccctcgctatgtcgggcccttctatgtcaaagagcgcatcggcgctgttgcaaaccacctgcagctgctcaagggtgctcgcatgatgttttccatgtcgtcctgctcaagttgtgccacaacgctcctgctcctcctttcggatctccaaaacttccactgcttgtcttcttgtaggccctgcacgccaatcttcgcctaagcgccggcccccatcccccgtacaacactcctacgatccctgcagtgcaggctctaacagattcactactgcttcctttaatttgtggtgtatttatttctctactagttactttcttacttgagaaaatttgcttattaatgtgactttcagagtataaacattgggaagaagagattgataagtggcagaccccggttctccaagatgagaggcttccagaatggtacaagattacactctttaatgagctgtacttcctagttgctggtggaaccgtttggattgatagtggatctttggtgtctgatgctgataacaagtcgaatccagaggaaagtaatttgtcacatgagatcgatgacaaagaaaatgttgggaaatttttgtaccttgaaggaatagaatacttcatgtggtgcacctatgatagctgttttgcgggaagataacagaagagtcagatttcttgctgatggtacctggggtattcgtaaagtaatcggtgctgtcgcccatgatcttggagcacatgatccttggcatgaattgaatgcttacaacatacatgacacaagtagatggaaagatcttaatcccaagttcgttcttcagatttacagggattttgctgcaacaggtgacaagtcatttggcaaggatgtctggcctgcagtctgtactgctatggaatacatggaacaattcgatcatgatggtgatggtatgattgaaaatgatggatttcctgatcaaacttacgatgcttggacagttcaaggagtaagtgcatattgtggttgcctctggcttgctgcccttcaagctgcggcagcactggccggaagccttggacatgatgactatgctgagaggtgcatgacaagatttgtgaaagctaaaactgtatttgaagccaggttatggaatggttcacacttcaattatgacagtggtacaagttatagtagccgttccatccaggcagatcagctggctggacaatggtatactgcatcgtcaggtttgcctcctctatttgatgaggataggataaaatgcacgcttcagaaaatatttgactacaatgtgatgagggtgaaaggaggacgtatgggagccgtgaatggtatgcatccaaatgggaaggtagatgaaacctgtatgcagtcaagagaaatctggacaggagtaacatatagtttagcagcaacgatgctgctccatggaatggagcatcaggccttcactactgcagaaggcatttatactgcaggatggtctgaagagggctatgggtactggttccaaactccagaagcatggacaattgatggccattacaggtcactaatttatatgcgcccccttgcaatctgggcaatgcagtgggccttgtcgcctccaaggtcgatactggaggcgccgaaggtaaatacaatggacagagctcacatttctccaggcaccttccaatttctccaggatagcgttagaaagatgacaccaaaaaacggttgttttggaaacactgtaattaacttggattgctgatgtgacggtagcacttgtatctcgcactgtccaatgtatgtttacggagcacctcatttagaaaatgttgagtgtgaaacgggtgctatattctgttcagcctttgcagttatgtggtgtacctctctgatgtaaattgcatctcacagtgggccggactttgtaaattgttgtacagaaaacgtacatatgataatgccgtgttaccctgatattcatgacaccgtttaccacaaaaatctgtacagtttattgttcatatagtattttagaacgagtacttgtcagattggcgtaagacaatgtcctcttagcgctgtactcttgatggtatatatagatgtacatgtgaatgattt

SEQ ID NO: 38964 - DNA, 1269 bp, Zea Mays
tccgccgccgccagatttcgttcgctcggatcctagaatttctccggaatgtttgatggaaggcattaaattttgtctagacttccatgaacgaagcctgcagctgagctgcattccgtagttcggtacagggcactagggtttagaggtgttcacttgtacgtgttggacaggacgtaaaagaggaaaaacaaacggcaacagcagaaattcctagtgaggtgaagctgaccgcctgacatgttagggcgagtctacatttcccgacgacgtcgccgccgacgaggaaggcaacgcctacgtgaccgacgccaagggaagcaagatctggaaggtcgggccggacggcgcgctgctcggcgtcatcaagaacgccacgttcgtgcagcggccgggcctgcgccacaacctcgtcggcctcaatggcattgtctaccaccctaacggctacctcctcgtcgtccacacctccggcggtgacttcttcaaggtcgacccgaagacagagaccgtgcgcgtcgtcaaggtgcgggggtcgctgaggcgaggggacggccttgagctgctctccccgacgaggctggttgtcgccggcctgccgaaccggctggtggagagctccgacgactgggagacggcgagtgtcaccgggcagtacgtcgggccggtccaccggatcgggtcgtcggctacggtgaaggacggggacgtgtacgtcaaccatattgtcgggttcgggctcggcaggaagaagacgcacgtccttgcaagggcggtgttctcgccgttggcagtgacgagttgacgggccggcgcctccgcgcgcgctccgtcgtgggatcaacagttgctttttgctaagcggcagttcatacttatggactagaactaataattagttgctaaaattagttgagatatttaaacaatctaggtaataattcaactactagctacttttcgcaaattagctatttgttaggtaactaattcgactaacaattttagtcaattaattattagatctagttcattcaaacaccccatagatgctcgtagtacttttgttcctacacttgacacgttgcccaaagatacaagattgtattgtttggtacatgcatggcggaggacccaataaaataccaatagtaaaataaatctctataccacactctattgttcctagccgactaggattacctccgcttagcttcacgagccttcgtcgtctacccaatcgccagctccacgtagggatggcaacag

SEQ ID NO: 38965 - DNA, 1528 bp, Zea Mays
cgcactcactctcatctccggccagccgagcgaagcagctccaccacggaaccaccagcctaggatgtaaatcgcgcgcaccacttagttctcgagaaagaaaatatcctgccgaccctggattcgatttttaccgccgctcagcttcgaacaaatccatcgccgctcaactctgagcataaaaatcccacgcgcgctgccggagctcgctcctgcgcatccatggcgcgcacccctctccttcctccgtgctccactgcgccgagccctccccagccgcgtccctagcgccctgtctctctctggcctccactgctacgtcaccggctcggtgctgctcgcccccaagcctgcggtctggctgagctcgccgtgaaactccctggtgccgcgactcctgtcgtggagcttccctgccgccccaactcggatctcccatgcccgtcgcgcgccctccttcttgctcggccggccatcctccagctagtcgccctgctcggagctccctctggcttcttcctctccctgctcgccatgggtggtcggatttttccccagcagccctgctctgctctcgctgccgaggcctctgcgcgaccgagcttcttccttgtccatgccgcgacgaccatctccatggccgcgcgtctttctccctcctgctctgttcgtcggccgcgtgagctcgctggtgatctcggtcccagctcgaagcttgttcctgttcgccggcctgcagctcggacccgcccccagccgcaccttccctgctcgaccgcgttcccccgcccagcgtcgcgctcagctcccagctcccgcgcgtctctctgctcggatttagcccagccgcgtcgcaccctcagcttgccgcgccgtcgcgttgctgctcgccctgcgcgctctgctcgtccaggagttgcccagcctctctgctcgccggtcgaattctttgcgtcgcgcgcatagcgtttcgttattcctgcgcgtgctgccgtgaagctacctgttcagttcgcctccgtcatgttgtcgtgcgcgcgaaactgctcgcagtcgatatcaagtccgtgatgcgcgtgctggacacagtaaacgttgtgtggactgttgtccgagcccgtccgaccgtgaccttgctttgcctctcgcgtcgctactcgccaagtccttccccagtccgagccataaaattcactcggacacgaccttgttgtcgttccatacgtcagcaagaaatcctaagaatcgggtgaagacgaagctggcagcgcgatattcctcaagcgctcgacaaattgtatggatcggaaaatcgctaccgatctcgcggattcgtgtgtgctgtggaaacggtgcgataattagtcacgtgatgcggaagatgactcaagtcgaccccaagcgcgggctactccgcatggtgatgctggtgaacgaacctgcctgatcaagtgctaggacaaggatgatcgtcaagtggacatcgtctaacaaacactaacctagtgtttcccaggcaagccctggt

SEQ ID NO: 38966 - DNA, 3733 bp, Zea Mays
cggtcgattgcggagctcggggcgattcatgtcaagaagatgctgcagcgggcggcgagcaacgcctactcgtggtggtgggcgagccacatccggaccacccagtccaaatggctcgacgcaaacctccagatatggagaatcgagtcaagatcatgctcaaactcctcggacaggaagccgattcctttggcaagagggccgagatgtactaccacaccaggccagaggtgataagccatgtggagcaagtctacagggcttacagagctctcgtcgaacgctatgaccacatatccaaggagctccataaggccaaccacaccatcgctactgcttgtccagaagaggtgcagtatgcaatgttagaagaggaggaccatgatttccccaaagcaatcacaccaatcaagacacacaagtccttggtccaagagattctcaacgcaaagagacaaggtccgtcagggtcaggatggaacaagccaccctcccatccacgcatgagcgccgaggaggcacaagaagagatcggcagacttcagaaatctatacttgttctgcaaaccgagaaagagtatgttaagagttcctatgagagtggtattgctcggtaccgggagatcgagaagcagattgcagatacacagaatgaaatctgccttattcaggatagatttgatgcacatgcagccatcggcgatgatgaagcccgtgccttgatgacaataacagctcttagatcctgtcagggaaccatagctgagcttgtacgtcattttgaggagttgatcaagcttgcagctgtggagttggaaaaaacaaagtctctacgagcacagctgtatgctatgatggatggcgacactgacacatgttcaagagaggcaagcagcacagacacgtcggtggtggcaagatcttacccagttaccaaggcaatacttgagttgcagcccatatatgagaaacttgacaagtttttttccagtgggtctgaatcctctgcggaggagatcgcagagaatgttgatgaacttgttgataaagtcatcaacttggagctcaagttcccaaaacagacagcacagatcaatcaactcatacaagagaatgaaaacctaaagaataaattggatgagttacaagacgagatggcacttcgtgatgaccaaagtgaattaaatgaacagatcaagcaattagaggatgagtttagcacagtccgagttcttgaaagatcaattcttgaggaagaagcctctgtcagcacaggcttttctgaagtttttagctgcataattaatatctcaaaggcacttggatcttttggccctgaagacctgcataatttgtcagctgcggtagaggatggtgcaatggttccaagagacgtgttcctggagcagtctgcagaagagagcaagggtggggacttcagagacatagaggcaccaactctaaggcatagtttgggccaagatagagaagatgtctcggaagtggttagtgataatggtaatgatggcatccatggctcaaggaatgctaatgaggaaataatccctgggagttgcttaatgcaacaagttaggtgagggcaatgttgatagctcatcaggaaaagtatttcagagttcatcagaaactgagaacggaagtagaaacttccctaatggtgaaattatgagaggtgaatatccattgggaatagtcggacagactcatctcctccactcaggtagtatggatcatttagacaggaaatatgactctaatgaagcttctcagtcattaatggaagtcgctgagggaaatattgatgatggaaattctttttccagcagtagtgtaatccaggaggaaggacttggagatagtaaatcacaaaataccagtgggcagattagtccaattgcttcctcagacttgtacaggttaaaggaatacgattccgtagaagaatcctcatttccaaaagctacttgtttcagtggtgctgataagaagagcctgcacatggggcatgcagatgaagcaaaatctgttgaagaatcgccacaccaagttgatcaactaaatgggccacaaaatattgaaagttcgaacgaatgcaaccaagttggattgcttaaagaggatgattgcatttcattagttcatgttgataatgtccatgatatgaagaacatatattcctcagaagtgagggatgaaacttctatctgtgcgccagctggagattatgagcaagttccgacgaattcagagaggaagacttcacatggcagagagcttgcaagcgaagcaactacctcgaacaaccatggaggaaggagtcagggtgtaaagtctggtttgatgggggaggactttgtacctagctggcaagaatttcttcctgatgggcttgaaggtaaagaagcaatactactagctgattgtacttcagttctgcggaactacaaagaaacaaagaggaggcttagcgaactggaaaggagaaaccaggagcatcttgaagagacaaaggcagttatacgggagttaaggaatgcaaattccatgaagtatgttgagatacggtcactaagggatctcctggattcctcagaggtgcctccaagtaaagcaggtggtaactcaaacggattcttaagtttgagatcttttagagaaattgacagatcaattgccactttgggtagagatatttctgccgtggaggaaaacagttctagtaacatcgagacacctaacaacacgtcacttcataaaatgacgaggttcagaaacgacattgacgctttggtggaggaaaatttgcagttcctggtaaggtatagcatggcttgctatcgcatgcaggagtttgacagaaggtaccaggaggcacaggacgaaatggaagataataagtctagagaaccagatactccagcagagcccggacctgctgagaagaagttgagagagctccgaactgaactggatgtatggtttgagcagagcgcgcttctcgatcaagaagtgcagcttaaatctgcgtctctttgcagaatgcaagaggagatagcggaagccctgcgtggtagcctggagatggacagagccaggtttacaccatatgaagctgccaagtttcaaggcgaggtcctaaacatgcagcaatctaccagcaagattgagggcgagatgcaggcagcatcagaacacatgagggggcttcaagccaaagttagccatgctctggaggggctacgtgagagttttgagatttcatcccaacgcttgtcgcggccagagaccgaaagaagccacgagaaacaattcaagcattttccaagtcggacaagggtaccgttgcgaaacttcctgtttggaacaaagcgaaagaaaaaatcaatatttgcgtgcatcaatcccacattccagaaacaattcagcgatctgtgaggtgcgtgagcgtgggtaccatgaccatagttttccttattttgaaaaaaatgacaaaatgaacctggggtagttttgttccccagagtacatgcaagcgcaggttttgtttgaatttagcttgtgtttgtttgtaatggtaatttgttcatttgattgaaataaacagggtaaattatttgataccgttgaaatgtactgtgtgttgcccctgttgtattgggccttgacacatctaactctattactaatatcagtcacaactctggttaaagtt

SEQ ID NO: 38967 - DNA, 949 bp, Zea Mays
gccacaccagctatataaacacagctgctctcctgctccctttcccttccccccttccgttccgttccgatttgacgagttggtggctgctatagattcactccacccctctccatttctgataagtatccagctagctaccagtgtatgcaccaggcagcagcagcatggcggagtgcaaggacgacgacagcggccggcggtctccgtcgtcgtccatggacagcagcacccaccccccggcgctctccaccgcgtcctcggcctcccgccgcccgccggagaggagggaccagctcagccccgacctgcagctagggctcagcctgtcgccggcgtcctccgccctcctggtagcggagacaaacaacagcatcgtcccttctacgccaaggaaccaagcactcccggattggcccccgatcaaaccgttccttagaagcgccctgactgcctcggcacgccgacggcgaacgctgttcgtcaaggtgtacatggaaggcgtcccgatcggccggaagctggacatgctcttgctggacgggtacagcagcctcctagcgaaactttgccacatgttcaaggcatctatcacttatgctgacgctgtggagtaccatcagcgggttcctcacgagaaggccgcgcatgttctcacctatgaagaccatgatggagactggatgatggttggggatgtaccgtgggagctctttctcggaagcgtaaagaagctgaggattgcgagaaccgacagagtggagtcgtgatgctgaggctatactaaccgtgtacagtgtactgaagaaacgccagccttgctaccatccctgcaaaattaaattttggtattttatgtttcctttcctgtttctttgactgccttgtaaataccatggttatttgttaaagaacaagcaatttgcatggaaaatattatagttccaag

SEQ ID NO: 38968 - DNA, 2493 bp, Zea Mays
ctaggacgagatcagttggtagttcaccagagttcacaaaaaaatcacaagcaagcagttgcgggtgtagctcgcaacaatggcgacgaaccccggcctcttcaccgagtggccgtggaagaagctcggcaacttcaagtacctgctgctggcgccgtgggtggcgcacggcggctacctagcggcgaccaaggggtggagggcggccgacctggggtacgtggccatcctcccgtcgctgctcctccgggcgctgcacaaccaggcgtggatcacggcgtcccgcctgcagagcgcgcgcggccggcggcaggtcgtggaccgcggcatcgagttcgagcaggtggaccgcgagcgcaactgggacgaccagatcctgctcagcggcatcctcctgtacctgggctccacctacctgccggggggccagcacctgccgctgtggcgcgcggacggcgccgcgctcatcgcgctgctgcacgccggccccgtcgagctcgtctactactggctgcaccgcgcgctgcaccaccacttcctctactcccgctaccactcccaccaccacgcctccatcgtcaccgagccaatcacctccgtcatccatccatttgctgagctcgtggcgtatgaactattgttctcaatcccattgattgtgtgcaccttgaacggaactgcttcaattattgcatttgagatttacgtgatctacatcgacttcatgaacaacatgggccactgcaactttgaattggtgcccaattggctcttcaaatggttccctcctctcaagtatctcatgtacacaccctcgtttcattctcttcaccacactcagttcaggacaaactactccctgttcatgccattctatgactacatatataacaccatggacaagtcatcggacacgttgtatgagaagtcactcaagggaaaagaagaaacggcagatgtggttcaccttacccaccttaccagcctgcactccatctatcatatgaggcccgggtttgcagaatatgcttctagaccttacactgccaagtggtatgtgcggatgatgtggccgatgtcatggctctccatggttctgacatggtcatatggttcttcatttactgttgagaggaacgtcatgaagaaactcaaaatgcaatcatgggtcatcccaagatacagtttccattatggattgagttgggagaaggaagcaatcaatagcctcgttgagaaggcaatatgtgaagctgacaagaaaggagctaaagttgttaccctcggactccttaaccaggcacataacctcaacagaaatggagaactttatcttcagaagtgcccaaagttgggagtaagactcgtagatggcaccagcttagctgctgcagtagttgtgaatagtgttcctcaaggcacagatcaagttgttctcgcagggaatatttccaaagttgctcgtgctgttgccgcagcattgtgtaggaagaatatcaaggtagtaatgaccaacaagcaggattaccattttcttaagcctaacatggcagaagatgcagctgagaaccttttgttttcaaagacaactactgcaaaggtgtggttaattggggatggtctagatgcttctgagcagtttaaggcacagaaagggacccagtttatcccatattcacagtttccaccaagaatggcacgcaaggacacctgcacctactcgacaactcctgcaatggttgtacctaaaacactacagaatgtgcactcctgtgagaattggctgccaaggagggtcatgagtgcatggcgcattgctggaatggttcatgcattggagggatggaacgagcatgagtgtggggacatcgtgctagacatggagaaaatgtggtctggtgctcttctgcatggtttccgccctgtggctcaagtttgattctccagttgcaaatgcaaggcagcacaataagttattgaaagttataacataatgctcgcgagaactatgctacatacatatcagtatgttggtgttctgtacttctgtttgtccatgctctgcctcttatcacttaagacatctgctatctatgaagttaagatgaactcatgtagtgtaaaaaccattctgcagaagcagggtgaaaaatagcatctctacaatgcacatttctgaatcggaacatgctgtacttctcgggttttctcacagcacaaggaagtgaagttaatagaagtagaccaaacaaactcgcttagcagggaaaaaacaacacagaatgccgagagcgaaaacatctcactgtgtacgccagcgacgggcggagcagacaaggccgcgcagacggctcgaagaattccacgagtggcgcgatgatgccggaaacggaagccgaggagggcaaccgccgatgcacgacatctcccctcctctatagactacggtggtcgccgccagcggccgccgggccgggccgggcacggatgcac

SEQ ID NO: 38969 - DNA, 1549 bp, Zea Mays
  misc_feature (1549)..(1549): n is a, c, g, or t
cacaaggaggaggacgatccttcggggacggatgccagcgcccgtgccgtgcgaggacgacggaagagccgcgccgcgcctggagcacgcatgggagagaactcaagtgaagaaacaagcggggccggaaccagggccagcatggagcgcgtaaagcacgagaacttttgccgtgccgtcgcagaggacaacacagcgctcctcctctcagcagtgggaaacttcaggaaggaggccctgtgccgcatccgcaagggctccgacgcctcgagggtgctggaccaggagatgtccgtcaggctactccacctcgcttgcaagcacgacgcagtagagtgcgcgacgctgctcctagagggcggcagcgggatcacggcggcccccattgatgcaagggaccagctcacgcggacgccgctgcacgtcgcagctgagacccactcggccaggtgcatagagctgctactctccaagaacgcccgtactgatctcagggtggttgacgggagaccacttctcccgcttgagatcgcgctaatgagcaggagagttcaaactaactggtccgtggacaacccaattgaggatcttctgtcttttcttaaacaaagggatctcaatgcagtaaggctcctggcagagaaaaccagagtggttggggagcttgcttacagatacgccatggaaggatgtgtccctgcattgacaatgctgcttctggtggttgaagagaagatatcgtcacaggttagtgtggttatagagggtgtcagaacgaagcgttcaatctacaactccattgtggacgaggctttatcaacgggagatacttcagctcgtgatggacatgaaaggagaaaggccctgctctgtgagattcagctgcttaaccaatttggatcggcatcatggagggaccacaatgacaagagaacactaccccctctactgagagctgctaaggttggagatatgaatgttataaagatgctcctgatgggtaatgttgatgtcaatgaagccgactctgaaggaaacacagcacttcactggtgccttagtggtgcttcatgtaccaaggaaccaaggattgtgtggcttctgctcaagaatggcgcaagagttttccaggggaacaaattagggctcacaccagtacacagcgctgcagctaagggcaattacaaagctcttcagtcacttctgcttcatgcccaagattgtgttgatatacctaccaagaccaaagaaacgccattattttttgcagtgaagaatggttctgtggattgtgcaaaacttcttttgcgtttcggggctgataccaaagcccggaacctgagaaagcaaagacctattgatgtggcaacatcccaggacatgcgtttcatccttagctctgcgaatgtgttactattttcagggaaccataactcacctcaaaagaatcgtgtgatgagaaaggaaatttacaaagagcttggtgatgaatttgacgattttgacaaggattcctgtgatgaaagctacactgggcttaagacatcan

SEQ ID NO: 38970 - DNA, 2866 bp, Zea Mays
gtgggattgtaaggcgctacaagaatgggaagggaggaagagaaagaccaaagttgacatggaaagagatactttccaagaggtaaagagcaagcgcgacaagaagaaagagattaaagaggttcctgagacaagatatcgatcggcaaatagttctactaatcgaagccttagaagtggtgcagatcgtggtggacgtagcaattctgtgcactccagctctactgataacatgacctcaaggccaccagtctcagggtcttgtacggcatcagttaattccaatcaaatgcagacaattgcaagttcctctgcaaacaaacatatggttactgatggactagctgtatcattgcaatcatcgtgtgggtttcagcatggtggttggtctgggacacctggtcagttgtcgatggttgacattgtgaaaatgggccgccctcagggaaaggcttctagcaaacctgtggtcacagctgacagaggttatgctggacagtacccatctttgccaagcacaaaccagaacctcaaacaatctggaagcatggtttccccagcagagcttgacaaggggttacaacctgcccacaatttggttcaggttaagaatcatggtcattttactgctgatagcaagctcccatatggtactgattggtctccacaagacgacccaacatctgagaaccaatcttcccagcctgagacgtctggtgatccatctttgtatgaatcatcatttcagtcatctacattggttactgatgtagttaattcacatgaaaattcacacttggagttggatgaaaacagcacctttgcaatgagatcaacacctgcctctgagagacacttggaacctagtgacagtattcctgaatacaatgatggaatattaaacaactcaagttcatatcagcctcataattactcttacacagaacaagatgttgaggattccagtgctgatgtatcagcagcagcagaaaatttccagagtttaagcctacataatgatgagttagctgcaaaaaagactgctgaagataaccctgcagtgataattcctgatcatttgcaagttaccaatacagaatgtgttagtttgagctttggcagttttggatctggtgcattttctgggctactcccacaaaagaccactgatagcaatgtggaattccttgttcaagaggattctgcaacagtagatccaatagatgccaggaatcaagattactatgaaagtggtgcagtaacttcaccagcagaagaaaatcttgaggccatgctaggaactaacatggagaatgtcgatgcaccttctgtttcacaggctaatgagctcagtcaggacgtacttgatccttctgtacttaaatatgacgtgtcatcagtttcaagtcatgcttattcgaacatgaacactccacaacctagcacaatagaggacccacaaggaaacaaccaagcacatacgctttcccatttgtcaaacatgatgcaagcaaatcctttgagcactagcagcctattggcgtcaaatcaaaatcatccatctcttcatggcttagagtttgatttgccttatcttgaagcaaaatataacgcaggcacgactacaaatcctagaccagccatatccatgcaggaggccctgaaagcaggggttttctccaacgctcggtctacgcagtctcttccaagtactagcattccgacggggcatcctctccctcagcaattagcacatcacccttactctcagccgactttagcacccatcacacatttcccaaatatcgttggctatccgccgtatttgccacaaaactatgctgcttacctatcttcgggcaccttccagcaagcatacccgagcaatggagcattccatcagtctgctgccgctttgctcggatctggtatgaagtactcggcccccgagtataagaacaacctgtctgccacaggcttacaacagcaacatcagccacaaccgcaaccaccttcatcagtcatctctggttatggaggccttggaagctcaagcaatatacaaggaaattttacccttaatcagagtactggcactggatcaactcttgtgtttgatgatgcattgggcagacagtacaaagacaccagtcaacacatagctctccagcagcccgacaactctggaatgtggcttcatggctctggttcaagagcggcggcgcttccgcctaaccacttttatggttaccagggacagagtcagctgggtggctttggtcaggcgcagcagcaacagccttcccaattcggaggccacgggtacccgactttctaccagtctcagggtgggctgacacaggagcaccacccccagaaccttgctgagggcagcctgaatggcttccaggtcgcaccgtctcagccgtctcatccgagctggcagcatcagcacacctactgagcattgttctcccttgttatggtctgtctctttcgccgtcacaagccaagtttcgcgtgcttgtgcccttactcgatgcagagtaagctgctcggattttagctgagcttgtaccttcagcgctgagaagggtcccaggacccaggcatacaacagttagagcgttttaacatgctgcgtgcgtgcgtgtgtgtgtgttgccagaccgatgccttgtggtttttcgatagcgagttatatgtgcggaggcgcagtcatgtataactgagacatgataacataacaaccaatcgtttcgcttgcatttttttggtcatgcacacatgcggttatcgcttcaggaagaaaaaaaggagcacctctgactcagcttatggattataaatattttcaatctcacca

SEQ ID NO: 38971 - DNA, 2863 bp, Zea Mays
cgacaattactttcgttgcgcgctgcaactgccgctcgccgatccgcgcacacagccgactgccgccgccatggaggacgttctgacaccgccgccgcagccggaactcgccggagagaagcgtaagagggaggagagttcgctggatgcgtccatcgaagacgctccatccgcccccgcctccacctgcagcgctgaggatgcggccggcagcgacgtcgcccggcacccgatgtggaagacgagcctgtgctccttcttccgccgccgcggcgccggcgccgaagggtgcagtcacggggactcctgccgctacgcgcacaccgaggaggagctccgcccacggcccgacggcacctgggaccccacctccgaccgcgccaaggagctgcgcaaggtcgccgcggaggcccaggaggaggccgaggaggaggtcacggtggatgagcagtcactcgacaagtgcctcgtcgggcttcccaggggctggacggctgataggctcaagtccttgctccaggatcagggaatctcgtatgcaacagcaaagaaaaagaagggaatgacagttggttttgtgacttttcagagtgttgaacaactaacaaatgcagttcaggtccttaaggagaacccttctgatggaaagcaaattaagatagtagatgccaatcgtaggtcccatcaaaaggcacatgctggagcacctgtatccaatactggaactgcaacagaaaatggtagtagtcctactacacctgcagaggaaacatctgtgcctgaatcggtgtcatcaagtaaaaaaggtgcccgtgatgcagttactccccttgcccatatgacttacattgatcagctagaacacaaaaagcaatctatggcacagatactgaagaaacttactcgcaatgctaggaaagcttgcccacctaccattccccatcctgattgggtttttaaatcaaaggaaatcggatattctttagagggcaaaaagacagtaggatttatgctcggaaatttcagggaaggcgtgactgctgttgaggaacctgagaactgtccaaatgtctcagaaatttcctgcaaatatgctaaaatgttccaagattttcttcaatcatcaagtttccctttgtggagcaagattgacaactctgggttttggcgccaactcacagttcgtgagggaagatgtccagctgaagctgttgtttcacagaatgcagaatcacaaatatcagaagtcatgcttattgtgcaggtgtgttcgacaagtgttgatgaagctcttatgaaagaagagtttgacaagctgtctgctgccctggtacaaggagcagcaacatgctcacctcccttgccactgacaactattgtagtgcaagatcataaagggatatcaaatgctgcacctactgattgcccactgatcccgctattggtaccaaagggagataagttggatggcacatcagaagataaaacaagaatccatgatcacataagcaacttaaagttctctatatcaccaacagcttttttccaggttaatactcttgctgcggaaagattgtatgcccttgctggtgattgggctaatctcaattcagacacattactttttgatgtgtgttgtgggactggaactattggcctgaccttagcacagcgtgttggaatggttgttgggattgaaatgaatgaatcggcagtttcagatgctcacagaaatgctcttatcaatggcataaaaaattgtcgctttgtctgtggtaaggctgaagatgtgatggggccccttctcacagaatatcttggttcaccacagcagcaggctgcagcttctaaaagtaattctgaaatcgatgatacaagcaaaactgaggatatgattggttgtgcaagttatgatggtgaaaatatagatagctcaaagcagagacatgacaatgctgaaggtcagcagcctatggacacgtcagttgatcatcctacctgtgcaagtgaggtggatgggatggacgtggttgattgcaatcatgatgaaaacaatgtggcttctggtgaacaaaattgtggggaagcatcattgattaatggtaaacccattgagacatcatcagataatagtttggagcaaggcaagacatgcaaggatggttcttccagtccaaacaacaatgtccttgctgctaatgcatgccagtttaagaatgtcgttgctattgtagaccctccacgtgttggccttcaccctactgtgatcaaggcattgaggacgcatccacgtattcgacgtctagtgtacatttcctgcaaccctgacagtctagtcgccaacgggatcgagctttgcacaccaacacccgagaaacaagagaagaacaaaggcaaccgagggtggcggtctatgagcagcgcgggtctcgctcggcagaggacgaagtcgatgcccaactctgaaccttttatccccaagagggcaatggctgtcgatctgttccctcacacaccgcattgcgagatggttatgctttttgagaggtgaaggaagtgtgtctaccaattggacgcagctggcgtgcctcagattcttgttaagagatttttgacctttgtgtcgaggaccatatctgtttttcctcctcaccttggcccatccatatgttgtaacttagtaacatctattcgattgagaggccatgacggttggtgttggtggttactctttcggatttgccttctgttcggctacacttaatcactggtatgtatttctttttcgtgttaaatggatggcatagtaggactaattcgtgtacgtaaaatgtgtgctagtagccatacctggctcagcttt

SEQ ID NO: 38972 - DNA, 1579 bp, Zea Mays
gtcagtttatataagtagtcacagttctaatatgggcaagatgcagctcgcctgcttctgaattccttccctcccttctgtgaaattggcatgggcaagctctgatgcgatcataggtcataacatgaaagaattttcttgagtataaatggatgacatccataatactgctggtttgatcgttagtccagtgttttttttttgtttccatctcaatagtatttggccatgctgtgaggagtccccagttcttagtacaacaatttcgtatgagcaggctgtttgaggtgtcgtcaaaatggcaggtgatctaaacactcccgggaagttaggagcacttatgtgccaccttgattgggattgaaccggacagctctgtccccaatgaaacatatttttgaccaaaattctgttgcagctttgcatgttgttgatttcagttatcaaccaattcaatcatgaacacatttcatatgttaccaagtcttgtatttcaggcagcatcttttccctttcttcttcccaaaagtcttccagatggtttgattttttctatttcttacttggaattctttaacgatgttcctgaatcagttgactaaggaagtttaataatagatggtcatggaagttctgtgtttgatacatatgtctccatctcaaatgtttattagtattacttttgtatgctgaagctactttcctttttgatactggaggcaagaaaccatggtggatgctctgttgcaattgcaagtcattttttcctcacgaaaaaatttgctctagtttctttagcagatctctgagaactttgttcctggaagaatgtataattgccgatgaagggagcgaatggctccatgaactcgccgtcaacaattctgttctggtgacactgaacttctacatgacagaactcaaagtggagcctgccgatctggagcttcttgcaaggaactgtaaatcattgatttctctgaagatgagtgactgcgatctttcggatttgattggttttctccaaacctccaaggcactgcaagaattcgctggaggcgcttttttcgaagtcggagagtacaccaagtacgaaaaggtcaagctcccacctaggctatgcttcttggggggtcttaccttcatgggtaaaaacgagatgcccgttatctttccgtattctgcgtcgcttaagaaactggacctgcagtacactttcctcaccactgaagatcactgtcagcttatcgctaaatgccccaacctactggttctcgaggtgaggaatgtgattggggatagaggactggaagttgttgccgatacatgcaagaagctacgaaggctgagaatcgagaggggggacgatgaccccggccaagaagagcaggagagtctctcagataggcctgacagccgtagctgtcggctgcgggaactggagtacatagcggcatacgtatccgacatcacaaactctggtttttcacatcagagcgctattggaatcatcagcggctttggaggtgacgatttcagtggcatctttgtcgaagggatggcaaccgcgccagtctaa

SEQ ID NO: 38973 - DNA, 2899 bp, Zea Mays
tttggctgttataaaaccactctactttcttcgggattgtcggacaacgcttatctccttgtaggtgaagtgttgaaaaagattgtggctctggcccctttcttctgttgccatttcataaatgagcttgcacgatcaatgcaaagcttgacactttgtgcaatgaaggagcttcgtttgtacgagaattctgaaaaggctcttcttagttctacatcagccaatggaactgcgattcttagagttgtgcaggctttgagttctcttgtcagtactcttcaagatagaaaggatccagaacagcctgctgagaaggaccattcagatgcagtttcccagatttctgaaattaacacagcattggatgctttgtggttggaattgagcaactgcataagcaaaatagaaagctcttcagagtatgcatcaaatctaactcctgcttctgcaagtgcagctacattaacagcaggagtagcacctccattgcctgcaggaacgcaaaataggcgtactcaaggcttgctggggcgcagcgggattcgcaggcggggcgcagcgggatttggcatcggtgatggcgcagaggtggctagggcgaatttgccggaggtgacaggcgcagcgggatttgcaggcggggcgcagcgggatttggcggcggcgacgcagagctgcgccagctcaccgatttatggcgatggcgcgttcgcgtctacggtctatccatctccaaaacgatgggcagctgacctacccaaccaccaagagctgaagagcaaattcctgtcccgcacatctgctcgccgcccagcgaacctgatggcgctcgtcgacgcgaaggccgccggcgcgtccacctccaccgtggccgctgcgcccacggtggagcacctgttgttcctcgtcgtcctcgacggcgtcgagacgcccatccacgaggggacgctgtacggaagcgccgggggcacagtcaccgtcaccggccctggccagctctccgccgacggcctcgagagcgtcctggtgcgcggcggcgggaccggggccggcgccgtgcggttcacgctctgcgccgacgcggccgccgagggcgtcggcgctgcgtgcttcgagcggtgcggcgcggcccgcgtggagggcgcgcgcgaggtgtccgtgtcctcgtgccgcgccgtggaagtggagcgcgcgggcagggtcaccctcgaccgctgccgcgacgcgcggctccggggcgggggcgcgctccgcgccacgcggtgccggcgcgctgacgtcgagagcttcggcggggtgcgcctggcgcggtgcaaggccgcgcgcgccgactggtgcggcaccgtcgaggtcgagctgtgcagggccgtcgacgtccgccgctgcggagctgtcaccggagagcggtgccgcgtcgtgaacgctgcagggtgcggcagcgtcgaggtggcgcgggccgtgatcaacatggtggaggaagagcagccgtagtcagcttcgcctccgaaaagccctagtgctccgcgccctcgacgccgccctctacaccgtgggcgcctcctgctcctccagcctcctcctccacaaggcgcgaaaggtcctcgccgaccccgacgcagccgcctgcttcccccaccagattccttttacagaaaatgaagaaaacgatgaggctagggctgcggtggccgatctcaagcgcctcctcgaccttgagtgggccaacctcccgccctccacgctcgagctcgtcgccggggacgggtcccaccagactggtgccgctgccgaccacaccatgcgtacaaagcttcgcctgttcgcgaagcgtgaaattttagctaagcctgtgcaggttggatccgcttctcatcaatcaattcggacgcaagttgctgataacgcgagcaatgccaataaagctgatggcgcccggcgagatgaggcacatccttctaattctaatgtaaactatgaggctgatagtgatcgtgaaagtatggttgggcaccaaaatgcatcggttaaaggagcagagggtcaactttcagagaagtctgtctttacttctaaaaagcgcgttcttgtggagagaattccgaagtgggatagctctgatgatgatcagccagtgcggaagcgcaagttagatccatttgagagaaaaccatatccttctcctacatgtgcatataagatcagaaagaaatggagtaagatagagatagaaaccttgctggaaggggtggacaagtatggcataggcaactggaaagatatcaaattagcttaccctggtgtctttgaggagagatcaacggtagatctgaaggacaagtttagaaatttgggaaagcgccaccatgaatcgtcttgaggcttagtggcgctgtgcttttgctctgccctggagatattttatgttgatggcagtggtatgcaaaagaaggcctatgtaaggtgcatggagacatttgggtttcgtgccaaggatattgttgacttgttgagtgcactgttcttaaggcgtcgcttagacgtccaggcggaggtccaacgcctagccgccttgcccgcctaccgtacctaggcgatggtccaacgccttgtatcgtcttaccgctttaaaaaacatcgttgatggttgagtgtttaaagataagtaactggaaccccacatgatggcatgttgtcacgggcgtgcacaactcgagcacccatctggctcagaaaagcaccatgggaagatagaactctggcattggtggaatctgatgcaatggtcattgtaattctgaattgaaaattttgaaccagtgacacactaattgttcaagaagctcaatatcgtttgctccaggagtcagaagcaggtcccctgttagacctttcagttatt

SEQ ID NO: 38974 - DNA, 2298 bp, Zea Mays
gtccaaccatttgtggcggctgccgcaacaggctcaacgctcacgcgcacacacaatccatagccgcctcccacatctcactctcgttccgagcttccggccatggcggtgacctccggcgcccccaacgacaacggccgggacgctggcgccgctgcgactgacgatgagcaccgcgtggatctggaagttaggcacaaggacgccggcactagggactcgccagcaccgatagcggcagctgcgcctgcgtcccaatcccgagtggctggaaagcttggcccctcagatccaaagcacctcatctatgcgggatccaaattaaagcatattaaagctgcacctgctgcaccagacaagaatcgccgaccacctttgtctccaccagcacctgccgtcaatcgtggtcgtggatctgtgcgcacacctttgggattaaaaaaatgtctaccgaaagtggcagtcaatccccattatctcaagcatcacaagcaccgatgtctccatctcatgaacctgaatcgtctcgtcctgagtcagataatgactcgatgccaatttaaatagatgacaatgacaacattgaagtagaagaggaagaatacgacgctgaagctggttctaagagaaagctcacctcaactgtttggaaagagttcaagagagtgaagttcaatggcacagtccgggcaaagtgcaactattgcttcaagcaactttctgcgtcaagtaataatgggacaaaacatcttcatgttcatttaaaaagttgtgtgcaaaggaagattaagttgaacgggaagacattggcacaagcttctttgagatttggtagaacggatggtggaacagtttcaatagagaattacacatttgatcaagaaatagctagaaatgaacttgctgcgatgatagttctgcatgaataccccttaagcatggttgatcatgtgggtttccgaagatttgttggtgctcttcaaccacttttcaagatcggaaccagaaacatgataagatctgatattatgaagcattatgaggtggagaagaaaaaagccattgaatacatggctggaatccagtccagggtagcggtcaccacagatttgtggacgtctgacaaccaaaaaagaggttacatggccataacagctcactttattgatgaatcctggactcttagaaatattataatgaggtttatctatgttcctgctcctcatactgctgacgtcattggtgaagaattgtatgagtcattggttgaatggaatcttgatgagaaaatatcttctgtgactcttgacaactgcacaactaatgatgcgtgaatgtgaagatagagttgctaatgtgaagaacttgctagctgatttgatgaatgagtaccatataactgagaatattgagaacaatgagtcatcaacaccatcagttggaaacagtgatgacttcttatctgacattagtgcccgtattgcaagtagaaggccaacaagcatggggctcaaatctgagctagaccggtacttggatgaagaaatggtgaacatgcaaaccaaaaacttcaatgttttagattggtagaaggtagctggaactcggtttcctattttaagaaggattgcaagagacatatatgttatccctgttacaactgttgcttcagaagctgctttcagcactagtggtagagtacttagtgagcatcgcagtaggcttacttcaaagatgttggaggctctcatgtgctctcaagattggcttaggaacaaatacaaagttgatgagaaaactaaacaacctgccaccttttggtcctgtctccaagacatgcaagagggcctccaggaacttgcactttgacattttcatttcaaggatttaggtggcgttaatcttttggctgttgacatgtagtgaacaagtcaagtacaagtagcaattgacaagatcacaagaaccttttggctctcatgaacacttgatatggatcttttggttctcatgtttttactcaatggtgaacttgtaatgaacttgtaacagatgtgcttttgggagcggtttgcacatctgttgatgcgcacctatgttgtaagcacattgtatgtgttaatttggaaatttggatgtttaatgtggtgaactagtggcgccatgctaggggtggtggacactaactggatattaatctagctgtgaacatctgatgtctgatgtgatcaatggtgttatgatttgtgaaacacttaacattgaccactctatcagtcttattgttgatgtttctta

SEQ ID NO: 38975 - DNA, 1833 bp, Zea Mays
gaacgggagagttcgaccaaaattcccacgcccggcggttctacggtcgagccaagccccctcaactgctgaacggagagttcgacctagcacgcccggccgccgccgcagcccgcaatggcgtcccttttcaaggaccccagcaagctctcggcgtacagggaccgccggttcaaggggacgcaggaggagtatgaggcggcgctgcttgcgtcgacaacgctgtacatcggtaatatgtccttctacaccacggaggagcaggcctacgagctcttctcccgcgccggcgagatcaagaagatcatcatggggctcgacaagaactccaagaccccatgcggtttctgctttgtactgtgcgggcctcttcccttccttgatacgtcgcgttaattggctctttgattttggattcggtgctgtagtttccttcaatctacaggaacataaccttcgccctagtttaattagaaggggagatagtcccaattgttctgctggaatgtagtttgatgcaattagacgctgagtagatgggttccagacctgtttatgtattgatttgtttcctcagtagtgtgagttgttcatctgctagttgcaattggacattgcttcgtgaaattttatttgctgccaggaacatgtgagatgcctagaacatgaatagagaactgtgctatctcagcatgtacattcctcaggatattgcaatagattggatggagcccaactgcttgttgagggggggggggggggggaggaggtggagtaaagagctgagtactagcttgatcattgatgacgattatgagcgcaacgacgtgtatatgatgcaatgactgatggacatggcacttagctagctagcgacatgacatacatttattagctctctgcagtggtgtggtacatgcatatctatggaaaagcaatgggtacggacagggcaaccccgcagcagaacgccatgggcgacggcgcttgcctctgctgtactactctagggaggatgctgaagatgctgtcaaatacattagtggaacgatgcttgacgatcgtccaatccgcgttgatttcgattggggctttgaagaaggcagacagtggggccgtggacgaagtggtggacaagtcagagatgagtaccgtacagattatgatcctggaagaggtggttacggtaagatggttctgagggaactagaagcacagcgagaattagttgactatggtggatcttttcaaccgaatgcaccacctccctatgagagaagtgagcggaagagaggacatggagattctcataggaatgacagaggagattaccagcggaaacgctaccggaacgatgaccggtcagcaccagaggagtccaagagagcaccggactctgatccagcggagaagaatcctagattccgtgagaaaggtgactctgacgaagaagaggatgactacgacggcaaacgtcgtcgctaaagctgtggaacagccgttgctactacatgcagctgttctggtgtccagacgttgcagaagagtccacagctagcagcagtatccggatctcgccctgttgtacaacagatttaattcttcggtcggccattcctccttttctagtgctcctatcatctgttaatctgaatgtgcgcggtgttacatgtgctccaagtggggcactgttctcacagatacaatgagccttatctgtacgtttgctgctgatgaagcttgagaccagtgcatatattaattctaacagattgttaccgaacccaatcttcaatttttcctgtctgtttccccgacaaccctagtaggccc

SEQ ID NO: 38976 - DNA, 1819 bp, Zea Mays
agaagactaccacacaaaaaaatcgtgcctcgagtcttccccgcgccgcgcgggcaacggataacaaacgctcggcttgtcgccgtccgtcccctgccgccacccatcacctgctatcccgccgggatcgtacgccaattcgccaaaacgatggcggcggcggcggcggcgggcgcggcatcttccatcctctcgtccacgcccccgcgccgcctcaccttccctcccgcccacatccgcaaacccctcgccgcggccgcccccaaggccctcaacctgtcatcgcagaaactccccccgctctcttcatctgccacggcctcgccaccacctccgcccgacggggacgataagccggaccccatcaagctcgctttcgcccgcgctgccgcatacaagaaggggagggacagtcacagcccgagcccgagcccggcgccggccccgcctcccacgccgccgccacagtcttcaccaccgtcgcagccgcaggcttcggtcagtgagcccggcagtaaggaggcttttaagcgggcgttggagtaccgaaacggcaacggggccggagcgggcgcggctggtggtgactccccgctgctgggaggctcgccggattttggtcagaatgccctaattagtgaagaagtctcgtttggcaagagaggagggtacgagtttgatgaggctgattttttgggtctcgacttctttgagaaaaaacgttctaaaggtctaccacctgggctggctccagcttttgagcctttacgagatgacgattttcctgaggtggacataatagttggagaccccagcaaatttgacaagtctcctcgccgaactgaaatccaaccggtagacaacggggagtcaggggaagcatctcaatcgactactaaaccaaatgaagctgacaaggctgggatagcacccccttcaactgttattgagactgaagaagatgaagatgtttatagacccacagttagatcatggggaatgtttccgaggccacaaaatatttcaaaggcgtatggcggtggaagaaatatacgccttggtggagagactcaaagtgcagaagaaaaggcagccaaagataagcgcaccaaagagctaatagctgcatataggaatcgacagaacatggtaatcgatgcaaagacaaaagcagagtgcatcaagttttcatctttgctttaatgcacatgtatttgttacgtatttgtaaaattgtcatatggaaggccttgagggaaggtgatgagatgatgaatactggaaggcttaaacaagcattaccttattatgaaaaagtgatggacgctgtggactttaagactgaatttcatggaagggctgctctgcaatggtccatctgtcttgattcactttgcaggtccaaggaagcaatgagcatgtatagcaaacttaaaaaccacccgaatagtgagatcagcaagaaagcaaacatgttcgtgttcagctttcaggcaatggatttcatgaaggtgagcagcattccagtgcccaaaagcacaggctacgagacgtacttcaccaaatttggcagcaagaagaattactacgcgagcttagaagagccggagaaatcatggacgagttgctgaggttttaataccgtataggagcacatagcttggcaatagaagattattattatgatttttttgttttcatcaaaagagcaaattattttgtgtagctgagctagggactaatttttaatcccttttctttaggccctgttccaatcctataagataaattttagcagcttctttttagctacttttag

SEQ ID NO: 38977 - DNA, 981 bp, Zea Mays
cagcaaactgcaaaccagcaacgcatcagccgagccaagcggcagatcgttttcaggcggcgtgacgcgctcacgcctgtctccttgcccccttcggtcctccctcctcccggcgagctcctctaccacgggtgtaccaaccaaccaccagtccaccaagcgcgcgggcgccatcaggtagaccggcccctgcgttagacccaacccaaccctagctaccgtgacgctcgatcggcttcgggttagtttgcggaggaggcgtggaggtggaccgcctgtgccgtgaggctgagtcatggaagtgccgccactgccaacggcgtcggaaggggagcgccgaagcgtagcgacggggtcgtgcctccccaggctggtctccggcgtcctctcgggggccctcaccggcatcttcgccgttgctggaggcctgacgggggcgttcaccggcgcattggccggccgagcttccgacagcggcgtcctccggggagccggcctgggggcctttgcgggggcggtactatccatcgaggttctcgaggcttcgcgcgcctactggagcgcggaccgatcgagcccgcagagcacgtcctccatgggggatttcatagaacagctccttcatgctcgatttgtgcaagaccagtatgagccatcggcatatatggcctatcgttggcaggatgttattagcggagagacagcgaggaagttgccaaagtgctctcacaccttccatcagccttgtgtggacagatggttcattgaccatggttcatgcccagtatgtagacaggatgtgtaggtagatcatgatcgattctgggttatcatgcctttgtaaagttgctaccctcgtcatatagaagaaaatacagtacgtagcatgtaaaaagtcctgcacttgttcctattatgaaaaatggtttacacatcagtaattgagttccatgttttctctttttactcggtttgcgtata

SEQ ID NO: 38978 - DNA, 2690 bp, Zea Mays
aatccgacgcaaacgaaagtcctgaaccagccgcgaatcgcgagtcgagactcgcgaggcgcgcgcgcctgccgttctccgcctcgggtcgccgccggtagccggccaccgtccccgccacgacggatcgcaagctggcgaggagctccgagcgactaagggatccacgcatccagccgccggccgccaggccgcggcgccccgaaccacgggcgcggagcgggtgtgaggctgcagtgcctgggtggagctcgcgtggtccctgcagcggccgcaatgcctgccccacgcgcctgaccatgcattccaggctgctcaagaggctcgcgaagaggatcatgtgacggcaccttgccgtcgtttcgaccatcgcgcgcctgcgggacggggaagcatgcggaggatggatggcttcatctcgtcgtcgttggcgctcgtcgtgctggcgcttcatcttagcgtggatggctgctcggcggtcaaccttgaagggtcgatactgctcaaattccagtcaagagtggaggaggatccgtatggcgccatggtaggctggagcccgcgcgacagcgatccctgcagttggaacggcgtgcgctgcgttgatggcagagttgtaacgttaaacctgaaggatctctcattaagaggcaccctaggtccagagctaggaactcttagccatctgagggctcttgtactctccaataacttattcagtggatcaatacctaaggaattgagtgctcttacaatgttggagatactggatttaagcaacaacaacttgagtggggaagttccacaagagattgcagaaatgcaatcacttaggcagttattgctttccaataactgctttcagtggcctctgacccaacattcctatgggaactacgatcaggaaaatgatttcaatatttatgataatcttgggaggggtaatatgaatcgaagagctgagaatgggttggaatctggttcttcttcacaagagaacaaaaaggacactagcaacctttctggtaatccaactcaacttccttcacaacacgaaccaagaaatacagcatcacaccttacccagcgcaggttacttcaagatagcaatcttgctgcaccttctcctgcaaatgcccttgttccagctgctgttcctgttccttccactggaactggttcgttttcagcatttagtcccaacaatgcacctgtaccagctgtaaattcaccaagtagtccaccgatggtccccagaactacctccgaagaagatcaagaaacaaggtccatcaaatggctttatgtcattgtactgccactggtcgcacttcttatgtttggcatcgcatgtatgcttttgctatgccgcaccaagtcagggacaacaataggtccatggaagacagggctcagtggccagctccaaaaggcatttgtaacaggagtaccaaagttgcaacgctctgagctggaaggtgcgtgtgaggatttcagtaatattgtggcaagctacccacaatacactgtctacaagggaaccttatcaagtggtgtggagatagctgttgtatcaaccatgattatctctagcaaagattggtcaaaacattcggaagggcgattcaggaagaagatagactcactgtcgcgaatcaatcataagaattatatcaatctgcttggatactgtgaggaggaagagcctttcatgcggatgatggtgatggaatatgctcccaatggaacgctatatgaacacctccatgtcgagggatttgatcctattgattggaatggtaggatgagggtaattatgggagtcgcatactgcacgctacacatgcatgagctcagccctcctataacacatccagacataaagtcaagtgctatattgctatctgaggatggagctgcaaagatagtagacatgagcgtttggcatgaagtatattccagagaaaacgtgcccaacgatgacgacttagttgatcacccggaacgagtagctgcggatccagctgggaacatctacagttttggtctactcatgctggagatcatctcaggaaagcctccatattccaaagaaaagggttcgcttttgaacttggctttggagtgcattagggataaccgaaacatgtcttgtttgcttgatcctaacttgaaggatcacaaagaaaaggacctagaaatcatatgtgatttgctctatgaatgcatccaaagcgatccgaagaagagaccaaccatgagggaggtcaccactagattgcgagaagtactgtcaatttcgcctgaggctgcaacgccccggttatctccactctggtgggcagagcttgagatcctttcagttgaagcaagctagcgaaaatgttctttgtttgcagcaacgaggtacttgtgcatattgtaatgcaaccctgtacatccctgttgtatgttttcatcttgtgttgtaactttggtgtctgcgtgctacaattttccctccccagtgaattcagttgcctggtatgttttctcatttgttcctcgctttccctatgtatactaaacatacatggtgtgaaagtagaaaataaaaaacgcttcatgccgtccaagggctgaatgtaatcagcaaatgtatagtgttccatagttttctttgattcaataactagtaattagtgttttgg

SEQ ID NO: 38979 - DNA, 2255 bp, Zea Mays
gttttgctccccgacacgtgagatcccttcactagcatctctcttcctcaagcgccatccctggcttctcccatgccgagcgtctccaatgcccaaacctccatggccgacgtcgccctgctcaggtccaaccagctccccttcctgttgttgtgtccagccgatgcccctccctccatcttcctctctgcagcaaccctaccacggttgtgcccctgcttccatggtgagctcgccccagccccaacgtcggacgtgccgtcgccctcacgtccagctcctccatccccctggttccctcctagctccgaccaggtatcagaattcctggattccaaatctgagacggatgttgatgttgactataacagcttgtactcaaagcaggactttctacagggtgaggtgctcgtttcgatgtggctagagtaacttgtgtactctatctcatcgtttttaatttattcgtttatatatatatatatagtgtgatttaatatggtgtaatgtttctcatcctaatgacaccccaaacatacattcttcttccacggctgggtagccaaacaatcccacaacagtaaaattcttctaccaagtgaagaaccatggagaaaatgccttcctaatcattgttcccgctttgcaactaacatttccatttcccgccacactctcccgcgcagcacccattcttctttccctccacttgccgctccagttgcagttggtcgaaaaaagtggaaaggaaaggggcaaaatatcctagggttctgcctccatggacatcgagacccacgccgccgccctggcccgcgacgagctgcggcggctcctcgccgccaccctcagtcccgacaaggcgtcggtggacaccgccgcggcggggctcgacgcgctctcttccgacccacgcttccccctcgccatcctcgctgtcgctgcaggggacgatgatcacgggatgagagtcgctgcagcgacatacttgaaaaattttacccgccgcaatttggaaactcgtctgtgttcatctgaggtttacaaggagttccgtgaccaacttgcccaggctttgcttcgagtggagcctgcaattcttcgagtgctgattgaagttttccgccaagttgttgaaaaagattttgtcaaggataacttgtggcctgagcttatccctcagttgaaactagtgatccagagcagcaacctaattagtccaggccagcatcctgagtggaatactattaatgcactcacagtacttcaatctgttgtaagacccttccagtatttcttgaatccaaaagttgtgaaagagtctgttccacaacagttggagcaaattgcagcagagattcttgtaccattgcaagtgacattccatcacttctctgacaaggttcttttgtcacctgatgggactaacttggaatatgagcagctcctactcatcacatgcaaatgcatgtatttcactgtgaggtcatacatgccatctagggtgaaacaaattttgccttccttttgcaaagacatgttccgtatactagattctttgaactttaatagtcttattgaagatggatctaccatgaagctcaagattgcaaagagatgtctcattatattttgcgcacttgttacacgtcaccggaaacatacagataactagatgccacatattgtcaactgtgcaataaaaatatcaaaacaaagcatccatttaagtaaactcgactctctccccaatcggattgtttcattggcatttgatgtgatttctcgagttttggaaacaggaccgggatggtgactagtttcaccacatttttcttcacttcttgattcagcaatttttccagcattagcattgaatgagaaggatatagaagaatgggaggaggatactgatgagtatatgcaaaagaatcttccttctgaacttgatgacatttctggatggactgaggatttgttcactgccagaaaaagtgcaatcaatttacttggtgttatagcgctatcaaaggttgtgattccttttttattatagtttgttgaacacacatagtactgacttcaggctgagcaaaacattttaagggattgttttgctatattgtattccatgactttgtcattctatatcaagtgatttcaatggctgcatgcagtctttcatatttgaacacacttgctatttttcacagaaccatgtagtttgttgaattaactcaaaaattgagatgttg

SEQ ID NO: 38980 - DNA, 505 bp, Zea Mays
agccaacatgagaaagggatagggtgcgagaagggtgccaccgcggagttcatgtctccaccgctgttgaacttgagccgagccgcaggagagcgggcacagcgggggtagtgatcctcgccgtgtcttcgcaggttggggcatggacgggcttcgacgccgcggccggattggcgccgcgggggcctagggattccacgccggtgcttgggcatcgccgtcgggccaccatgcatcatggtactgttgtgttacgttgatcggaccatctccgcccagacctaaggtgaggaatccaccacatcgttatacttacccttctctccctataacaccagcttggctcaagatttagactcgggtgtgggatcgtctgtgcgtcagccatggcgccagggcgtctacgccgccgctccctccgcggtgggagaaggaagacacacgatagctattgaaaacctgatgtgtggctaagattagatcgcgctgtatcgaccccgggcca

SEQ ID NO: 38981 - DNA, 4807 bp, Zea Mays
cttctctctctcttgcttaaatctcatcatcacatcaaccgttcctcccctgtactctcatcacccattgcttcgcgttcgcggcatctactgctgctcctctgctcggccccgcgtcgccgtcgggagatctctccggccgccgagatcgattccacgcgccgctctcgcctgcctccgctcactgtccccgctgccgcaggattcgcccgccctgccggtgcgccggtggttctctacggcgtcttccggttcgggtgccgccatgctccgtggcgacgggggagggacgccgtgattccttgcctggccgccggtcgccgcacgtgaggctgagatctcggggagctcgccgtctcgcggcgccgccaccaccatgccgtctctgcagctgctgcagctgacggaccgcggccgggggcttctcgcttccaggaggaggacgctcgcctttgtctccggcgcggtgcttgccggtggagctctggcgtacgcccgctcgagccagagccgccggcggaggaggcgcccggaggcgagtcgcagcggcggagccggtgcattggccgccaatggggatggtttcagccagaacggtgccggcggtggattggctgcagcggaccagaggaggagtggcctcaaatctctgcatttcctcgcttctatcctactcaagaagatggggcccagtggcacgcgctaccttctatgcttggtattaacatcggtgctgcgtacagccgtagggcatagattagcaagagttcaagggtttttgtttaaagcagcatttcttcggcgcatcccaacatttacacgcttgatcatagaaaatcttacgctatgtttcctccaatcaacattatatcagacctcaaaatacttaacaggctctttaagtttgcgtttcaagaaaattctaacagatatcgcccatgctgattactttgagaatatggtttactacaagatctcacatgtggatcatcggatatcaaatccggagcaaaggattgctagtgatatcccaaagttctcttctgaactaggtgaacttgtacaagatgatctggctgcagttgcagaagggttaatatacacgtggcgtctctgttcttatgccagtccaaaatacgtgttctggattatggcatatgttctagttgctggtggggtaataaagaacttttctcctgcttttgggaagctgaaatctacagaacagcaactagaaggagactatcgtcaacttcactcgcggttaagaacacatgctgagagtgtggcattttatggcggtgagaacagagaagcatctcatattatgcagcggtttgaggctcttgttgagcacctgaatcttgtgcgtcatgaaaactggtggttcggcatgattcaagatttctttctgaagtattttggtgctactgtggcagttgtccttattatagaacctttcttctctggcaaccttagacctgattcatctacacttggaagggctgaaatgttgagcaatcttcgatatcacacaagcgtgatcatatcactgtttcagtctcttggaatcctttctatcagcacaagacgtttaaatattctaagaccggattcgtgagttattggatgtttcacgtgagctgtctggggttcgtgatagatcactggatcacagttctcctggaaattatgtcagtgaagcaaaccatatagaattttcagatgttaaggtagtcacacctgcaggtaatgttttggttgacgatttgactcttcgggtagaaactggttctaatcttttgatcactggtcccaatggtagcggaaaaagctccctttttcgggtccttgggggtctatggccactggtatctggccacattgttaaacctggtgttggttcagatctaaataaggagatcttctatgtcccgcaaagaccatacacagctgttggaacactacgtgaacagctaatctatcctcttacggcagatcaggggattgaaccacttacatatgatggaatggtggaccttctaaagaatgttgacctggaatatttgcttgaacgctatcctcttgataaggaagttaactggggtgatgagctgtccctcggtgaacagcaaagattgggaatggccaggttattctaccataagccaaagtttgccatccttgatgagtgcactagtgctgtgacaaccgacatggaagaacgtttttgcaaaaaagttcgagctatgggtacatcctgcataacaatatctcatcgaccagctttagttgcatttcatgatattgttttatccttggacggtgaaggaggttggaatgttcagcatagaagggatgattcgtccttttccaccgaagaatctgatttttcatcatcagaaactgatcgtaaatctgacgcactgactgttcaaagggcttttatgagcagggcaaagagcaatgcttcattggggtccaaggatcatccatattgtacagaggttatagcaacttcccctgaggtggaaatagaacatccagcacggacacctcgaattccacatttacgatgtcacccaagacctttgcctctcagagtagctgcaatgctaaaaatactggttcctagactatttgataaacaaggcgggcagttgcttgctgtcgctgtacttgttttctctcggacatggatctctgatcgtattgcttcgttgaatgggacaactgtgaagtttgtcttggaacaggacaaagatgcctttattcgcttgattggtgtcagtattctacaaagtggtgcaaattcttttgtggcaccatctctcaggacccttactgcgaaacttgcccttggatggcgaattcgcatgaccaatcatatgcttcgatattatttgaaaaggaatgcattctacaaggtattcaacatgtcaggtaaaagcattgatgcagaccaaagattaacacttgatgtagacaagttgaccactgaccttgctggcctagttactggaatggtaaaaccgctagttgacattctttggtttacatggagaatgaagcttttatctggacgaagaggagttgctatactgtatgcttacatgctactgggtttgggctttcttagagctatatcccctgacttcggtcatctctcaggccaagaacaagaacttgaaggaacattcaggttcatgcactcgagactgcggacacatgctgaatcaattgctttctttggtggtggttcaagagaaaaagcgatggttgaggctaaattcgtcaagttaattaaccactcaaagattcttttgaggaaacagtggctttatggtattgttgatgattttgtaacaaagcaacttccacacaatgtaacgtggggtctgagtctgttgtatgctttggagcacaagggagatagagctttaacctcaactcaaggagagttggcacatgctctgcggttcttggcttcagtggtgtcacagagcttcatagccttcggcgacattcttgagttacataagaagttccttgaactttctggtggcattaaccggatctttgagcttgaggagtttacacgcttcgctcaaagaaatactgtggtgtctcccaatgccatcagtgcagcctcaaaagaaacgatttcgtttcatgaagtggacattgtaacaccatcacagaagctattggctagaaaactctcgtgcgatgtggtacaagggaaaagccttcttctgaccggtcccaatggtagtggaaagagttctatttttagagtgctcagggatctctggcccaccttctctgggagagttaccaagccctcagaagggatgtttcacgttcctcagcgcccatataccagcctaggtactctgcgggatcagatcatataccctctctcaagggaggaagcgaagataaaagttctttcgctacatagatctggtaacaattctagtgcctccatgctgctggatgatcacctgaagacaattctagagaatgttcggctggtgtatcttctagaaagggaagggtgggattctacaccaaactgggaagatgttctgtcgttaggggaacaacagaggcttggaatggctcgtttgtttttccatcatcctaagtttggtatcctggacgagtgcaccaatgctacgagtgttgatgtcgaagagcatctgtacagacttgcaactagcatgggcataactgtgatcacttcctctcaaaggcctgctttgatacccttccatgccttggagctgaagctcattgacggcgaagggaactgggagctatgtgcgatccagcagtgagtgatggtgcccattaggagttgatgccattaaatgcaccatcagctgcatgtacaaaagcaagcagctagcacattgccattgtttgtgtatggacaacgtagacagtggcagcgttgctatgttggaagatgctatattcttgtcatagtctgcctcaggttgagcagcaaagcattgtgatgatgtatgattgtgagccatgcatggtagctgaatcctgatattagcttttagatagtggacatgattgtgagccatgcatggtagctgaatagcagagcagaagggttgtgtgttagaagctgtacctattgattcattacattatattgattctgcgtagcagatgtatattacaggcaagcaaaatataaataaatacgatgtggaattgtggatgctgctgccatgcagacatcagaaaattgaatcaggtgtggatgggaaattgtgcaagggta

SEQ ID NO: 38982 - DNA, 2569 bp, Zea Mays
cggaaactaccggccagatctcgcatatcttcgtgagtcgtgacctccgctcgcgaagtcgctggctcaggcgctgctaccgttcgagacaagtctcgccgcccacaccgccactaggaaaccttcttctctcctcgccgcccgcggccggccccttctccagaaccttctagaacccatcggggctccgggatggagcccagaagacgagagcgcagggtcatcgccatcgccggtgcggcagcgctcgttgccgtgggcctcaatatcgccttctccgccgtcgtcgcccaccgtcggaggaagcgacgagagcttccagggtttactgctcaagtcaacctatcagcagctgcgattaaaagaacgaccgaccgtatcatctctaagtcaagggaaacttatgattcagtggctgcagtgcccctagataaagtcagttttgctaatgtcattgcaccattggcagaattagatgcgctgcaattccctctggttcaagcttgtgttcttcctaggatggtatcaccatctgaggatgttcgcaaggcaagtgctgaagcagagaagctattggattcccactttgtgctttgcaggcagcgtgaagatgtttatcgtgtcataaaagcatttacagtgaaaggcgagagaataggtcctgaagcaacaagatttcttcagtttttggtgaaagagtttgagcgcaatggagtaaaactatctcaaagcaagagaaaagaaatggagaaattgaaatctcatatagatgcattaaacttgaagtatctccaaaatttgaatgatttcaccaaattccttcttttaggtgaagatgaactagctggaatgccctttgagttccttaaggatctggaaaaggctgatgggaagtttaaggttccgttgactagttaccatgttactccagttcttgagcactgcaaggttggctctaccaggaagcagattgctgttgcttatggacaaaaaggtgggaaggataatgtagccatcctagaaaatttggtccagctaagacacaagtttgctaaattgctggggtacaccaactatgctgattttgctattgagcccagaatgccaaagacttcgaggaagatcttagagtttttggaagagatgtctgaacaattaagtgatgtggctaatagagagctcaacatactcaaagacctcaagatcaaggaggaaggaaatgctcagtttggaatggaagatttgttgtactacatcaaaagagctgaagaattcaaggttgatcttgacgttggtgaaattaaacaatacttccctgttggcctggtcatatctggaatgctgaagatatttcaggatctatttgcactacgattcgacgaaattaaggatgttgatgtttggcatgatacagttcgtgtgttttctgtttgggatgcaagttcaagtgatcttttgggttacttttttcttgatatcttttccagggaaggaaagtatgcccacacttgtgttgtgacccttcagaatggatgcttatgttctaatggtacacgtaaggttccggctgctgtgatattatctcagtgtccaaaagagtttgatggtaattcagcattgctgcggttccctgaagttgtgaggctattccatgaatttagccatgtggtccatcacgtatccaacagagccaccttttcaagattttcaggccttcgactggagggtgactttgctgaaattccaagcctgctactcgagaattggtgctatgagagtatttctctgaaaatgatgtccggcttccatcaggacattacgaaatccataagtagtgaagcttgccaatctctgaaaagaaggcgtgatttgtttgctggcctgaaaatgaaacaagagatacttttgtgccttgttgatcagataatacattcaagtgagaatgtggacattgatgacttaatcaaggatcttcaccccaaggtaatgttgggtatacctttattggaagggaccagtccagcttcaagttttcctcgtattgcctttggctatgatgctgtgtgctacagttacatatggagtgaggtgtttgctgctgatctttttgtatcaaaatttaaagatgacttgctcaatcagcatgctggattgcggttcagaaataaggtgttggctccaggaggctcaaaagatcccctggagataataacggactacctaggaagagaaccatcactccaaccttttattcagagcagaacaaggaacagtctgtgagggatcatttatgatgtaaccgttgagttttttctttcttttttcctttttgaatttagctatagaaggcctgctgactgtctcgagttatttttttcgtaacggactgacaagtctgatctttgtgccattctgttttccgacgtcatttgtttgaccatttagttaagctggaatacaaaagatgtcgctagattctgctgtgttttcctaaccttagcatgctttcaagctcccatcaaaacgtctgagcacgtgaatcaagattgcacagaaagttagaaataag

SEQ ID NO: 38983 - DNA, 1472 bp, Zea Mays
gccgacgagggcgagtgggcggcggtggagcgccggggcccgcacctgtgagcgtcggggcggcccttcttcgtgcacgactcatttcgcggcggacgccgccacgcgcgccgcgttcaccgctgctctagtggacgccgcccgcgcggacctcaatgtgtgctgcacctgggccttcaacgacggcgggtaccgcgcgctgcagctcaagcacttctcctacgacgaggaggtcttctatgcattagattttgtgatcagcgaggcaggaaactataagatgaggctgatactgtcactgtgtaatagctggtaagattatggaggtaaggcacagcatgccaaggtggggaaaggaggctggcctggatcatacttctgatgacgccttcttccctgatgccacattcacaagcatacattgttctttcatatcttaggctgttttgatgagaaaaaatacaatcacaaatgtcgcctacatggatgaccctacgattcttgcctgggagctgatcaatgagccatactgccattcagatccatcagccaacacattgcagagatggcgtcttatgtgaaatctatagaccctgtgcaccttttagagatgcggcgttgaagggttttatggtccgtcgactccaaaacttctgcatgtgaacccagatggcagatgcttattctggaactattgggatggattttatcatgaaccatagtgcactgggaattgatttagcttctgttcatatttgttctgacagttgataagtccccatattgtcatgagctgttctggtgcagagaagaaggggctgtgatctgtatctatgaccaaaacctcactgggtggccactttttgatcatggagtcttgctgttgaggatccagcatgtggtcgcgctccatctttatgaaagttcgtttgattcggttcaatctctcatcatctccttcgaagcttgctgtactgatagctgttgcaggccacggacgcatcagcattgaagcaagtactgattcctataccagataaaaataagaatggctttgttgtgatagtcgatcacgctggaattctggcctcaaggcaatggttgttggaggatcatctgctcctgcaccaagtgtcaactcaatctcgttctcgggcaaagtcggagggtctatgtggtttaaaaagatggcaaacaaattcttcaaaaacattacatcgttcttatcttcatcggcttgaaatccaaacggcagcattgtggcggccacgaaaaatgcttgaccgatcctgtcaacaaattcatgcattgcatggatcacactcagccctccagcgccatgtccgatcagaatcacctagaacaagaccggagaatgggttagcatacatatggacagcaccaggcactggagtctggaagaacacaagcgattactacagatgagagattcacaatgacttgatgatcag

SEQ ID NO: 38984 - DNA, 2457 bp, Zea Mays
acacgtgcctgtggcacgtgcctctcaagtctcaactagtatgtagaaattggctagtcgatcggatactccctttccctgcgaagtgttctacgactggtggactctcttggctgtggctgctgatccgccaatgtcaaaggcacgtgcagcagcagttgcccttgcccctgggtctggttgatcgcgatgcacatgaccggagcctgactttggtgcggcgtgagcacgatgatgcgttgcgcggttcggattcgtgagagctgtagtcaaaaggctggaacggatggaattatccgagcagattgggtgggacggcggagggagccctttgcgccgtcacaaatcgcaaccaatcgccgagttgcttgtgttaaatagctcttcgcgtacgacacggcaagcgggctgcgacggcgactttctcatctgctcactgctctgcttctccactccgctccgctggcagcgcaggccatggcgacacaggcgctggcgccctccctccgcctcctcctgctgctaccgctgctcgccgccgccgccgccgccgccgcgttgtctcacccagcgcacgagttctgcgcggtcgggggtgacgcctccggctgcggcggcggaggagacggcacgaggatcctgatcaagggcgggacggtggtcaacgcgcacctcgcggaggaggccgacgtctacatcgaggacggcgtcgtcgtcgccgtccgcccagacatcccggttgatgttgataatgtcagggtaatcgacgcaacaggaaaatatgtcatgccaggtggaattgaccctcacacgcacctggagatggagttcatgggcaccgtgaccatagatgacttcttcagcggccatgctgcggcactggcgggtgggacgacgatgcatattgactttgtcattcccgtggacggcaacttgactgcagggttggagtcctacaagcacaaagccgcaaaagctgccatggattatggctttcacatggccattacaaagtggaatgatgaggttgcaagggaaatggaagtgatggttaaagaacatgggataaattctttcaagtttttcatggcatataaaggctccttgatggttactgatgacctcctcctgcaaggcctacggaaatgcaagtcgcttggtgcccttgctatggttcatgcagagaatggtgatgctgttgccgagggacaacagcggatgattgaccttgggataactggtccagaagggcatgctctctcaaggcctccaattttagaaggagaagcaactgcacgggcaatccgtttagctaagttcatcaatacgccactgtatgttgttcatgtgatgagcatcgacgcaatggatgagattgccaaggctaaaagagaagggcagagagtcatcggtgaacctgtggtttctggactagtgcttgatgattcttggctttgggatcctgacttcacgattgcttcaaagtacgtgatgagtcctccaatccgggaagcagggcatggtaaagcactccaagctgctctttcatcgggaattctacagcttgtaggtactgatcactgcacattcaactccacacagaaagcttttggttctgatgattttcggaagattcccaatggtgtaaatggtcttgaggaacggatgcatatactttgggacagcatggtggagactggcaagatttctgtaaccgactatgtcagagtgacaagcacagaatgaccttcaacatattccctcggaaaggagcaatcctggaaggatctgacgcagatatcataatcctgaaccctgaaaggagctttgtgatgggtgctctcacacaccattcgaggtccaacaccaatgtgtacgagggcaggaaaggaaagggaatggtggaaataacaatctcaaggggccgagtggtatgggaggatggcgttctgaacattgcacctggttcaggacgatacgtcatgatgccacctttcggctacgtctttgatgggatcgagaagtccgatgcgacctacagagcttccctccgagcccctgtacagcgtggtaaagctgctgcatagctatgacagctgctgatgccattgacagggcagtagccccccatctgattcaagaacgagttgctccaaggtgaacaccgcatcgttccatgcgtattgtctatacagaacagtttatttaagatcagattcaggataggtaaaggcctcagcttgcctatgtacatcaaacacatttgttactagttctggtcaatttgtgcaactagcaattcgctgttccaataaatcatattatcacattcattactcgcattgtaatgttaaacccttcttcctattcatcatgagctatccccaaacatgctaaaagaacatggttactgattgttcatgaaaaggatggcctatgcagtactgtgattctttg

SEQ ID NO: 38985 - DNA, 3305 bp, Zea Mays
cacaagtgcggtgccataagtgacagccacctcagtctctgtctgtggagctctctctcgcgcgcgttgccatctcgcaggttcttcatctcgtcgctctgttcaggcgcaggcggcgacaggagatggacggggagcaggcggcgcggtgggcggcggcgcaggagggggttcccgtcggggcggaccttgtcgcggcggcgctgcggcagctgcgcttcctcgcggcggtggaccgccgccggtggctctacgacgagggcccgctgctcgaccgggccatacgcaggtacaaagcatgctggcttccgcttcttgacaagcacactaagggtgtggttgtagatggtccattggttgttcctcttgattgtgagtggatatggcactgccatcgccttaacccggttcagtacataagggactgcaagaaagtgtatggcagaatactgaacaataacaacgttgagtcgtccactcaaacaaagtcgacacttgagtcagaaaaagtttggaaagagctgtatcctgaggagcccttcgaattgttgttcacaagaacctttgacactgccgtggatgtcaaccctgcaggtgcagaggaggacattacctatgatctggtctcggctgttaagagacaatcctctttctattatcaggttggaacaccaacaatgcatgatccacggtttctccaagaagctctagctcgatacaaggcgtttctttacctgatcaagatgaatcaagaaaaaggattgcagcgcttccgtgtaccaacctatgatgtggatctgttgtggcacactcaccagctgcatcctattacctaccgcaacgacatggtgaagcttcttggaaaagttctggagcatgatgacaccgatgctgatcgatctgaagggaagaaactcgatgttggatttaccgagactactgaacagttcgagagtacctttggtgtaagatactggaaggctggatgtatgtaccgtggcaacgtgccatctcctgtgacatccactcctcagacattcagtgctgaggttggtactgggtcttacatctgcaaagcccagaaagatcttaatgcccttgatgtaacagttgtagagttatatttacaaattgtagacatcaagaatttaccatctgctgttcaaaaagaaaatgtgtatgtacggttcgccaagaatcaatcagatatgttcatcagtgacggcggcaggttggatatctcaacagttacagggaagaacaccggagtttgtttacagtgtgaacctaccggagaactcattcttgcagtaatggttgatcaattatcaaagaaaccagaaccgatagggaaggtttctttcccactgcacgatttgacagggcctgattctaagctctccttcgagaagtggtttgaactgaaagctcatggatggagccattctctctcaagtcatgtcttttgccacattccatcaaggatcagaacacgggcagctggactcgtttcgtaaatgattgtggtaccgagcttatccgtctccagataagagagcacaaggcgaagaatagcatggccgtcgttcgagaattggttggagtattgaagtcaacaaaaaagcaaattcaacttgcagaattcaaggaaaacaagtggaccctaaaagactccaacttgccaataagtcatggcactgatggcagtctactcgatctcaaaggtgacaaccatctgatcaagctttatcggggaaggaaactggaatacgagcgcaaatgttgcagcgctcactctgaggacgtatcagctgttactgctgtaaagttctgtgctgaacatccatatggcaaagccgttgccttgctagacactgaagctcagcttatcatggtgaacgaggattggctcctacttccatggatctccatatcagtcctgtttatggacggcgatggcggtacgaaacttggcggcggtgccatggttcagaaaggtacagtgtttggatccgacactagcatggtgctagagacacagaccgtcggagcagggagcgtggcatccaatctagcacaatgtggcacttgcagcgccgtgttcggtggtgatgataaagaaatggcgaactgcaaggttgagcatgcgagctctggcgcttctcgcacggttgttgcaagtggtgagaatgggcacactgagactgctggctgtggaggcggctgtggtagcaattgtggacccatgatggctgaagaccccaaggccggcaatgccaagtccggaggctgtggttcggggtgtggtggtggctgcggtggcgcgggaggttgtgggaccatggccaacgaaggccaatccaggtccggaggtgttggcaccttgttgagctccaacgccatgggtggtgagggccagcaggcccattcagctggctgtggctccggctgtggtggtggctgcggcagcggcatggtcatcgaaggctccaaggccaacaacgccatgtccggcggctgtggctctggttgcggtggtggttgcggcagtggcatggtcatcgaaggctccaaggccaacaacgccatgtccggcggctgtggctctggttgtggtggtggttgcggcagtggcatggtcaacgaaggctccaaggccgccaacaccatgtccggcggctgtggctccggttgcggtggtggttgcggtgccctgttcaacgctagcactgctgccggagagggcctgcacaataagtcggctgggtgcggcggcggcgggtgcggctccgggtgcggcggtggcggcggctgtggtagcggcatggctatcgaaggcttcaaggccaaccacgccaagtctggtggctgcggctctggctgcggtggtggtggctgtggcactggcagcatggtcgctgaaggctccaacggcgggaacgccaagtccggcggctgtggcggcggttgcggtggcggaggtggctgcggcggcggaggctgtggcgggggttgcggcgccgtgttcaacgcatgatctcggtggagtggaggcatttgtgcagacatgcagtcgtcgtcgtctactgctagataccacatgctacagcatactgtgtattgctgtgcataatctactaaataaaaggaatgaataaacaatggatggatcggctgcctccgtggcgtttctgcaaacgaaaaatctcggtgttgttgggtgcagggatgaggatgaaaacgatttcaaacggtccgaaacgatatcgtctatttaacggttggttaagaaattacctgattta

SEQ ID NO: 38986 - DNA, 1185 bp, Zea Mays
actgctctcatgggcctagcgggctgaaccttatgtttcccctgcctgctgctgctgctgcgagccgaggtcaggtcggctacagtgcacattgctaaacgctcccgccgtctcgcgagccgccgccgggtccttacgcaagtccgcgacgtgcatcgcctggagaggctcccgtctcgccgccctggggatcccatctcatctgtgcagccgcgcgtggcccaagggagccagaagctaagagttagagaggcgcgtgatgtcttcagaggaggcgagggcaagcttttcggagttggtggttggttcgccaacccggacagagggcgaaacttattcttcaggtgatatgtcgtctgaggagggtgcacacgtcacttgtttcacagaggatcttcacgatgtaacacttcactttcagatagtgaggttttctaaacagatatacgtgtgggttggatgcaacacagcaaagtttggccatttatatgctgctgcaaccactagaccggataacagagtgagtgttacctctgtactaggaggaacatctgataacaccggttcaagtatggctcgccgtctagtgctgaagactggcctgaacatagtcctggcatgcaacatcccaaaggacagccccatacttgaggtacttacaggctgctgcggagaggaagctggttgagaagctgaaaggtttgggctacattaaaaccccagctgtgggggctaacacttcctcggcacaatgatccgtggtgtgatctagtgagctttcggtcgacgtgtagcttcatcactacatccagcagagagcggttgtgatttttggcgggctttgactgtgctacctgttctctcatgtggcaaaaggttattgtgaacatgttcgttgtgatgtactccgccctaaaataaacccccttcgtatttcaaggagaaacaatcttaattctgactaaatatataccaaaaatactgatatttatgataccggataaacatcattagattaatcatgtcatacattttatagtaaatatgtttagagatccaaatgtagatacaatttttaacctaatgaaagttaagattgattgatctgtcgaaataatgagatgaggacgtagggagtaaatacgatagtggaatgcatattgtacaatgccttgcaactttgag

SEQ ID NO: 38987 - DNA, 1769 bp, Zea Mays
gccgcctcctctctccgcacaggctcaccaaacgacgaacactctccctcgacccgtgaccgtgagcaagcgggtggcgacggcgcgcggccggccatggtgagcgagagcaaccgcggcggtgcggaccggacgacggcggcgggggaggagcgcgggcagctgctgttcgacgtgccggagatcaggttcaccaagctcttcatcaacggatccttcgtcgacgccgtctcaggccggacgttcgagacgagggacccgcgcacggggggcgtcatcgccagcgtggcagaagctgacaaagaagacgtggacttggcagtgagggcagccagggccgctttcgaccacggcgagtggccacgcatgtctggatccgaacgggggcggatcatggcgaggctggccgacctggtggaggagcgcgcggacgagctggcggccctggagagcctggacgccggcaagcacccggccgtgacccgggcggtggacgtcggcaacgccgccggcagcctgcgctacttcgccggcgcggccgacaagatccacggcgagacgctcaagatgccgggccagttccagggccacaccctgcgcgagccgctcggcgtcgccggcgtcatcatcccctggaacttcccgtccaccatgttcgccgtcaaggtggcgccggcgctggccgccggctgcgccctggtcgtcaagcccgccgagcagacgccgctcagcgccctgtacctcgcgcagctcgccaagcaggggtcccagacggcgtgatcaacgtcgtgccaggcttcggcccgacggcaggagccgcgctggcgtctcacatggacgttgacatggtgagtttcaccggatccacggaggtcgggcgcctcataatgaaggcctccgcggagagcaacctgaagcccgtctacctggagctgggcggcaagtccccgctcatcgtcttcgacgacgccgacctcgacatggccgtggagctcgccgtcggcgccagcttcttcaacaagggagaggcctgcgtcgccgcgagccgcgtctacgtgcaggaacgcgtctacgacaggttcgaggagaggttggcggagaggatgaggagctgggtcgtgggcgacccgttcagcgaccctagcgccgaccagggcccgcaggtggacaaggctcagtatgagagggttctgagctacattgaccatggcaagcgagaaggggccactcttctgactggaggaaggccatgcggtccggaagggaaaggctactacattgagcccacagttttcaccaacgtcaaggaggacatgatcatagcgaaggaggagatcttcggacccgtcatgtgcctgatgaagttcaagacggtggaggaggcgatcgcgagggcgaacgacacgcggtacgggctgggggcgggggtggtgacgcgggacctggacgtggcgaaccgggtggtgaggtcggtgcgcgccggggtggtgtgggtgaactgctacttcgccatgggcagcgactgccccttcggcggccgcaagatgagcggcttcggcaaggacgagggcatgcacgcgctcgacaagtacctggccgtcaagtccgtcgtcaccccgctccgcgcctcgccctggatctgattctctttaatttctggtgtcagtcacccacccacaacacatatacagcagtggtcaaaagatatttatttattgataataaagtagctagctatattgtgcggaaatccttgtagctagtcagct

SEQ ID NO: 38988 - DNA, 2260 bp, Zea Mays
ccgattccctcagcggtcaggcgggcctcatgcctcatcccctaaccgaacaggagtagccacggactccgacactccgttcaacccccctgcctttttgctctcctgttcaccccttgtgcccgcgctctctcgtggcgacgacttgcgcgaccgccgccaacgccaggcacctaggtcttcgtcggtcctttcttcagagacgagcacccaacagggggctacaagattggttttgatggattatgacaagtctagaagaagtaactccaagaagaggacacattccaattctgatgacggaaagagaaaacggttaaacactaggcatgatgacacatctatgttctctgagccaattgaaaccatctacaggatattgtgcccggtaaaaaagataggcagtgtcttgggaagaggtggtgacattgttaaggcccttagagaggaaactaaagccaagataagggttgctgattccattcctggtgcagatgagagagtaattatcatcttcaattaccaaaatgagcctgaaccgactgatgaagcagctgaagaaaaaaatagtgatggcttagggaacttcaaatcccattgctttgcccaagatgcgttattgaagatacatgataagattgtgtctgatgaaattcatgatgaagtcgccaatgatgaaaagtctgaaagtgcagatgatgtgactgctcgaattttggttcaaggcaatcaagttggctgccttctaggaaaaggtggctccattatacagcaactacgaagtaatactggtgctggaatccgtgtcttgccatctgaaaaccttccccagtgtgcacttaaaagtgatgaactggtgcagatatctggagcaccttcccttgtaagaaaagctctatatgaaatatctactcgtctccatcagcatcctcgtaaggaaaatagacctcttgaagaaataatagatgcaagcacacaaaggaaacgtgaatctccaacactacaacatgaatattcaatgttgccgcacctgcatagtgatcatacacctccaatacccctgcttgatccatatagaagtggaccacaatatcctgttactgaaactgaagagttctctatcagaattctgtgtgcttctgagctcattggttcagttattgggaaaagtggggccaatgttaggcgtgtagagcagcagactggtgctcgcattaaagttcaagagatcgacaaagatgcttctggagaaaggctgatcattatttcatctaatgagataccagctgaaccaatatccccagcaattgaggcactcattttgctccatgataaagttagtgcaccctctgagaaacaccattcaagtacaaggcttgttgtaccatcaagcaaagttggctgtattattggggaaggtggaaaagtgattactgacatgagaagacgaactggggctgaaattcgagtttactcaaaggcagataaaccaaaatacttgtcttttgatgatgaacttgtgcaggctgctggacaaattcatggacgtgaggattacagagaaccgacaagtgctaccgggttcttgagcactattgaactaaggattccaaatagttctttggggtctatcgtcggtgctggtggggtcaatctagcagagatccgtcaggtttctggtgcaagactgaggctacatgaggctcatgctggttcttctgagtctgtggtggagatccagggcacactggaccaagcaaaagctgcccagagcctcctgcaaggctttattagtgcaaacagccggcagcaacagcagccctattcttctcgcatgccactttacccaagctggggatagcttctggtctcatggtcgtgtcagaggaaaacagagtcagcagggtttgtcatgtggctgtagatctcggactgcagattagctgtagcgatgatgttgttgaaggaggctgtttaacagtgcaagcaagataacttatacttatgccttaggacaagtaatattgttttcctctgatgaaatacttggtaacgatctgtctctgtatttttatatttgattctgaatgctttgaaccctagtgttacaaaagctgctattttgaggtcagactacggaggccgaataattctgttatctgcagaattgggcaaaaaagcacatcttgctgaggttcctatgtcttcacccatatcgtttcatattttgtccagaatattggaaaccctaactctagaa

SEQ ID NO: 38989 - DNA, 1972 bp, Zea Mays
gtcgtctttccctcgcctctctctctctctctctctctctctctctctctctctctctcgaaacccacgtgaagcctgagcgccgaggcctcccctccgtccaccgatcccgccgctcccctccatccgcattcctggccacgagccgtgaaatcgggatccgctgcggccgctgatcccgacgacgagcccggattcgcccgccggccccatgggtcccgtcttctccggccgcatttgggacatatagccgtcgcgcgctcttcttcctgggtggagcgtccatgaggtggaagcagcagcgtccctagtgccagggtctgtcggctgagtgcgggggagaatgaaaggagtgtccgaaggcctgatcatcgggaccacggtcggggtggtcataggcgtgctgctggctctcgggacgctgctgtgcctgaggcggcgtcggcgttcccagacgcagataaggagcagcagctcgaggagggcgtcgactgtccccatccgcaccaatggcgttaacgcctgcgccatgctctcgaactcgaccacggggcaggagtctccgactccgcgggagctcgaagagcgtgggagttctctgtggatccaagggccaggtagaaagagcgtgatctctgcttctggggtacccagatatgcgtacaaggagctacagaaagctacaagcaatttcacaacattgttaggccaaggagccttcggccctgtctacaaagcagacatgtcttctggcgaggtactggctgtcaaagtgctgtcgaacaattccaggcaaggtgaaaaggagttccaaaacgaggtcttactccttgggcgactgcaccacaggaacctggtgaatttggtcggctactgcgccgacaaagggcagcatatgctactgtacgcgtacatgccgaacgggagccttgcgtcacacttatacggcgaagacagtgcgccactaaagtgggacttgagagtaagcatcgctctggatgtcgctcggggtctggagtacctgcacgacggggctgttcctccggtagtccaccgcgacatcaaatcccccaacattctgctggaccaggcgatgcatgctagggtcgccgacttcgggttgtcgagagaggagatggtcactcgcggcgacggcgccgccaacaacatacggggaacctacgggtacctcgacccggagtacgtgtccacgcggtcgttcaccaagaagagcgacgtgtacagctacggcgtcctgctgttcgagctgatcgccggcaggaacccacagcagggcctcatggagtacgccgagctcgccgccatcaacgccgacgacgggaggaggaccgggtgggaggagatcgcggacgcgcggctaggaggcgcgttcgacgcggacgagctcaacgacgtcgccgccgtggcctaccgctgcgtcagccgcgcgtcccgcaagcgccccgcgatgcgggacgtcgtgcaggccctggcccgcgtggcgaggcgcggccgcggccgcggcaggaagcagcagcaccacccgccgcaggccagcagtgccgccgcgggcgacgagtccgccgtcgacctggaggcggaggaggggtccgaggcaggccggtcgtcgttctctggccttcttcagagagaggagtcggtcggcagcgtctctgatctaccagatgtctgagcctgacggattcttttgtttttgttgcctagagatgcagttttgagcagtgagggtgggtgtaacttgtggtggtgcctagtcaattgtaagtgtgttgtatagagtgcattgtgagttgtgactacttttgttgatatacacaagctgattgttaccatgtcatttgtcattgcctttttcagcttatgcatgcatggcgcatatacatcacagtgtaaaaagttgttttgcactatagactcctttgaaataaagaaaaaatatgaagaatttttt

SEQ ID NO: 38990 - DNA, 312 bp, Zea Mays
caccagtgtatttatacgaccatctgtgaaccccttggccatcccaacctatgcagtcgtgagccaccattgccgaagtgtgagcgcagagaaagcgagaggtaactcgaagccgctattgtggtcctcacgattcaccgacgttcggtcacgtggtgtggtctgggggcgtcgcaggtgcacatggaactcatccgtggccatctcaggcggggaaacccaacagtgacccgctaattgctcatcggagcaatctttatttcgtcgaaccgccctatcccgcggatagggagctctactactcgaattcag

SEQ ID NO: 38991 - DNA, 2685 bp, Zea Mays
atggaaccattcgtcgccgcgcaggggctcgtgatcgtgctacagcggtcgcacgcacgcgcctacgacgacccgttaaacaaaccaaacgtccaaaccaccaaaaacctccgagaaaacaaatccaccggcgcggagttgccctccttgctgccaccagcaccacctccatccgtccctcctccccgatatatcgccaccaccggctctactgctcgtaacgtctcctccctgcccgactcctcctcccccacaaggttcggctacccggcggggcggcgcgttctctgtccggttcctgcgtcggcggccgggcggatgtccctgttccggcggctgttttaccggcggccgcccgatgggctcgtcgagatctccggcaacatcctcgtatttgaccactgttactccacggatttgttggaagaagacgagctaatgccatacattggaggaattttaaaacagctacttggccgccactctatcgactcattcatggtattcaactttgagggaagcaagaaggacaatcaaattgccagcattttctcatactatgacatgtctgtgatgggttacccacgtaactatgaagggtgccccttgctcaccatggagatgattcaccattttctgagatcgagtgaaagctggctctcattaagccaggacaactttctgctaatacatgcagaacatggtggatggccaattcttgcttttgcattggcagccttattggtttacctcaaaaggtataatgatgagaggaaagctctggaggcagtctgcaaacaggcacctgatgggttagctgagtttttttcaccactggacccagtgccttctcagctgagatatttgaagtatgtgtcaaaacggcacaaatcactagaatcatggcctcctgttgacagaatgctgaatctgaactgtataataatcaggaaggtgccaaattttgatgggcaagggggatgtagaccaatattccgcatttatggcctagatccccttgcacctaatgacaggggtactaaacttctctttttgaccccaaagacaagtgattttgtccagctctatacacaggtataatttttgtcattatcggattggtgtcttactgtatgtctgtgatatttcagtggttcaatatttaaaaattgtactgatctatttgaaatatacctacaagcttacaggttgaattcaatccattttctagtagattatgaataagtccaaacttcaaagcacttaaccttcattgtttattttatttatatcaggttcccatttcctttttcatttccatttggtacagtaggtgtatatttgatttaaatgtgtttattgggtatcttaagatatcttcaagcttgtttgcatattaaactgttctcatttgcaaattcaggaagactgtgagataatcaaggttaatgttcattgtcctgttcaaggagacattgtgattgagtgtgttagtctggatgaggactttgaacatgaagttatgatgttcagagccatgtttagcacagcttttattgaagacaacttgttggtacttgataggaacgagattgatattctgtgggacacaaaacaccggtttcctgtggacttcagagttgaggttatattttctgatatggaaataggcacagcagttcacaaatcagggttatctagcgaggagaaagaaagcctttccaaggttggtgatgccttcagccatctggaatggtcaagcaaaagcgttcacatcacaaacgaagattcaaaacagaagggattacagacagaacacgatggcttcgaaaaaatacctctagaggaaacaggaaccagcagcgcatcagctggaaacagcagcagaactgtccagattcatcacatagaacctgctgaaaaccattcttctcttgccagtgtgcattcttctccagaacctgaggcttctggttctggaccgaactttcaaggaggtcaactctccaatgatacatctgcacaggaggaacacgaagtggatgacaccaaagtcgaacccaatccagaaatcccccgagatgcagaagctggtgatgctgatgccgccgccaccgccgcagaatggtctgacaacaactcggatgtgttcctatcagacacgcacacgccctcgagcagcacgccgtctagtcccccaaagttcgacgaagacatcctggaggctggtatggttggaactcgatcacagctcactgaactgaagatataatgggtctcctttcttcgactgtaaattggggctcacctgatccatggatgatggagctgcccacacacccaaaacatgtactttcacagatacgtttacgcaacaacatgggcaaatgatggtagttcagccccccccccccccaaatactcatatatgtacagctgatattctcaaacatgtataaaaaagatttgtgcagatttttgttgcttaccggagtatttctattgcactcattaatagtagcaccgatgaattcttgatagatttgtcccgtgaaaacgagctgacgtgcttggcgtctgaccacaccgcgctggtgtcctttttaatcggtcgagtcgtcgagctcgtggcggctgcgctggcaggatttcctcatcatgagcacgggcccacaaaggcccaac

SEQ ID NO: 38992 - DNA, 209 bp, Zea Mays
tgtgagctcacccttgttgtctcacacccccacaggagaagaacatgtggttcaagaggagccacacaacgaggagttcgattcgatctaggtggcgtctcccagttgactttttggcgccaaggatggattttagatccttttatatttatcttttattttgtaagacttctgatgtgtaataaatactctggtttttgtgacattta

SEQ ID NO: 38993 - DNA, 405 bp, Zea Mays
agggtactccatttatgaaagccctacttacaacagaagttaagtgatccagccaaaaattcatgatcctttacatgccaattattaaagtaccaccgcatgggaagaaaagtagcaactgcaattctgaagtttttgtggtagatgccgactgcattatttggtttgtccgaactctaaaatgccaccattctctttgtccttccgatgccaccattctattttagttaattactccattcctattgatttttgcgtctccttccaattaaagaacatcctcgattttataaacttaccaaggacatcatttacaggcaattggttggtaattcacattaactatttcatctcctagcagtacattttaagggttcaaattgatcgaaagcgtagatctggctc

SEQ ID NO: 38994 - DNA, 721 bp, Zea Mays
atagaaaaagagaagaatgccaatatggcctacactctgcaggatataaagtttagcgcacataatgactgagcaatttctgtaaaattagttaaccttatttttaattacatagatatgtagcttgtagctagaaaaatgataactattaactaatactaaaacattaagaatatctaaatgggtcctgcctgagctatcatgagctcatcatgatcggacggtagtagcggcactgttgcggctggtcgtctttcttgacgatgagtaaatgcaggagatagtcgccaaagatatccttgccgaagagacggaagcggggctgaacgaacgcccagacttgtcgttcgccttcaacccgcactcacagatgaaatcgatgtacccttgcccctttacgattgtgccgttgctgctctcccacccgcgacagtagcaggtccttgttgccggcgtcgaggttcaccagcttcacacccagcccgctgtgcactttcccccgggccttggatttcttgatcttcttgctcccggcggcgctggaggaggcgtcgttttgcggttccaccgcctcgggctgcggctgatcgcctgaccttcgtttcggtttcgtggctgggaggaggaacggggggtttgcgcgaggagtggcgggcacggggctgcggtacaggcatcgcatggctgggcaggggcgggggctgcaggacgcggcgagggg

SEQ ID NO: 38995 - DNA, 3048 bp, Zea Mays
atgcactatgcctccttgctcgctggcttcactgcattgcatgccagccttgctgcaccactagttttgctgagccgtatctgcacgtcaacctggtgccgcgccccacatgttgtgctcccaattgctggttccactgtttgggctgtgcatgagttgaagctcagagctggcactgttgttgtagctggtagagcaagagcaatcgttattgggattggttctaatactgcaatgggaagtatacgtgatgctatgctaagaacagaggatgaagcaacgccgttgaagaaaaagcttgacgagtttggtacttttttggcaaaggtgatagcaggaatctgcatacttgtttgggttgtaaatatcggacatttccgagatccttctcatggtggctttgttaggggtgccatccactattttaaggtggctgttgctcttgccgttgcggctattccagaaggtctcccagctgtggtaacaacgtgcttagctcttggtaccaagagaatggctcgcttgaacgccattgtcaggtcacttccctctgtcgagacattaggatgcacaacagtcatttgcagtgacaaaactggtacccttacaacaaacatgatgtctgtgtcaaaggtgtgtgttgtgcggtctgtgcaccagagaccaatgactgatgagtactccattagtgggacaacatttgctcctgatggttttatttatgatgctgatgggttgcagttagagtttccccctcaatcaccatgtctcctccatcttgctatgtgttcagctctttgcaacgagtccactctacaatacaatcctgataaaaaatcttatgaaaaaattggagagtccactgaagttgctctgcgtgtgctggtggagaaggttggtcttcctggttttgactcaatgccttcatccctcaacatgctaactaagcacgagcgtgcatcatactgcaaccattattgggaaaaccagtttagaaagatatctgttttagagttctcccgagaccgcaaaatgatgagtgtcctctgcagtagaaaacaccaagaaattatgttttcaaaaggtgcccctgaaagtataatggccagatgcacacatatattgtgcaatgacgatggttcttcagtaccattgactatggacattcgtaacgagttggaagctagatttcaaagttttgcagggaaagacacgctaaggtgcttagcattagcattaaaacggatgccagctggtcaacaaagtatttgttatggtgatgaggccaacctcacatttataggattggttgggatgcttgatccaccaagagaagaagtttgggatgctatccactcttgtatgtctgcagggatccgtgttatagttgttacgggggataacaagtctacagcagaatcgctgtgtcggcaaattggtgcttttgagcacttgaatgacttttcagggtattcctatacagcatcagaatttgaaggattgcctcctttggaaaggacaaacgcattacaaaggatggttctgttttcaagagtggaaccttcccataagaagatgcttgttgaagccttgcaagcacataatgaagtggttgctatgactggagatggtgtcaatgatgcacctgctctaaagaaagcggatataggaatagcaatgggatcaggaactgcagttgctaagagtgcttcagacatggttttggcggatgacaactttgccacgattgttgcagctgttgcggagggaagggccatatataataacaccaagcagtttatccgatacatgatctcatcaaatattggggaggtggtttgtatttttgtggcggcagtgcttgggatgcctgacacacttatacctgtccagctactctgggtgaaccttgttactgatggattacctgcaactgcaattggtttcaataagcctgatggcaacatcatgtcagtcaagcctcgaaaggttaatgaagctgtggttagtggatggctctttttccgttatttggtcattggagcttatgttggtcttgctactatagcgggttttgtttggtggttcgtttattctgataatggccctaaattaccatattctgaattggtcaactttgattcatgttctacaaggcagacttcatattcttgcagtatatttgaggatcgtcatccatcaactgtttcaatgactgtgcttgttgtcgttgagatgtttaatgccttgaataacctaagtgaaaaccaatctctgcttgtcattcatccatggagtaacctgtggcttgttgggtctattattctgaccatgcttcttcatgtagcagtcctgtacattgaaccactatcagcccttttctctgtctctccattgtcgtgggttgagtggaaaattgttctttatctatccttccctgtaattttgattgatgaggttttgaaattcttctcaaggagaagcccacgaggtcgaagattccctttaaggttgtggagacgtgagatacttccaaaagagtcgagagacaattgattttaggcttcagcatatcagatgcatacaatgcaaagcgaaaagcttgtcttctgttagtattgagcctaattttggcaaatgttcatggatgaagatgacattgtacaaatctttatgtggctgatatctagggccgagcatcttcgagaatagagttcgcgactacacaattcattggggggggggggggggggggttctcagaatgctagttttgctcagaaaacatagagaagcttcgaaagccttctcactagttatagacggtgctacacttgtatcagaatgtcagatgcttacaaaaggatgagttcatgcaacacccctttctcccaaccaatgaaatcactgtacgcatcaggttctgtcaaattttcagggtgacagacgccgttctggtatttctgccattttatacatcgcaaaagttttgcaccttgatattgttggaaacaatggcatgttcggctgaaatttacaaccactgccg

SEQ ID NO: 38996 - DNA, 1656 bp, Zea Mays
cgccacaaggcactgactgtagggcccacctagcacccaccgtcccccgtgcatctcctatatataaacctccagcagggcgccacaccagaaagcgacacgaccgcgcccgaggagaccacaccacaccgcctcctccgcccgccgattcgtcgagctcgccctcccgctcgcctagctcccctgccttttcccttcctccccacctcctgccccgcgaacgtgctcccgcatgccaccgcgctgacgcgcgcggcggacgacggggtcgggatcatggacaagtacgaggctgttcgggacatcgggtcgggcaacttcggggtagcgcggttgatgcgcaaccgcgagacccgagaactcgtcgccgtcaagctcatcgaacgaggccaccgggtgatcctaactccaactcatcttgcaattgtgatggagtatgcggctggtggtgaactatttgatcgaatcgtagatcgtgggcgatttagcgaggatgagaccaggtatttcttccagcagttgatctgtggagtgagctattgccatcacatgcaaatatgtcatagagatttgaagctggagaatgttctcttggatggcagcccagctccacggcttaagatatgtgattttggctactccaagtcatcagtactacattcaaggccaaagtcagcagtggggacaccagcatatattgcaccagaggtgctttctcggcgggagtatgatgggaagcttgcagatgtatggtcatgtggagttactctttttgtcatgcttgtgggagcctacccgtttgaagatcaggatgatcctaaaaatattagaaagaccattcagcgaattgcagcaattcaatataatatcccagacaacattcgcatatctgatgattgcagacaactcatttcacgtatctttgtcagcaatccattaaggagaatcaccatgagggaaataaaaagccatccatggttcctaaagaacttgccgagggagctcacagaggcggtgcagttatcctacttcaggagggacaacagtgtctctgcattttcagaccaaacaaccgaagaaatcatgaagattgtcaaggaggcaagaaccttgccaaaatcgtcgagatcaggctatggttacagtgaagaatgctcagatgaggaggaaaaggaagtggagagcgaacccaaagaggaggaagaagaagctgagtgtgataagacagttagggaggttcgcgagagcggggagctggatatgacctcactgcacatctaaatgctgcctgtgaggctgtgacgtgtctgtagataattggctttattgtctgctgaatttggtagaacttatgcaattctggcgtcagatatagtggtctatataagccttttccatcctgtaatatatttgttttgttgaactgtatgtgtggtactccgtatatgggtttgttctaagggagcaaggctttgtacaggcacacctgattgtgtttttggataggaagttttaccgtctgtttgcacactgcagcaaacattttggagtttgtaagccatatgttgcggcatatccagtaaaaatggatgaaacgctgcaaattccgtcaaaatggcttgtataactttgcaaagattgaagataaaagatttt

SEQ ID NO: 38997 - DNA, 1601 bp, Zea Mays
cagaattccacatggaatgtgggctccatccagcttcacccatttcacctgcaatgcaagcagcgaacaacacaaattaagtagtggagtgtcagaacttgggaggcacaaattaagtacaaagcagtctaattaatgacgggcccgatggagattccggtgatcgatctcggcggcctcaacggcggcggcgaggagaggtcgcggaccttggcggagctccacgacgcctgcaaggactggggcttcttctgggtggagaaccacggcgtggacgcgccgctgatggacgaggtcaagcgcttcgtctacggccactacgaggagcacctggaggccaagttctacgcctccgccctcgccatggacctcgaggccgccaccagaggtgacactgatgagaagccctccgacgaggtggactgggagtccacctacttcatccagcaccaccccaagaccaacgtcgccgacttcccagagatcacgccgccgacacggtccgtatatatactgctgtgctgccttcgtcgattcgacctcaattagttgttgccgcacacccacacaccatgcatgcttcgtacgcgctatcattcttcatcttcatgtaacacgcagagagacgctggacgcgtacgtcgcgcagatggtgtccctcgcggagcgtctggccgagtgcatgagcctcaacctgggcctccccggggcccacgtcgccgccaccttcgcgccgccgttcgtgggcaccaagttcgccatgtacccgtcctgcccgcgcccggagctggtgtggggcctgcgcgcgcacaccgacgccggcggcatcatcctgctcctccaggacgacgtcgtgggcggcctcgagttcctcagggccggcgcccactgggtccccgtcggccccaccaaggggggcaggctcttcgtcaacatcggggaccagatcgaggtcctcagcgccggcgcctaccggagcgtcctgcaccgcgtcgcggccggggaccagggccgccgcctgtccgtggccacgttctacaaccctggcaccgacgccgtggtcgcgccggcgccccgcagggatcaggacgccggcgccgcggcgtaccccggtccctacaggttcggggactacctcgactactaccagggcaccaagttcggcgacaaggacgccaggttccaggccgtcaagaagctgctcggctaagcgaacagctgcaagtaggcagaggcagcttagctcgtggactatgcatagtttcaagcttgctgcttgcttcttgttcgatccattgtctgcatgcgtactgttgcgtgtttaaatttagcaaatcttatacgtagtcgttactggtactacgtattctgtggttgacaatacattgttgcggtttaagggcgcatccgtttggtggacttgcacatgccattcgacaaaaaagttggctttccttgtcaattaatagtcaactagtacaatgacacgcaaatattcggtaagcacacatgtccacatgttgaaaaaacatctgcaagcttccgttcagtttacgtgaaaatcaaaggggttaccggatcaagaaaaaaaaatataaaac

SEQ ID NO: 38998 - DNA, 1039 bp, Zea Mays
taggcccagccgcccagccagctcgtcggatacagaagactcctctcccttctctgcatccgttccccgccctctcgcgcatccaccgccaccgcgccgctccatgaaggacccgttcgaggcggccgtcgaggagcaggactcgccgccggactcgccggcgccgcccgaggaggaacccggcgccgcgggcctcgcggacgacgccgaggactacgacggcggcccgcccccgcgccagccgtcggcgccggcgtcgcacgcagcatcggccgcggccaaggccaagggccgggtccagagggagcagcaggaggatgacgacgacgacgaggaccagatggaggttgacctcgacaagcttcccagcagcactggcgaccctgacaagctcgccaagatgaatgctatactgtcccagtttacacaacagcagatgaaccgttacgagtcattccgaagatccggatttcagaaatctaacatgaaaaggcaagagtagtcatgagtgagaggaaggattcaggacccatcaggccttgtcacatcagggaggcatacagaagattgaagcttgaagggaagatcccacggcgctctgttcctaggctcttccgctagaactgacacacatcaggcaggagtcgggacagatgtgggacaatcgttttccacgtaactgcggacctcgtcatacgtaccatgggaattgaaaacctgtgtactgtaaagttagccccccgttttgacttcatactagccgctgatgcgctgaataacaggtggtggctcctgtcacgagctagatgtcttgaaatgggtttggggaatgatttagcaagaacaaggttaggattacagggtcgggcatgcggctgggacctgcgagacgaggatctattcgaaatgcagtttgttagaatttacttacttgcttaaggctgttttcggtgaatctgtttgacactgtttgaaggatgagtttgaaatagggataaggtacacagcgcagtgccgcccaaggtttgagaaaccggtc

SEQ ID NO: 38999 - DNA, 1512 bp, Zea Mays
cccgaatcccgaccgccgccgcctggagctcccaaccgctgacgcctggagtgtttcgcgtcaaaatgggcagtcaggcagtgaaaccgcttcgggtatttcttctgatgatgcgggtttggagacgtcatctaatatgccagagaggacagcaacccttcttgacttgtattcgggctgtgggggcatgtccactggtctttgcttgggtgctgctctttctggcctgaaacttgaaactcgatgggctgttgatcttaacagttttgcgtgccaaagtttaaaatacaatcatccacagactgaggtgcgaaatgagaaagctgatgagtttcttgctctccttaaggaatgggcagtcttatgtgaaaaatatgttcatcaagacgtggattcgaatttagcaggttcagaggatcaagaggatgctgacactcttgacaaggatgaatttgttgtacagaagcttattggaatacgctatgatggcactggaaggaaaaaaggcgtatattttaaggtccaatgggaaggatatggtcctgaagaggatacatgggaacctattgataacctgagtgactgtccgctgaaaattagagaatttgtacaagaagggcgcaaaagaaaaattctcccgcttcctggtgatgttgatgtcatttgtggaggcccaccatgtcaaggtataagtgggtttaatcggttcaggaaccgtgatgagccacttaaagatgagaaaaacaagcaaatggtgactttcatggatattgtggcatacttgaagcccaagtatgttctcatggaaaatgtcgtggacatactgaaatttgctgatggctacctaggaaaatatgctttgagctgcctagttgctatgaagtaccaagcacgccttggaatgatggtggcaggctgctatggtctgccacagttcaggatgcgtgtgttcctctggggtgctctttcttccatggtgctccctaagtatcctctgcctacatatgacgttgtagtacgtggaggagcacctaatgccttttcgcaatgtatggttgcatatgatgagacacaaaggccatccctgaagaaagctttgcttcttggtgatgcattttcagatttaccaaaggtcgaaaaccatcaacctaacgatgtaatggagtatggtggttcccccaagacagagttccagcgctacattcgacttggtcgtaaagacatgttggattggtcgtttggtgaggaggctggtccagatgaaggcaagctcttggatcaccagcccttacggcttaacaatgatgattatgagcgggttaagcaaattcctgtcaagaagggagccaacttccgtgacctaaagggtgtcaaggttggagcaaataatgttgttgagtgggatccagaagtcgaacgtgtgtacctttcgtctgggaaaccactgatgagatggtgcaagtactgtgagattcatggttaagacatgctaagttattgcacaaatctttg

SEQ ID NO: 39000 - DNA, 11547 bp, Zea Mays
atcctgtttgttggatcgtactgcgacaaggccacaaggggcatcccatcccatgggggatggcgcggtcggtgcctcagcggcggtggcgtgggtgatttaggggcgatcttggccctaggcgtgagatctcaccagctccggcactggtgccttgcacagctccatggcaagaacacaggggtcttgaaactggaacaggccccaaagtcacagtccacgctcgcctcttcggtcccattggagaatcatgttaacctccatgacgctactggcgcctgccaagcgttcgacgaaattccccacaaggacaccctggactatgcccttctcgacgacatggcagggtttcgtccaccaggcgctagaccacttcttggatgcgcaccgccgccagggcaggtgtgttggcggtggggcactgttaggcatcatcaaaatctgtgggtcagtgccagacagagtactggggaagcagctgcatgccctgtgcgtcaggtgtggacatgatcatggcgacatcagggtcggcacgtctcttgttgacatgtacatgaactggcacagtgttctggacggcaggaaggtgtttgagggaatgctcaagaggaatgttgtcacctggacatcgttgctcactgggtacatccaggctggagtgttattggatgttatgtcactcttcttcaggatgcgtgctgagggggtctggcccaatccgttcacattttcgagtgttctctcaatggtggcgagccagggtatggttgatcttgggcagcacgtgcatgctcaatcaattaagtttggttgctgctccactgtgtttgtgtgcaattctctgatgaacatgtatgcaaagtgtggactggttgaagaggccagggtcgtgttttgtaggatggagaccagggacatggtgtcgtggaacacattgatggcgggccttgtgttgaacgggcgtgatcttgaagccctacaactgttccatgattcacgatccagtattacaatgcttacagagtcaacatactcaacagtgatcaacttatgcgcaaatcttaaacaccttggcctggcacgtcaactccacagtagtgttcttaaacatggttttcattcgtatggcaatgtaatgacagccctcatggatgcctacaacaaagcaggtcaactggataaggctctggatgtatttttgttgatgtcaggatctcagaatgttgtttcatggactgctatgattgatgggtgcattcagaacggtgatatacctcttgctgctgctctttttagcagaatgagagaagatggtgttgctccgaatgatttaacctactcgacaattctgacagtgtcagaggccagctttcctccccaaattcatgcccaggtgatcaagacaaactatgagtgtacaccaactgttggaactgcacttatggtctcttactctaagctttgcagcactgaagaagctctttctatattcaaaatgattgaccagaaagatgttgtttcatggtctgcaatgttgacttgctatgcgcaagctggtgattgcaatggtgccacaaatgcattcatcaagatgaccatgcatggcttgaagccaaatgagtttacaatctctagtgctattgatgcttgtgctagtccggcagctggagttgacctgggtaggcagttccatgctatttctatcaagcacagatgccatgatgcactctgtgtgagcagtgcacttgttagtatgtatgcaagaaaaggaagcatcgagaatgctcagtgtgtctttgagaggcaaacagatagagatttgctgtcatggaactcaatgctatcagggtacgcacaacatggttacagccaaaaggcccttgatgtatttcgacagatggaagttgagggcattgatatggatggtcttacattcctttctgtgattatgggatgcgctcatgctggtcttgttgaagaaggtcagcaatactttgatttgatggtcagagactacgggatcactccaacgatggatcattatgcatgcatggttgatctctatagccgcgcaggcaagctggatgaaacaatgagcctcattgaaggcatgccattcccagcaggtccaacaatatggcgcgcattgctaggagcctgtagagttcacaagaatgttgagcttggaaagttggctgcggagaagctgctgtcacttgaacctcttgactcagctacgtacgtacttctctccaacatttattcggctgcagggaagtggaaagagaaggatgaagtgaggaagctaatggacactaaaaaggttaggaaagaagctggatgcagctggattcagatcaagaacaaagttcatttctttatagcttcagacaagtcgcatcctttatcagaacaaatatatgcaaagctcagggcaatgacagctaagttaaagcaagaaggttattgtcctgatacaagctttgtgcctcatgatgtggcagaagaccagaaagaagctatgctggcaatgcacagtgagcgcctagccctcgcatttggtttgatagctacaccaccagcggcaccccttcacattttcaagaacctgcgggtgtccggggacggccacacagtgatgaaaatggtctctgaaattgaggatagggagattgtaatgcgagattgctgcaggttccaccacttcaaatcaggggtctgctcttgtggcgatttctggtgaatggattttgaaaaaaaatggttgtgcattcaatgctcagccagtgtcccccttgaacaatatcactgagtcacttgtacttgtttccttgttaggaggcggacatcttacaggtaaaatctgatgtgccacaaatgaggacaaggtaggacttcttcacttttgaaccgtcagaagaaaggcatgctcacaagcatagacatcgaatctataggattgttcaaactccattgttacatggtaactgaatatgaggccagtcaaccaatccaccagcaaaaccagcacacatggcaatggtcacaatcatttcactctgcttcgcattatcagcacgaaactgtagaacagctcttcaagttcccatgtttatcagtctgaacaaaaaaaactacatcagccaaatactgtgtttttaggacaaccggagagttaattgtctagcagttttctcttaattttacagcacaataggactcactgcatttcctaaaatgttataattagtcagcttcagcagagaagaaagtataacatggtaaaatcacactattctaaatatacagaaaaaaatctagaaaaggctacaagtggataatgtactaagttcagaagaaaagagccctcaacatacatctttgtgtcgggtaaaggaactcaccaaatgcatcacagggcatacttaccaaatcagcctgaaacgagttgaaaagggcaaacgtgttgatacatacaaatacgacatatgatgtaatgatcatacacaagcatggcacaaaaccgtcacactaaccctttctataccaaatacatcaatatctgaatgacatgaaacaacccaagaattttacctggatactattggagtgaatattccatagattagggttaacccaacaggttagctatatagtgtttacatgggccacatgggcctagccttaacaggcctaacactctaacacccccccgcagtctggacgtccgacgcagcggagtacacagactggactcaaaaagaagaagtacatcacacaataggatctccccacagactcaactagccactactgatgttgaggctggagcgaaactcggcgaaggtcgaggacggaagacccttggtgaagatgtcggcaaactgggaggtggtcgggacgtggaggacccgaacagtaccggcggcgacataatcacggacgaagtgtagatcgatctcgacatgcttggtccgctggtgctgcactgggttggtggagaggtagaccgcgctgacgttgtcgcagtagaccaccgtgctcctggagaggggactgtgaagctcggtaaggagctgccggagccagacagcctccgccacgccgttggccacgacacggtactccgcctctgcacttgagcgggaaacgaccggctggcgcttcgacgaccaggacactaggttgccgcctaagaagacagcgtagccggaggtggagcgccgagtgtctgggcacccggcccagtcaacatcagtgtagacgaccaactcggaggaggtagaccggtgaagaagcagtccgtagtcgacggtgccccggaggtagcggaggaggcgcttgagcgccgcaaggtggggctcccgagggtcgtgcatatggaggcagacctgctgcacggcgtaggagatgtctggcctggtgaaggtgaggtactgaagggcaccggcaagactcctatagccggtggggtccgcgactggggcacccgtggcctcagagagcttggcctgcgtgtcgactggggtggagcagggcttgcagtcacgcatctgggcccgctccagaatgtcaagagtatactgtcgctggtgaaggaggagtcctgaggggcgaggctcagcagtgacccccaggaaatggtgaaggacgcccagatctttgaccggaaactcccgctgaagcgcgtcaacgaagcggcgaagaagagacggactggaggcggtgaggacaatgtcatccacgtagagtagcaagtaggcagcctctgcgccatgatggtggacgaacaaagacgtgtcggacttggcctccacgaagcccagtgtcaccagaaatgtagccagtctggagtgccacacccggggggcctgcttgaggccgtagagggacctgttgagccggcagaccatgtcagggcgagaggagtccacgaaccccgcaggctgacagcggtagacggtctcggtgagggcgccgtgcaggaaggcgttcttgacgtcgagctggtgaactggccaggagcgagcgagggccagcgagagcaccgtgcggacagtggccggcttcacaaccgggctgaaggtctcatcgtagtcgactccggggcgctgagtgaagccccgaagaacccaacgagccttgtactggtccagggtaccatcggcccgtcgcttgtgtgtccagatccacttgccggtgacgacgttggtgccgggcggatggggcaccagatcccacgtctggttggcgacgagcgccgcgtactcctcctccatcgcctgacgccagtgggggtccagcagggcggtgcggacggaggagggtaccggagaaacctgcgagtctgcggtcgtggccgccagggcacggggtggcagggtaccggccgcgtgccgcgtcaccatcgggtggacatgccgtgggtcgcgatgaaggagcggtggatggtacaccggcgacacgggccgcgggtggccgcggcggaggtgtaggtgtccctggcggggactgggccaccggcggtgacaacgacaggggcggcgacggtggaggtgcgaaccccggcggcggcagccggcactggtagacccgcaccagccgggtgaagcgggtcggaggggtcgtaaccgacggccccgtaggcggtgcagtcccaccacccctcgctcggcctgggggcgatcggagacggggctccgcggagaggcgacaccaccgtaggcgacaccaccgaacccgagcaaggtaccgggccgggagtaggaccgacaggtggtgagcgagtacctgcagagagaggaaggagaggtggctcgaccaccgcgtcagtctgaaagagagtgaagaggtcaaggtcagggtcagaggagggtggtgtggtggagtagggaaatacggactcatcaaacaccacatggcgagagatgaggacccggcgagagcagaggtcaaagcagcggtagcctttgtggtccggggagtacccgagaaacacacagagggtggaacggggtgctagtttgtgaggagcagtggcagcggtgttcgggtagcaagcacacccgaagacacggaggtggtcatagcgcggaggggtaccgaagagtgcctggtgaggagtgggggccgggcacacagtggaagggagacggttgaggaggtaggtagaggtgtggagggcctcggcccagaaacgagccggaaggtgcgcctggagaagaagagtgcggatggtgtcgttggtcgtgcggatcatgcgcccaaccttgccgttctgggaggaggtatacgggcaagacatccgcaattgcatcccgtgagagagaaagaagtcacggaaggtggagttatcgaactcccgaccattgtcacactgaacggccttaatggtgaggccgaactgagtggacacccaggcgaagaagtggcggagggcggggaaagtctcagacttggcacgcaaaggaaaagtccacacataatgagaaaaatcatcaagcaccacaagatagtatttgtagcctgacatactggtaataggtgaagtccacaaatcgcagtgtacaagatcaaatgcatgagtagcatgtgaggaagaagaagaaaaaggaagacgcacatggcggcctaactggcacgcatgacaaagatgctcatcatgggatctagtacatgggatagtggcactacgagtaagctgcatcaaggcatcgcgtccggggtgaccaaggcgacgatgccaggtggtagaagacgtggcggcaacaaaaacaacagctgtgtcaggtgacgaagacgaagaagatgtggcgtacggaagccgaagggtgtagagggggccggtgctgtcacatctgaggagggggcgtcgagttgccgagtccttcacagtaagatcaaaagagtcaaactcgacagaacaagaattatcagcagtaaaccgacgaatagaaagaagattgtggaccaaagaaggagcgacaagaacatcgggaacgcgaaaagagccgggccggcggcacccacagatgtgacaggaagacacgagccattcgccaccatgatggacgaggggagagaggaaggaggagggcgaacagaggtgagtataccagggtcgggggtggtgtggtaggtagcaccggtgtccgcgatccactcgggacccagcggcggagtcaggaaggcagccagggcggccgcgtcccaaccaaccagcccggacggtggagtagccggaggcgtgggccacgacgaagcggcaggtgtcgaggtccagggcgacggagaggcgaaggcgaaaccaggctgcgcaccagcgaacatggccgccggaggccgagcctcagagccaggcccctggaacggccacacggagatgcgccctgaccacgggtggtggaaagtgggccaaggcgcactctgctggggccccggggtcgatgcgtggccacaggcaccaccgccggaaccaccaccaccaccgcggccaccacggcggcgacgaccactaccgcccccgcctccgccacctcgacccccgccgcccatgctcggcccgggagggcgagggccaagggcagactgtgacgaagtaggcggacgggtcgtggtgaaagccgctagtgctgtcgaagaggacgaggaccccgggccggagatcgatgcagcctgagcacccagagtgatctcctccagggcgaggtcgtcgcgaacctggaggaaggtaggaaaggggcgctggcgcatgagcaacgaccggaggtgggtgtagcgatcgccgaggccgcggaggacgttgaggactaggatgcggtcctccacggggcagcccagatcgccaagtgagtccgccatggtcttcatctggcggcagtacgcactgacactgaggtccccctggacgaaggtgcgaaaagcggcgtcgaggtggagagcccgggcctcggcgttgcccatgaactggccctcgatggcaagccaaacagcccgagcgtgaggaaggttccggaggaggctgtggaggtcgacggagatcgtccccacgatccaggtgagcacgatgctgtcgaggcgcacccacgcagcagtcggcgccacaccggtggggtcgcagaggacgtggtcatccagggcgtagcggcgaagggtgagaagaagcaagtcccgccaacgcgtgtaggatggcgactctgactccaggacgaccggaaccatcaggcgaatgttctggacactcccagcctgtaggtggagctgagccacgagcgggtcagccgggtcatgccagagcatcgcggggatggtccggggcccggtcccgactgtcggtacggtcgggacgccgtacacgccgcccatggtgttagtggaggtggccccgccgtcgtgggccgcaggcgaggcgaggtgctgttccgccgcggcaatttgagcagcgatagcatcggcggcctcgcgctcgcgctcccacgcgagggccgcttcccgcaagcgggcctgtcgagcagcgtgctccgcacgagcaacggtgagggcggcgacagtgtattcctaatgggtgatcggtggaggaggcggcggatcaccaaccatcgacggggggattggcggtggcgggttggagtcctccagatcggcagttcccgccggaaccacatccgccacggccgcaagagccgaggcggcgccgacagcagtggggtccccaccggtggcgcgaggcgcagccccccacgcaggcccaagtgcgggggagacgggaaccgacccccacgctcctgctaccagggttggcgcgccagcagggaaggtggtgtcggcggcggctggcagggggtggggcacggcggcgcgtcggccaggggatgcagcgcgcacccaggaggagaggggagggaaggaggagttggagagagaggggcgctgctgaccagccatgggcgcgcctggaaaggagtggcggcggcggaggcgccctgggcggcgcgaccggtccttgcgcgacagagggcgcgcacggcggcgtcggggccgcggctggacgcggccaggcgcgggcagcagggacgcggcgtagcaggggcgcggtgccaggcagtcagggccgccaggaggagggcggcggcggcggaagccctgggctggagtctggcggtggcggctgaaaccctaggatagggtggcggcgccagaaaccctagggcgagggcagcggcggctgtagggagggtggcggcgccagaaaccctagggctagggcagcggcggctgtagggatggaaaccaggctgataccatattggagtgaatattccatagattagggctaacccaacagattagctatatagtgtttacatgggccacatgggcctagccttaacaggcctaacactctaacagatacaaagagtaaaaagggcaaattaaaagagcacacctaaaaaggacaccagacttttacattgcaacacacgtgatgggtctgaaccaacttttggtattcacaaatagacaagctctgcagacttgacaatcaaagataggaattcagaaggcgtatgatgaagggaaggatgcaaagtaaaggtattggataggtcaattgaagaactcgataacgtgtatgtgttttagaatgcaaagtaagttgtgttccttcgtttatttagaagttggttaatttaacaaaccttgctgcaagacaaatatatgttacaataattgttccaagataactgaagaggcattggagctccaaatattacctttaatttaataaacctgattttgtagcaaggtttgccatcatcaatcaaaggtgctataacattttcacaaatacatctgacatgacgttatggtcgctagatcggtgagggactggagaggggtatcggtgggcaggaacaccggccgggggcctctgcccacgaccgagcaagaggagggttttcccttctaattcttgcctactttatttctcatccattgattacataaataggccagttggccgcccctatctagctagagatccttatctcctaaaaactctcaacaaactaactgataaccttcctagataatctcaactaatctcctaaataatctcaactaatcttctaatcttatctctaactatccttatctccttaaaactctcctaaaaactctcaacaagtactaactgataaccttcctagataatctcaactaatcttatctctaactatccttatctaatcctccttagagggcccatcgctgctgctaccgcagcccctccgtgggcctccttaggccctgacactacacccctcctggacaagcagctcgtcctcgagctgcagcatgacgagtgctcaaatactgagtctacttgacctaaaaccagacacctagaagacaagccttttacatctcggcttatcttattattccgaatctgaatttttttgttgaccccataagataaggcggacaccctccgcgcattggacttgtacgtgtgcagccacctggatcccatggacaccatcttgacgaaaggggagcacatggacgggcacctggaataggtcgcaacaataaccagcgaaggcgccctcgtggcggccggtagcggaatgtggtggcgctaagtagtgcgcccttgccgatgacgaggggggtgccttccttaccgccgctgccgtagagttgaagttcgtgtcccgcgggacacgtaccatgctcacacttggagatagcggcccgatgccgctgctgatggccatccgacagggcgaggtcgcgcccccgtgtaccgaggtcaaccgtgaccaaggctgcctcgagcatctgccggcgcatctcccgcgctctccgtcgtgcaaggaagccacgagcagcagcttgtatgcccacagccgccgacgtctggagccgtgcggacaacgccagccggtgctgctcatgttgcactgctaccttgatttgcagcagcccttgctcaaccttctggagcgtggcttgcatctttgcgagatcagcccttacgttggtccacaagtcccccatcgatggagctggtgattgctgagtcgtggctgcccctagtggcgtcgccgatggggacgaagatgtcgtcaacaaagatgatgtgacaaaatttggcgttgtccttgaagatgggcacgccggcgtccaggatgtggtgacaaaattggcaggcgatgctgcccatggagatagggacgccggttgccaggatggcgtgacgaaggtggcatacggcgcaacccatggagatggggacgtcggttgccaggacggcgtgacgaaggtgacatgcggcgcagtccatggagatggggacgtcggttgccaggatgacgcagcgaaattggcagcagaagccatgggatcagatcgaaacccaagctagccgataccagatgttatggtcgctagatcggtgagggtctggagaggggtatcggtgggcaggaacaccggccgggggcctctgcccacggccgagcaagcggagggttttcc

SEQ ID NO: 39001 - DNA, 3603 bp, Zea Mays
tcttcaccaaacacacgctctctctccccttcccatctccttcctcccgccccagatccgagcccggcgcccgagttcatggcgagcgacagcgacgtcgacgaggacgagctcctgcagattgcgctgcaggagcaggcggcgcgggacctcagccaccagcgcccgcccgccgccaacaagcccgttgtcaacctcgtccgcccacccgcccccaatgctcgcggcggcaacgccagggccgggggcgccgcagcgaaggcgcgccagcccagccgcggcggcgacgaggacgacgactcggaggtcgagctgctctccatctcctccggcgacgaggacgacaatccccgcgcccgcggcccgccgccgccccgcgggggcgggggtggacgcgccggagcgcggagggccgcgtcacgggacgatggggacttcgacgatgaggagcccagaagctggaagcgcgtcgacgaggcagagcttgctcgcagggttcgagaaatgcgtgaagcaaaggtggctcctaacattcaagaacttgatcagaaagcagcagctgctgctgcagctgctgctcgaaaggccctcacgagtgtacagactttaccaaaaggagttgaggttttagatcctttgggccttggtgtcattgataataaatccctgcggttgatcactgacgcttcagtaagttctccaatttcaagggagaagtctcaaggtttggaccccaatatgcgagacattgagtcgaaattgagacagatagaggaagatcctgaaggtgcaggtactgctcacttgtattcagtgacacaaaaaattagcggtgtggcaaatcgtgcatttgagcctctatttgagaggcaggcccaagctgaaaagatcagatctgttcagggaatgcttcaaagattccgaacactatttaacctaccaagtgcaatccgtgggaacattagaaaaggagaatatgatcttgctgtcagagagtaccaaaaagcaaagtcaattgttcttccttctcatgtggggatactaaaacgtgtactcgaagaggtcgaaaaggtgatgcaagaattcaggggcatgctttataagtccatggaggatcctcatcttgatcttgctgagattgagaacattgttcgtctattgttggagttggaacctgaaacagatccagtgtggcattatttaaatattcagaatagcaggattcatggattgtttgaaaagtgtactcaagatcatgactcgagaatggaagttttgcaaaataaaattcgcgaaaaagtgctctctgattcgaagtggaggcagctgcaacaagattcaaataaatctctggaagttgattctaccattggtgattctcctcgagttgatcagttgtcaacaaactttatggctgaggaagctgatagtttaagggccacctacattcgtaggctaacttctgtactgatccagcatgttccagctttctggagattagctttatctgttttcagtggaaaatttgccaaggcagcttctggtaacgtagtttctgattttgatgtgaatgcaaagccgactgcaaataagaatgatgaaaaaggtggagaagtaaagtacacaaaccacactcttgatgaagttggtagtatggttcaggctactatatcggcttttgacactaaggttcagagtaccttccgtgattttgaggaatgcaacattctttgtccatacatgagtgacactataaaagaaatagctaaggcctgtcagactcttgaagggaaggattcgtctccaactgctgtaaaaatgttgcgcacacttcattttgaaatgacaaagctttacattctacggctttgttcatggatgcgggcaacaacaaaggagatatcaaaagatgagacttgggttactttatccacccttgagagaaacaagtcccagtatgcgatttcatgcttgcccctggagttccgtgacataacagtttcagctatggaccgaattgatactatgattcttaatctgatgagcgagactgcgaagtcatatgacatttctcaaccacttcaggaaatcaatgagtctgttagacttgcatttttgaattcctttctggactttgctggttatctggagaggtttggaggtgaactaaccgagaacagaccaaacaaagaaaacaattatgtctcaaatggatacataaatggtactagagaaacatttgttaacacagatggagatttgcacaaaaagctgctggttgttttgagtaacattgggtattgtaaagctgaactttcagaagaactttacagcaaatatagacacatttggtctccagtcaggaataatgaggagcgaagttctgacatgcgagacctgaggacttctttctctgcacttgaagagaaagtcctggaccaatatacttttgcaaagtcaaacttgatcagaagtgctgcacaaagttatcttttggattctgggatttattggggagcagcgccaatggtaaagggcattcgagatgcaactcttgacttactgcacatccttgtagcagtacatgcagaggtatactctggcgctcggcctctgttggagaagacaatgaaaattttggttgagggtttggtcgacatctttcttagtgtttttcatgagaataagaccaaagatattagattgttggatgcgaatggtttttgtcaactgatgcttgagcttgagtattttgagactgtactgcacacgtacttctcacctgaggcgcaacaggctatgaaatctttacaagagaatttgttggaaaaggcctgtgaaagtgttgcagaagccatggaaaatcctggacaccaacgtcgaccaacccgtggcagtgaagatacagcatcggatgacagacagccatcagtatcacctgatgatttgcttgtgcttgctcagcagtgcagtagtgatctgctgcaaggggagttggagaggactcgattgaacatagcctgtttcatggagtcgacccttcaaccaacagctgcgccagcaggcccaaagcctgccgcacattcttcttaccaagcacagcatgctcccgtccaaacgtcctcgcctagttttagaaggcagcagactggtacaagttcccctgtagtctccaggcggcgccggtgagcttagtgcatctttccatcattggcgtagcctcttcccggagtttccttccttttcccccctcacatgtgtgctttttttaatcacttgtaattgtcatcctgttgtcatgtgttacgaatttcgatccattcttttggtgttgtataagatgaaaaggaggagtacagtactggtgctgctgcacgggatcatggaattgtataatatcgacgagtcaaatattattgctgcttgaagataccaccacagctttatgtatatggaattctggagttgtcggtctgcgccaacttccttcctgcggtcgtcaccgcatgtttgtacattcgtcgcttggacagttttatgtatcccgagatttgttaatattgtatcagttggttcgtgattgttgatatgtctgcatgcttt

SEQ ID NO: 39002 - DNA, 1005 bp, Zea Mays
cccggttccgggcggccaggccagcagcccaggtgcaggcatgtgggcgcgtcacttcaattcacagtcccgcggcctcggcggctcggcctctcgctcgctcgctctcgtcgtccgtctctgcacctaacgtcaggaatgggcgcaccgcacccagcgcccagagagctggcttgctttcggtcgttgatttgacgacgacgagcaacgcatgcatgatgcgagatgggggcggcgatcggcctcggtcgccggtcggtcggtcaggcacaggttggccgaggcggccggcgcaccatcgtccatccgctgccgcctgccaacatacgaggtgtgtgtgtctgatcgatctcatctgacatacccacccaaccagcacacacggacggaacaacaaccgagtgtggcgcatatataatgatttatttccatttcccgacggataatatttcttctctacacacaaggcacgttagctgctggggggcgccgcgagcactgcaaataagatagtcaaattttgacgtctcatatagtatatataatagtagtatgcgttatccaaacctgacaaataatcatttggaattaaagaatcggatatacatatacacgatctttcattcattcctctgcatggaccgtgccattcgattcggatcttgtccgggcgtgcttgtacttgtacgcacacgcactggctgccgctcagctgccggcgccgcacccggccgatcgaaatgccagctgcactgcactgcatgcgatgcgaggaggtgccacaaggccggcggtgatcgcctccgctccgccggttgttgctgaaggcggaaacttggaggccgctgcgccacgacacaggcgatctttaatttgtccctggccatgcataactgcgcgcggcatgcggcgtgcatgccgccgcagggaattgaatcgccggcaaagctgcaacgtgcctgatacacacatccggatggatcagcgaattcggcgcccgaccac

SEQ ID NO: 39003 - DNA, 1181 bp, Zea Mays
ctaaaacttccacttgttctagccgtcacggcgctaccagttctctgccgcatctctctgttcctctgtttcttcctcttctctaatacattccactagtaatctgttaacacttcgtcatgaagttcggcggctcgtcgctcgcgtcagccgagcggatgcaggaggtggccgacctcatccttagcttcctcggcgagatgcccgtcgtcgtcctctccgccatggggaagaccaccaataacctcctcctaggaccctccatttctagctctcagcgcctgggccggagagaaggcagtgagctgcggtggaggaggggcgtccgaaatccctgagctcgctgtcatcagggagctgaatcttaggacaattgatgagctcggtttagataagtcgatagtttcaggtatgttgttgtttgctccactctgctcttggaacgcctcagctgttcctcttgctctatcatgaatgcttctgttatacaatgggatgtcgttctcttggatgtgccaaagttttctctccccttagtctgaataacaattcctggtggatgtatgtatgtatgtattctcttggatgtgcgaaagttttccccttggatgtgcgaaacacatttactcctcactgcaatccacgcctccactctcgacccctcctccttcctcctctccctagggaccgttctccccaacacgcaggggtagcgtaggaggtgttgtggcggcattatctaggaagcggtctgtggacgtgaggcggatcaacccgaaggtgcctaaggaggaggctgtcaccatctccggtcgactcgtccagatcctctccgaccatgggcccctcaccatcggcaacacctggaacaacaccaaggtacccaatcaaccagtcagtcaagcagagtggcaaaagccggggagcgatgcaggcgtcggagcagcaacaacggaggaatgagaaggaaacacacaaagagcatcaaaagcaagttcaacgatcttatgtcaacccatccacctctgaatgaggcatattcagatgtgtgtgtattcagcactcatgctgccttcagtttacggagctcaatatgttacatcgacctttccaacctgccggcagaactcaagaagctcaagcacaagaagtgcctcgtccagtccccccaactccttcat

SEQ ID NO: 39004 - DNA, 1154 bp, Zea Mays
gatcgaaccgtttggctggtggggcgcgagcgcgaggtgacgacggcgacgcttcagttgagtgcgggtgtagtgctcctgcgacttcggcctgtccactttttagggggtgccgaggggcgtgggggtacggccgtccgcacaataatctgcgctgcgcggaagaagggaaggggaaaagcagttaagcttgagcgcgcgcgacagggtcaagtcgagggccggggaatcgccggagaatggaggtgggcagggctccgcgacgacgggtgtccccagcggcggcggcggcggctgtgccttcgctgcttctgttcgccgttctattcggcgccggcgcgacggcgctgtacaagcacgcgtcgttcttcgaccgcgatggcgacggcgtcgtctccttctcggagacgtacggcgcgtttcgggcactcgggtttggattcggcctgtccagcgtcagcgctgccctcatcaatggcgcccttggtagcaagtgcagacctcaaaatgcaacgtcatcgaagttggatatctacatagaggacatccagaaagggaaacatggaagcgattcagggtcatacgacgccgaaggaaggtttgttcctgacaagttcgaagagatattcgccaagcacgccaagactgtcccagacgccctgacgtcggacgagatcgaccagctgctgcaggcgaacagagagcccggggactacagcggatgggctggcgctgaagcggagtggaagaccctctacagcctcggcaaggacaaggacggcctcctccgcaaggacgtcgcgagaagcgtctacgacgggacactgttccacatgctcgcgcccaactggaaatctcccgacgaggaggaggaacaggaactaagcgtgatccgggagagctgaaccgagaggtacaagcaaagtctggttgagagataaggactctgggaccctctgaacatgctgtcaagcaacatgtactactagcggtgtgaacgggtggtgtgaacactcttttcatatcacatcataaaaaaaggtgtgaacagatatttcaatgtacattatcataaaataagataaattcataattcaaataaaaatattctgtgtcttaccaaaacaaacgagatacaaaacaactaaaagaaa

SEQ ID NO: 39005 - DNA, 2626 bp, Zea Mays
gtctcagtccagtccggtcaaagtcgtctcttctctcagatctcgtgctgtccctagcattttccctagtttaactagggacttcgcatccattgtgtctgatttcttctattcagagtgaattgcagaagtagactggtttcttcttcatccagtaagctcagtctgtaccctgcactgcaacaatggtgctaggcctccgaaccaagacaaggaaggattctgccttccatgtggatttcaatattctcatccaagaaatcagcccatggcccccttctgaatcgttgaagtctttgcgctccgtagtactcttctgggaaaatggcgagcgcaattcaggaaagacgagcactgttgcgccttcaattgggtcaggttccacagcagggaagattgaatttaatgagttcataaacttacaggctattttccagaaggaggggtcatccaagagtggaaagtggcagaagaacctgcttgaattgaacttgtatgagccgaggagggagaagctgaagggccagcatttggggtctgcaacactagaccttgcagagcatgcaatgtttcatgaggacaccagtgttcctgtgcctctcagttccaagagaagtttcaaaaacaatgcccaacccatggtttacctccgaatccagcctttggatggcgataactcaagcgtttcttcaagagatgcattatcacaagaggcatcagttgataaagattcaaaggaatttgtctcagcaacggtgagtgaggagtatactgaagatacagagtttgcttcctttactgatgaagaagaagcaactccatacctgtaccgctcgggtgtaactgctctcacaggtagcaatagatctcatgaatccctcaagggcaaggatatcaggttaactaataatgaaggtaccagctcatcgttggattctcaacatgaagcaacagtatcctgtatgaaagtgaggaatgaagaagttgaaaagtttccaattcaagtgcaaaagcaaaatggccatccagaaaatctgtctctctcatcagatttgcccagagaacaaagtccgtctcttccaccacacaatgcattcagaagtggtcgtaaaatgtcatttgcatatggtatgactgaatctaaccaaagacagtttggggagagaacttatagcactttaactactgatagagcaaggaatgcgaggttcagtatgagagttccagatgttaatggaagtatcataaataagaaagttgattcccaggatattgcaattactcatgagaataaggccagtgttgatgatggattgcaagtccaggaaccaatacgcatttcaaataatcgaaatgacaacaaagttcgagaactagaacttaaaattgagttgcttgaagcagagctaagggaagctgccgctgctgagataggcctttattcaataattgcagaacatggtagttcagtaaacaaggttcatacaccggcacggaggctctccaggcattttgtgcatgcactaaaaaactgttcaagagacaagatgggaagtgcagcaaggaacacaacctctgggctggttttggttgcaaaagcttgtggatatgacattgcaaggttgagtttctggttgtcaaactgtgttgtactgcgagcaattgttactgaaacttctaggcaatcgggcactgtaaatagcagcaattatggtgattataattccaaaacaacatacaggaaaaactctgcatcaatgtgggagtcacttaataggaagaaaggaaaattactttcccctgagtttgataactgggaagatgttgacacatttatagctgcactaaagaagatcgaatcatggatattttctcgaattgttgaaaccctttggtggcagacattcacaccacatatgcaatctgctgatataactggtggtttgagaagtactccaaatccaaaaaaaggctatggaaagattcctgttgtgggcaaccagcaacaagcaaccatatcaatggacatatggaagaaagcctttaaggaagcgtcagaacggctttgcccagtaagggcagctggtcatgagtgtggatgtctgcctatgttaaccaagttggtgatggagcagtgcatagctaggttggatgtagcaatgttcaatgctattttgcgtgaatcagatgatgaaattccaacagacccgctgtctgatcccataactgatcctaaagttcttccaatcccatctgggaaattcagcttcggtgctggggtccaactgaaaaatgctattggcagctggtctagatgtcttactgacttgtttggcatggatatggacgactatcaagaacttgacaatgaaggtggtgaaaatggctttggtgaatctgtaaagccattctatcacctgaatgcactgagtgatctcctaatgcttcccaaggatgtgctcatggataccagtagcaggaaagagctttgccctacctttagctcatcaatcatcaagaacatcctggatgtctttttaccagatgaattttgtccagatcccattcaagggggtatatcttcgcattaggctgctagtttcacaggaagggaactacagtaaaa

SEQ ID NO: 39006 - DNA, 734 bp, Zea Mays
cttggatctccactctccaggactccagggtttgccgtttgcttgacgatcacacgtatcaaaaagggttctcaagtattattgctatcacctttgctgcattcaggttgatgctatgctccaagaattagaaaaggagattgatgatgtggatgcacaaattggaaatcgttggcaactgcttgataaggaccatgatggcaaagtgacccctgaagaggtggcggcggcgacagcttatctcaaggacaccatagggaaagaaggcgtgcaagagctcatcagcaacctttctaaagacacagaaggaaaaaatccttgttgaagatattgtgaagctagcatcccaaatagagaacaatgaagaggaagaggaagcacggtagatgggagagtatatggaaacatcacactcgttcagcagtcaaaactcatgtattgaaaggcaatacatccatttcttgtgtctcttgactgactttgatagtgacttccaattagcaaggtagattttctgtagaaaggctcatgctgacatgcatttagttagccgtcgtgttgtgatttggtaggtaaattgcaaccaaaatttagaccggttgcatggacgtggataatacagatcaattgtatttgttatgctactatgcaatcccgaaatattggatctgtttcaaattctcaagtaatcattgatggatgctatttattgaccataaagcttacgaaatcat

SEQ ID NO: 39007 - DNA, 2347 bp, Zea Mays
atggggctgggggctgcgatggcactgggcgacccaccggcggactacgcatccatcgcggcggtggggctgtttgtggcactcatgtgtgtcggcatcatcgtcgggcacctgctcgaggagaaccgctggatgaacgagtccatcaccacgctcttcatcgtgttaagccaagatgagacaccattcttgtacagcctcgtgtttggtgaaggtgttgtcaatgacacaacttctgttgtgttgttcaatgcaatccagaactttgatcctggaaatatcagcggtgccaaattactgaacttcattagcagtttcctttatttgttcggctccagcaccattcttggagtagcttctggacttcttagtgcttataccattaagaagttgtactttggcagcccggtaaagtctatcgctttgagcaacaccattttagccttggtgctggtttcaagagctgcttttgttttcccactatcctttctatcaaatttgaccaaaaaaactccaaatggaaagatatcttttaggcagcaggttctgtggaagtgcgaggcattttgggaggtgtgcgaggcattttgggagggacatcatcatgcccaacttgaagtcgtccgtgaccacaacagcgagcgcggtggagtacatggatgaagtattgaaggcgttgccgctaggtgaggccaggaatgaggattcacgaacactgcaattcaattatggttcattcaaacataaggcattggataaatccttaactaaaaaggttcctaaaaatcgtttgacttcaaatactaaactaacacaatgttgctctattgtagggatttttgaagcactaactgcattccccttctccccttctcccttcctgctgtgcgaagccgtgccccaaaccctctaccatcttatttcagttcccactctctaccatcttccaggaaaaaacactagcaatcttacatgagttccaagttttgcaggtcgttgctgtttgtgaatgtggtttggattatgacagacttcagttctgtccgacagatatgcaaaaaaagtactttgagaaacaatttgagttggctgaagcagtaaagctgcccattttcttcacatgtgtgctgctggtgaagacttctatgaaatcatgacacaaaatttgcacagattccctggtggggttacacattccttcactgactcaacagaagatcaggataggctactttcttttgagaagatgtttatcggtgttaatggttcctctctgaaaactaacggaaatcttgaggttgtacgaggcattcctgtcgagaggttgatgatggaaacagattctccatattgtgacataataaatactcatgctggaagccagtatgtaaaatctgtctggccatccaagaagaaagaaaagtatgagccagattcaacagtaaaaggtcgcaatgaaccttgtttagtcagggatttttgaagcactgactgcattcccctttctcccttcctgctgtgcgaagccgtgccccaaaccctctaccatcttatttcagtccccactctctaccatcctccagggaaaaaacactagcaatcttacatgaattccaagttttgcatgtcgttgctgttggtgaatgtggtttggattatgacagacttcagttctgtccggcagatatgcaaaagaagtactttgagaaacaatttgagttggctgaagcagtaaaactgcccatgtttcttcacatgtgtgctgttggtgaagacttatgtgaaatcatgacacggaatttgcacagattccctggtgggttacccatttctttcactgactccgcagacgatcgggttaggctactttcttttgagaagaggcaagttcttgaggtagtggcgggaagcaaagaaatttctgacatagaaggcctgagtagaactctgtaccacaacacatgcaggctcttctttcctcaggatcttgacgcgtctactaatgcgcagcttgagagtggtactgccgtccaggattgctgatgtcagagtgattttttttaaaaaatgtttccttttggttggcgtttggtttcgtacaacttccaatatgcctatgaaatgtttttggtcttataattttccctcgctgccaattttgccatgtttcatgagcctgatgacatgtcaggcaagtcctgactatgtacaagtaccctactgagactatgccctaaaatcatttagggctgagcatgtacaagtacagtttgatggctatgttgttcactacaatcaaacaacaactaagctctatatctatattttatacaaatttttaaattcc

SEQ ID NO: 39008 - DNA, 1760 bp, Zea Mays
aggtccttactcctttacagctaggaggggatgctacaaatacttattggatcctaatgaccgagagggtcagttctatggttgtccaggagacagttagccaaattctgtctggtctgattcacagttacgagggcaaaggagactcaaatccaaatgataacttggagaggcttgagatggcgcatatcaagttggaagctgctcttgagacatgcagcaagtggcacatcactgatttgtcgttgttgcgttggcgcaagaagctgaagcgagctgctcaagagtgtgatgacacgctatacaaatacaagaagatgatccttgaagatgaacagatggaacaggaggttaggaattcctactttcctagacgaatagcgcatgctaccaaatctttcattttctctgcctttggccacaacaactacgagtccagcagatctgctgttcgaagattcgagtggtatgcagatggtgctagtgagtttctgagattcgtagagcttggtggcgcaccttgctgtcacatgccattcaactcttttgccaagcacctttttgcaggcaaggaactacagcacaaaattgttcgtggaaacgagtaccctttgtttctactatggttgatgccctttgttacggaagagcatggaatcgaagcttgcctgatatttatcaagaaagacggaaatacactggaggatgactttttctttagtgtaatactgcagctttcagaaagtacagacatagttgggatcacaatgaagtgcttgcagttgttcccccatcattttcagcccacagttgatactatcaagaaagaacttactcaactaactacacaggacttttcatgggtgccatatgttgatctatggcacagaaaacactgggacaatcttcataggtttagcactcaatggtttcgcccagatccattatgttgcaagcagcatgatcagcataagcttcagtatagcaacctaggcacagttgatgcttctctggattcaattattgaagtaaatatgcagtgtcagatctcgctacccaagtacaacaaccatcggaccgcactgtctgaatgcaaatattctctgcgcgattatcaaaagctgaaagctggattcctctttactccccattgtccttcagaaaacatgctacctgcagatacaagttctacgatggtgccgatcttcaggaggggacaacattgcgaggatactgacattgccttggaacaactgaaagaaatcatgatgtcaaaggcgatagattacttccgacaatacactgaagcgacagtctaccaaatactttggaaggctatacatggcactgcgtacattcattttgaaaagccagccatggaggctccaggtgcacggagaagttttaggggagctaggaaaagaaaactagtccaaccaatggaccaggatgtgcagcatcggacgcgtatgatctctcacttgctcgacttatgggctccacatgctcccgttaggctacgaggcttgatcttggactggattcagaaagaaaaggaaagccagttagcagcaccagtgcaccactgttgcacctgacgttctgaatcaattaacctggagagataacaggaacacatcaaaggttggcttactactcacaaaagggagcaaatctgtcagaaaaataaaagggcggatatacagggaccagggtgatagaaatttgggtcaaaagctatgtttccagtgaagaggatc

SEQ ID NO: 39009 - DNA, 580 bp, Zea Mays
gtggggcgagcctgattacagacacgcagtcatccaatcaagacgctcctcaaccggactgcgataatcgcgactgagctcgccgcaccgtgcgactcttgcggacccgggcacccggcgcaaccaacctttccgggttattaaaccctgcgcccgacgtccctcacccccatctcctccctcatatgcatcgcatgctcttcggctgtgaggttctagtcaccgccgagaatccgccgcgcccttgccttgcctccgttgctgctcggtgtccgccgtgtgtcggggtgattcgcctcgatacaaggatcgcaaccagggaagattgaggcctgaagaacagccagaaaccagtgaatttctcgccggagttgaagctccgccacaaaactgctccccgccgtggccagcctccacagcgtcataatcatcgtgaggtcatgagaatctgaagatcatcctgatacctggaatctcgagtctcaggcaagttgtgcccttgatcactcctttttacctaataatgttcgctgataatcactatgacatgatcaggttaatttgatgggacctaacaggt

SEQ ID NO: 39010 - DNA, 2090 bp, Zea Mays
ccggaatcgtgcagacgggcaccgcttatcctccgcgcaggcaagagcagccagccgcttcgggatcgggacgcggagaggggaaaggcgagtcgtcgactcgtcgtccgggcagcttccctccctctcctctccgcccccgcttacctaggccggccccgcctacgcccccctcccgccgccgcacgatgagcacttctcccgccgccgccgacgtttcgcctttgccgcctactgctgccgccgacgaggccgcgcgggcgacagagacggtggtggtcgatgagagggtcgcctcacacgtggacccgttcctcgtcgaggcgctcgacaaccctcgccaccgtctcatgggtgggacttgatgaagagtacaaccgatggtctctgctctggtggcccatgttgagcaggccactgtagctgaagccacatcctagctttatatttgacaccaggatggatctacttcatataggccatcaagcctctgctaatgctgctggtcgagggtgcagaaacaaccgtggccatggttgaggcatagggcatggtggctaccaaggtccattatcatcttcatttgatggacgtccacaagcttagcaccactgacatgatctgtcaagtctgaggctaggtaggacgtattgcctccattggtggtattgctacgatgagagctacacctccaacacgaagactgcagctgtggccacctaccaggctatggtatcgatatcaactagtacatctacatgacgtcaacagatcatattacaagtaatctggacaagctagcagttcagaacaaggggacaaattggacctcacagccagcagggcagttctacggatggaactggatatacaaaactttatgcagaaccctcagctgcaggagtttgaattccagaactttccgacttcttacctccgctgtgctgctcatcgtgttgcacaacattatggcttagagactatagtagcagatagtttagtagaaggctcagttagcaggattgttgcaagaaaaacagcagaaagcaggcccaaagcattccaaaatggaagcgctgattctagaaacaagagtggtgtaccaaaaactgttgatgagagaatagaggaatataataaagcacgagcacgcatcttcaatggttccatttctgcagattctgatgctgcaagtattatgggaactctttctactggcaaagatgaaccagtaaatgttgacccttctgttgatgaaaccaaagtcagcacaatgaacagtcgttccagagttgctgtttttaaggatactgaaaaggatcgtagtgacccagactacgatcgaaactacaaaagtttatgcagtatgacattggttatgtgcaatctcctggcatgtccacaaaccagcatactatgtactttggccagcctgatctaacaatagggtcttctggagctgctgtttatcgacattggccaaccccaacaatgatgtatccccattgctatgataatgttagtccaatgatgtctcaggttcctctgtaccagtctttcaaccatgattaggagattctgcttgctggaaagttgggaacaattctctgttgaacttgctatgttgtgttgtcctatgttaagtggagttcctttagattcgagccgtttttattacaaaaaattgtataaggagtcctaattcgttgaaactatttcgtgaactagtctggaactgtgatgcttgtctaatgtctagttctcgtttgcaatttgctcccggtttatagttagtagtgtgctgcgactggtcttgaaccgtgtcgcgtggtcgtactggtagaaccaggttgctacttgccagcagtcattgctttgattccgattttttatttaacttctttttaatcaagtatttcaaataatctaccctagaagttacttttacatctagttgtgccagaccacaaggacgacaaaataagattgttaaaatatgaaatgtaaatagaatttgccattgtttttcccattgagtttagagttcaaatgtcacaccggtatattccttaaattttcttatattcctc

SEQ ID NO: 39011 - DNA, 1305 bp, Zea Mays
atgtactgtaaggacgaccatgtaaagcagcttccattcagccatgcatccaaacatattaatacagcggttaaccaagtccgtacatcagcttccattaggccccatcgtcatggtcatgcatgtaagcagcaatcaagccctagaaacctcgagctagctcgtcatagaaaccaagaaagaaccatccaagccatggaggatgatgaggagaagccatcacaaaggatcaccaacaaggaggaagacgaagaggatgacgacttggtgttcccgggcttccggttccatccaaccgacctggagctcgtggggttctatctgaagaggaaagtagagaagaagggtttcagaattgacatcatcagggagatcgacatctacaagcatgacccctgggatcttccaagaggagacaaggacgactggtacttcttctgcctgcgtggccgcaagtaccggaacagcatccggcccaaccgcgtcaccggctccggcttctggaaggccaccggcatcgacaagcccatacacgacggcgccggcgagcgcgtcgtcgggctcaagaagtccctcgtctactaccgcggcagcgccggaaggggcaacaagacggactggatgatgcacgagttccgactcccctccgcagagttggtcgagctccatgatgctgggatctggacgatctgccgcatcttcaagaggaacacgtcgtacactcggaggtgccagcagcagaagcaggaatacggcagcaagcgaagccagcagcaggagcaggagttgcagtactactacgactactaccgctaccatcaccaccaccatcagcaccattacttccactcgtccgaggcggtttatgctgcagctgaacaccatcgtcagccgtcgttcctgctgcgcggtttccatggctcgtcgtcgtcatcggccgagacgacgacgacatcaggattcgtgggagctcatccattgttgccgccatcaacgacatcgactctagggtggagcgacgcggcgagcttacgggacagcggcatcagcacctgggacgaactcgggaggatcctggagatctgactatgtaaatgcggattactagcgtgcatggttgtgggatgagctagtatatacagaattagttacctgacattacttaattaccgacggtcagcctcagtttgtacagcacagtggttttacagttagtttctcatgtggtttatgaacacgtacgtacgagtttacttgtgcttattattaatcaaaagagtaaagtgcatggaaggttcataaact

SEQ ID NO: 39012 - DNA, 3573 bp, Zea Mays
tgcaaccgcacagaagcccgagtttccgttcccagcaacccaggcaggcagacacaatgaaaaatgattgaaatactgcgagtgtggcaaacaaactagctagttccaattttgagcactgctactttacataagtaaatgaccaaacctatcaccaaaaaggaaattgtgtacacaaaatggaagaaaaaacacaggacgaaatacgcgagaaattccaggacacagcggcggtcacgcgttttctgacggctgacctgattgggagcacgccgctgccgttggagttgacgccccggcctggagccaccgtcatcgaggggggattgccgcgttcggcgccgctcgcggtgacggtcggcctcgcactcgctactggtggtggtggaagcctcgcactcgctatcgctagtcgctactgatggttccaagagcaaaggcccatgttgtttgggatccagtaggcccaatcaagccgttgactccgaggagagccgcttccgatgtcctcgcctcttgccgacaccttcacccactcccagcaggccagcacacattggcgacgcttctcgccggagaagggtgggcggaggatgccctgcctggcccctgccaattgacggccacatggcttcttctagcaggtaaacggtgctacttcaaatggcccacctcttagggtgtcaaaaatggagctcagtaaaatcctggagaaaatagaaaatattgtgactgaagcacacaaaattttgcagcttttgaacttgccaagcggcagtaatgttgacaagagacaaattgttgctgagaattcacgcggtgcagtcactactgtggcccctccacgtttagtaattggccgcgacgaggatcgcgtcaaggtcatatctatgcttcgtgagacacttgatgatggtcaacaggatcgcagcggtgctaaaccatactctacaattggcatttatggcattcctgggtctggtaaatctaccctcgcacagtatgtttgcgcccatgaggaagacaatatccactttgacattgtcatctgggtccatgtgtcgcagaaatttagtgtgcgagccgttttgagggagatgatcgagcagggttttgagggagaaagcatcgagaccgaggagagtttcagatgtatttttcccaggaggcattggctggaccctgagtatttagtcaggttgtgggtggcagaaggatttgtcaccagccgcaatacaggggaggaactggaggctgttggtcgaggctactttgatgagttagtgtcagcctcatttctgcaaccagtagatggtgacaaggaacgctatacgatccatgatctgttgcatgacttggtaagtaaagtagctggaagtgactgcttcagagctgacaatggctgggaaggagaatttcctcaggatgtccgtcatctttgggttgagaactgtaaactagacttgattgcccacaagattaccagactgaaaaagctacgcaccctgatcatttctgctggtgagaatgacacgccagttgaggaaaaagccttgttggaaaatattttcacgggtgtgacgacattgcgggtgctccagataacaccctggacagcaggaactctctcattcccagcatctgtcgggcggctaaagcatctacgctatctttctgtcggtaggcatattggcggtactaaggtgattctgccaagtacggttgttttgggactgtaccatctgcagcttttggattgcccttctgtagccttctcctcctgcgaagatattgttaagggcctgttcggttgtaccggaatgagccaggattcattccagctcatcaaaatctatataaattagagaagtaatccagctaggaattaatccggggctccaatccgaaacaaccgaacagggcctaagctggttagcttgaggcacctactgtgctcatcaggatctctgaatgtaccaaacataggcaggattgtgtcactccgaactcttcgatgcttcagggtaaagaagaaggcaggctacgagttgtggcagctgaagcacctcaacaagcttgagaagaagctagtgatccgcggccttcagaacgctggacgcaagggagaggctccagaagccaatctagctgccaaggaacggctcacaagcctagcccttgagtgggacagtgatgcgccgctgagctgcggcgcggacctccaagcagaggtactggagggcctctgccctccgttgcacctcgaaaaactgcggctctgttggtacggcggctcgaggtacccagactggattgttggtgtgcgatgcctttgtctctaccggtgcagccgactaggcgcctttcatggatgctccccccgtcttgtcaaactgaaaattttagagtgcggctgggatgccttgccagataacatggagcacctcgcctcactccggaagttggttattgacggctgcaaggatctacggtcgcttccagagctgcctcgctctctgctgcaccttaagatctccggctgcgatggcgaggtcatgaggtcatgcaaaacggttggacatcccaatcgcaaaaggatacagcacgttcgcacagtaatcatcggatgggaatcacttcccagagcagagctattagatcactttgagagcgagcctgtggtgccggagaaagagaaggagatcgccgcccttgttaaaaagttgctcgtgatgcttggccttctactactttgcatgttcagtgtgattgcaaggttgcttgtgggctctttcctgctcccagctccgctggtcgtcgtaattttgctgcttgtggtatggataattttgacactctagaggcctgtgaaatcggttatgcctggtgccgttaaacacggacactactctctatcaattttcttctcttctctatggatattatgtttgcttgcctatatctactcgaccagtctgagaaaagatactatgtagttgtttgtatggaaaaaatgttgtataagataaaaaacgaatataaagctatgacctttttttttgtttttggatgagtatacttttagtgtttttgtttagctagagatgctagtgtgtttgcttgttgttgtgcacagtttgtggtactgtgtatggcctaacgctccggcggccctgaagttgagacggaaagggtggttgcggacagtccgttcttagaagcggacagtccacgattagatcagacggattaacttctatctccacacatgtttatctctttaaatacgtgtgagttattagaagtgctgagctagctctgcatgtacatacataaataaaaaatctcaagaaagtccctagatcaaacaaataaataaacaaaggaaacaaagagcagaaacgaatcaaaggatccagatccacacctagatagatacaataatataggcaatcagatgtattggtgcgatcgtgcaattaaacaatctctacgtttgatcctatatatatattattattaagatattatcaccgcatgatttataatcaatgacacaaattgcttgatcct

SEQ ID NO: 39013 - DNA, 1328 bp, Zea Mays
taccggacgggtatgcccgttgccatccccacacgccgctcacacgccgcctccctcgttctcgcgccgacgctcgccgcaccgcctccctctccctcgttgtcgcgccgcctccctgtccctcgttctcgagccgccacaccgcctccccagccggccaggtaacacacggcggctcttccctgctgggcttcggagctgccagtctgccacgccgccgccccagcagagaggcgagcacccccgccggcgcctcggagctttgaattggctgggcgcgcgaccggcctctgccgccgggccgcgagcagcagcaacccccctcgccggccatgacctccgctcactccaagctctactccgatgacgtcagcctcgtcgtggtcgtcgtcgacacgaaccccttcttctgggccgccgcggcgctccccttcgccgacttcttcgcgcacctgatccacttcgtgaactccctcctgctgctgaaccacctcaaccgtgtggtcgtcatcgcggcgggagtcagctcgtgtgcctacatcctggattccagcgatgccagcccctccggtggtgtggccgtctcggacaccttcgacaaggcaagccgcaaggcggaggagttcattgcacaagatgcgcgcgccactgcaggcaacggttccgttgcttctgccaatgccgcgtcgctgctctctggggcgctgtccatctctttgtgctatatacagaggattttccggtctgggtctcggcatccacaacctcggattttgtgcctgcagggatctccagacggacctgaacaatatgtggcagtgatgaattcaatattttctgctcaacgttccatggtaccaattgactcttgtattgtgggaacccaggattctgctttcttgcagcaggcttcgtacataacaggaggagtttatttgaagccacaagaactaaatggcctgtttcaataccttgccgtgtttctgccataagaagactattgacatgggatatgtctgttcaatttgtttgtcaatattctgcaagaatcagaagaagtgttcaacctgcgggtcagaattcagtcgtgccatgcctgatttgaactccgtgccggatcaaagcaagtagtgtccagtgcgaagttaacccatcaacagacaacgcttttctctatgcgtctcacaggttcctttcggactagcaccttcacgtgtgcagtgtgtacgagacgtttctttggtcgatatgtgaatcaatttccatgtctgaatattatcggtttttttttaaaaaaaactgaaactgcagaattattttccatacaa

SEQ ID NO: 39014 - DNA, 2164 bp, Zea Mays
gccgattaccataaagacttggcccatcacgtttacgggccgctaggaggaaaagaggccgacatccctgctagcctctcgttgtagtaaggagaagaaaaaaaaacaagaataataaaaagccgggccccggccgaagaaacttgcgagcaacccggcgaaagccccccaaaccctcgcaccctaaaacagcggcgcacaagatgtccgacgaccccaccaacggcggcggcggtgatcgcgtggaggacgtcgtccgcgccgagggtgaaacacaacctcgtgatgatggcttgtcgaaatccaaggatagggacaaagatagagaaaaggacaaggacagagatcgtcgccgagaccgtgacagagatcgagggagagacagggaccgtgatagggatagggacagggacagggatcgggacagagacaaggatcgccaaagtaggcatcaccgtgaaagacgggaacagcgagaccgtcctgatgatcacagagtccgtgattctgaaagaagaagagaacgcgacaaagatgggcatcgtaggcatcgttctcggtctcgttcaaggggtagagatcgaagatctaggtcacgttcaagaagcaagcgagttagtggattcgacgccccacccccgcaagcaatgggttcaacatttccagttattccaaccccaaaaggcaaccatgtatggtaacaaggccaatcttgggtcacttgcctcacttctaccagtggaatgagctgcctactatagctttaatgtacaaggaagaatcagtgcgccggtttgatatcgtcatgttcatcttcaactagctagtactaggtcagttaccaggctcttcgcttcccaacattggtggcatgtttccaaacatgctccctttcggtgttgctgggcagttcaatccccttgtcatccagccacaagcaatgactcaacaggctactcgtcatgctcggcgtgtttatgtcggtggccttcctccatctgctaacgaacagacagtggcaatttactttaatcaagtcatggctgctattgggggaaacactgctggtccaggtgatgctgttctcaatgtatacataaatcatgacaagaaatttgcttttgtggagatgagatctgttgaggaagcaagcaatgcaatggccctggatggcattatgttcgaaggggcaccggtgaaggttagaaggccaacagactacaacccttcccttgcagccgccctgggcccaagccagccaagccccaatctgaatcttgctgcagttggcctaacagcaggatctaatggaggactagaaggtccagaccgtatttttgtgggtggcctcccgtattacttcactgaagcgcaagacctcaccgtcactgacatcgcttgtgctgcactaaatggtatcaagatgggtgacaaaacccttactgtcagacgagcaaaccagggggcatctcagcccagaccagagcaggaaagtatcctattgcaggcacaacaacaggtgcagttgcagaaacttgtgtatcaagttggagcgcttcctacaaaggttgtatgcctcacacaggtggtaactgcagatgaattgaaagatgatgaagagtatgaggacattatggaagacatgaggctagaagcaggcaaatatggtaatttggtgaaagttatcatcccacgccctgaccccagcggacagccagttgtaggagttgggaaggtgttcctggaatatgcagatatcgatggtgctgccaaagcaaagacagcgctgcatggaaggaaatttggtgggaacccagtggtcgctgtctgctatgcggaggacaagtttgccaatggggaatatgatggatgaaaatcttatccctcttgaactatagcagtagccggtctttgtctttggctctatgctacctgcttgtttaattgcaacaaagatgaacggtctctcatttaagctgaacctctacctgtattgatatccctggattttttctgagccaccacctgttgtgatttgtgaacgttgtaagaataggtttctttgcttgggttcgcttgttgctgtcgaaaatatgtaacgaatgttattaataaagaatttcttgtatgactttactaccgtgtgtttgatttggtttgagtt

SEQ ID NO: 39015 - DNA, 524 bp, Zea Mays
tctctctcccctgcctgcttttcactccactgtcccacgccgcctcccgcttccccctcgcgctcgctggcggcttaagcatctaccggcgcccgcttccccctcgcgctcgctgcggcctgcttgctgcatgtcaccgtgggaggcgagattagccgatctggtgttcttgccactcggagaggtggttctggggaggcgtaggaggtacctcgttgtcgacacaccaccaagcccctcggatctccttcgtccccaccaccgtcaccgacacacggctccaggttcaggcctcatcctaatggatgcttcggggcgatttggatggtgacctctgctttattacttgggatgacaaactgattccaaagaaggtcgatcctatggactactgcaatgaggtcacacataatggaccatgctgttacactagagatgcggtgtcgtgtttgctatttttaggcttcagaagaagagaaaactccttcagattaccagccaagcatggtcagagaccagcgtgg

SEQ ID NO: 39016 - DNA, 3473 bp, Zea Mays
gcgctgccccctttttctccaattcaattcctcttcgtcgcctcgcgcatgggcattcctcgtgcgccgcggcagcgcagttaacgccagcgcgcgtggcttcacccggtcttgccacgacccgttgcaatcctgattcccttcctctccagaattcctcctcccatgtgcgtggatctcggggcccgtgcgggctagggtttatggctttggtcaatccatggcgtgcggtggcgaggtcgcgctgtcgcttcttctttaatgcgcgctgatccccatggacgccgagtccccacgggacgcttatggtttcgcggtgcggccacagcatctgcagcgtttccgcgagtacgccaagatttacaaggaagaggaggaggagagggcgcacagatggagagacttcttggacaggttggctgatgcagcgaatgtgcccactacacccagcgtttcaccatatgcatctaccggggatcctgcgtcaggtgcaggacaggcacaagagaatagcggcatcggaatacattgtgatgatgaagaggagggatctgagaatgcagaacataacaacaacttggaaagcccaaaggaatccgatgccagtgctgaatcacgagaagcaaatggtaaatcagaagatctgaaagatgtaactaacttggacaaactgcaagagaagactggtagcagcagctctacagaagcaatcaaagccttagagggcttgatggaaacaaatggggactttgaagaactaaaagatttgaatggaagctcagaagaattggaagaagagaataatggcaacatggaaaagctggtagagctcttcttggataaggggttgttggatgaactgaagcccataaaagttgagtcccagcggcgggtacgtgcagcacttagcatcattgacaaaatgatgagctctcgggtagtgaagggtggtaatggtgcaaatggtattcatggaaacgatggagcacagcttacttctattgaagaggaaggaaggactgcagaagcgagtgatgacggagatccagctgaggttgagtcttgtgttgcagagaaggtggaacttggacaggagacaactcatgattctacaggtactgctttggatggaggcaatgatgggtcctattttccttggagggaggagcttgagagcttggttcgtggaggtgtaccaatggctcttagaggagagatatggcaagcatttgtgggtgttggtgctcgaaggattcctgggtactacaacaaattgcttgatgacaggactgagacattggatgaaaaggatcttgtggacccagtggtcaacgaacagggaagtgcacccagaaaagttacccagcctgagaaatggaaaggacagatagagaaggatttgccacgaacatttccaggacaccctgcattagatgaggatgggaggaatgctttgaggcggttgttaaccgcatatgcaaggcataatccatcagttgggtactgccaggccatgaacttttttgctgggctatttttgttattcatgcctgaagaaaatgcattttgggccttagtaggggttattgatgattattttgatggatactacactgaagaaatgattgaatctcaggttgaccaactcgtccttgaggaggttgtacgagaaaggttccctaaattggccaaacatatggaattcttgggagttcaagtgggatggataactggaccatggtttctttcaattttcatcaatatgcttccatgggaaagtggtcagtacttcgcatttgggatgtcatcctttttgaaggaaatcgcataatgttgttcaggacgacacttgctttgctggatttatatgggcctgcactagtgaccacaaaagatgccggagatgcaattacactactgcagtctcttgctggatctacatttgacagcagccagcttgtattgacagcttgtatgggttttcaatcagttagagaaatgggattgcaagagttaaggaaaaagtacaggcctgaaattttaactgcaatggaggaaagatcgaaagaccgtggctcctggaaagataagaaggggttagcaaccaaactttatagctttaaacatgatccttcatatgtgtgctcaccagttaagtccaaggaagggctagatggttcaaaggtgaatggagagactgggccagcaaatcttgagacctaccttagtactagttctatactggataatgatttggatcagggtgttgatcttcaagatcaggtgtcatggctaaaggttgaactatgcaagctgctcgaggagaaaagatcagctgatctcaggagtgaggaattggaaactgctttgatggagatggtcgagcatgacaacagacgtatgttgagtgcaaaggttgagaagcttgaaacagaggcatatgaactgcgcaaagctttttcagacaagcaagagcaagagcaagtaatgcttcagatcttgttaagaatggagcaagaacagaaagtggcagaagatgcccgcatagccgctgagcgagatgctgctgaacaaaaacacgctgctcacttgctccaggagaagtatgaagcagcaatgacagcactttcacaaatggagaagagagctgtaatggcagaaacaatgctggaagctacaaagcaataccaggttgggcaggttaaagccaaccaatctttcacttcaagttcacctcgtgcagaccatgttcctgcgaagataaatcaagaaccaaaccaaactgcacctatcaggagaatcggcctgctttctaggggacttggatggcttgacaagggcaagggaaggcagaattccaatgaaacatctggagcctaaactcatctaaagtccaggatgaagtcatagctcccaacaagatctggattgttcattaacgcttggattgcttgatcaccgtaagagtgttgaaatcagcatcgatacatgttttctcgggaagattcagctggtatattccatgaagttttgcaggaagtgtatcttgtatcatattgagttcaattgtcagataaagttttgttggtaggtcagaaaggcttctgcaagtcatcggtgtaaattttcttttattagttccattaagattgtcaatagttagtgttccaaataggagaaagaaaagaacgacttactacacacaagaaaaatttctgttagattagttacagtatcatggagttgttctggagaagagcatgttttttttatctcttcagaaatgtcaaaaccaccgaagagattctctctctgtatttttgtctgatacgtgtggctcatacattcttcagtcacagttgacatgtttgatgtaaggcaattattgtcacgaggattctgattacgaatacaacagcagaaactccactatagggaggcgttttggaaagttaattgttgtcagttcctca

SEQ ID NO: 39017 - DNA, 773 bp, Zea Mays
aaaaaaaccccgatgtgatctggacgtgaccaggatatatatatcgcctgtgggctgtggctacggcctaccgccagccgtaggtcgtcgtcgtccgtccggccggtggccatcacgagatctgccgctcgtctcgttgtcgaaatatccgcgcgctgtttgtgggggggcgtcggggcgagaggaggcggcaaaatgtcgatcagctaggccatgcatggtgcgcatgcacagcgcgcgtcccggtcgacggccggcccacggacagacggagaccgcccgtcgtgtctcgtcacttgccggccgggtgccacgcgtcgaccgtcgtccggaaggaaacatgcgccaggggcgacggcggcggcgtcgtcgctgtcgatgcgattcggtcgagccccccagctacgactccgggtccggtgatcaggtccgcccgtgtaagctactgcaagtgcaatgcaagctagctagctgtcgatgtttccgcgacgacggtggtcgcgtcgatcctacgtcacggaccgtgaccggccgctgggactgggaggtcggcgctctctattgcagttgccgcagcacgggggctagagggaacttaggggattcaatttactttatttaattttgattaacaatggatttaattttcttcaattctcttccattcactactgactgaataataagctcttagccagatgttagaagacacatattttacttaattaaaccaaataaattttagtttttatatgaaatatgtcacgtcggca

SEQ ID NO: 39018 - DNA, 389 bp, Zea Mays
atgcctagcaccatagcctgccagcgctaggccattgccgctaaattcggccaacaggtgaaggccgataggcctaatctttgccggccatgcctataaagcgaagtcgttcagctacgccagcggggaaaagaatctgtaagaatctgcaagagcacgccgccaacagagaggaggatctgcatgagcgttgtcaaccgggagatcgccatcatcgtcgccaacccagcattgtggtcacccaaatctacgcagtgaggatacgtgtcatcagaagagcaagttggtacctggaatctcaagtcccaggcaagttgtgcccttgatcacttctttttacccattcatgttctgattaatcataatgatctgcataggctaattttgat

SEQ ID NO: 39019 - DNA, 2310 bp, Zea Mays
gccgccttgggtttcccgaaaacccccctctccacagtccatacaccgctagacccagcgcaccggagcctgtgtcccgcgcggcctcgacgtggagcaccctccgcctcatgtccccgcggcagcctcctcccacccacgcatgcaacaaggtcttctggcctcattcattggcctcaaccctcaagcatcggctgtgcggacatgctgcgctcctgcacctcctcggccgccgctcccagattcaccgcgccaggacgctcgacggaccgggtgcccgccccctggccgcccttcgcagcggtccccgcctgctgaaacccctcccgcccttagctgtaggcctcgcggctcggcgcggtcgaaagcagctggtgcgcgatcgagaagagtccgccggcttctctggtgcgggctgcggggtgcggtgtttctgaggtccgccgcgccgcgatgaggcgaatgcagcagtgagatgagatggtagtgatcctctactcccagaggtgcaggtgtaaatgcagtcagaaaattcggcatgagccccctctctgagctggtgtggtctccggatgaaggcttgagcattaaaattgcggcgtctagtcttagcacaagaaaggcttctcttcgttggaatgcagatacattgagcatattgatatcttcacctcaacgaagtggttctggtccaggtgaaaagaacggtgataccataaatgataacctagaggtatcagaaaagatgccatcacaactgcggattcgcagtgacagctcagtgagagtaaccgtggatagccccaatagtacaaatgttgacgccctacaatttacgtctatgagatcgcaggagcaagattcaactaaacttgtagagtgctgtgaagggattaatgttatgaacgaaggtaaagaagagtcagaaaactgttgcgtggataagctggaggacatggaagtggggaattgtcccaccagatgctgcaaggatgcttcccatagttcagcctccaggaaaaaagtcgtgcctagcatttcagaaaaccaggcttgctgtgcaaccactttctgcaatgaaagatcttgggaaactaatgcatggcgtgctcggttagtaaaggcagtttgtcagaaagaatctattttgccaacgaacacagagaatccaattttaccttcttccataggaatttcatgtgatgcagtagagttctcaggcaaattggtaggttcccaaggcaagtttcaaagcctgggtgtaagtagtaatgctctagaaattcattctcatgacaattgccaagatccggttctgcacgaaagccataaggatgagcctgttattgctagaggtgagtcagcatctggtgttaatattgttgcaagatgtgagtcggtacctggagttgattccagcaattttgtgagaggcaaagaaaaagttatgtacaatgacagcaattgtggtaacaatacaagggagggtgatgacagcaatgagagcatcgagagctgtacaagtacaaaagccccaaagcgcaagcatgcgcagtgttgtgcagccacgatgccttcttctggaaacaaaagatttagaagagaagacaatgagagttcttgttcgggattattgcaaaaatgtggtacatctttcttcaactggatgtcatcactcacgaatgggttacccatgctagatggagccactgctgccgttccacttgaacagaagttttcagcaagtacaggagatggatctgcagcaccttcccagccacttcaaaacaaccgcagcgttcctatgcaattttttggcttcaattcgctcttccagtccctgtatactcgtaatgttatgataacttcaggagataattgtcgtcaaccagaaagcaactgtgctggacatgtgttcaatagactgaccctggaattaaatgatagcaattctatgttgaacaaagaaattggcatgggtagagaaactcttgatctggctactcagacttcagctgctgaaggatttcagatgatttctggtggctgtagaggaaatgttcagagtcaaattgatattttccaaatgagaccagaaagaaatatgaaactgcccagttccagtaagtttagctctagatctctagaagaaaaacaaaatcagtgcacagctgcctgctcaaatgatgcaacacaaaataaaggtggtttgagggaaagcttgtgggtaactcggcttttgccaaaagcatcagtagaattgatggagggcacaccatgcaatgtagagaatgctgttagtccacaggc

SEQ ID NO: 39020 - DNA, 1457 bp, Zea Mays
atgagggtcgtccacccctataagctagatctttatcgtactttgagtcctctcatcacctacataaggatccacgcccatatttttcatgaaggttacccgtacaatctggacttcgattatggtgcactggcccaactgcagcacttctcgattaacaaccttggtgaccccttcatcgagagcaactatggtgtccattccaggcagtttgaggttggagtgctggattggttcgctagcctctgggagttagaaaaagatgagtactggggatatattactaactgtggtacagaaggaaatctgcatgggattcttgttgggagggaggtgttccccaaaggaatattgtatgcttctcgtgagtcccattattcagtattcaaagcagcaagaatgtacaggatggattgcgtcaaagtcgacactcttatgtctggggaaatagattgtgctgatttccagagaaagttattgcagaaccgagacaaacctgccatcattaatgttaacattggaacaactgtgaagggggcagttgatgatctagatttggttatcaaaaccctcgaggagaacggctttaaaggcgcctcaagtgacatttaaaaagcctattgggagtgtcagtgtctctgggcacaagtttgttggatgccccatgccatgtggtgtccagataacaagattggagtacataaatgccctgtctagcaacgtggagtatctggcgtcaagggatgcaacaatcatgggaagcaggaacggccatgctcccatcttcctctggtacaccctcaacaggaagggctacagaggctttcagaaagaagtccagaagtgcttgagaaacgcacactacctaaaagatcgcctcaaggaagcaggaatcggagcgatgcttaacgagctcagtagcacagttgtgtttgaaaggccaaaggatgaagtatttgtccgaaggtggcagctcgcttgtgaagggaatatatgccacgttgtggtgatgcccagtgtcaacattgacaagctagactatttcctgaacgaattagtggagaaacgggcgacttggtaccaggatggaataagtcaacccccctgcattgccagagtcgtaggctttgagaactgtctctgtggccgtcataagtagtgtgagccttttgcaaggggggtcattgatgagggagccattggcaattttgtcattatcatttgtgggcttcgccagtatgccatcggacccacaaatcatagacacagacggtcccaccagtcatagcaaatttctcttcatgaggtgcatgttgtactgtatccatgcgttctgtatgtgtgttctgcggtgtaggcgtgtagcttatttgttgtcatgagaataaagttccttctatcaaatttgatggatgcaagttgcatcaaggttggctcgtctgtgcggtgctaagaag

SEQ ID NO: 39021 - DNA, 1919 bp, Zea Mays
ccaccactccgttccatccctcgcctgccttcgcacgggtgcgccgcccgctcgacggccacgccacgccgcggcgcgccgctcagctgccccggcacccgcccttcctcgccgagctcgggatcgacgtctcccgcacctcctcgcgcccgttccgggctccgcatccggcccctccccgtccccaaccccattccgcagcaggcgaccagcacaacatcccgaatcccccacctcgcattcggctcgccgtagctcctcctccgcgtcccgccgcccccggcacgccaaaaacgttcaaggagagtggaaagggaacatatcaggtgcacatggtgatgctagctgcttgcttgttatgggtggaatttgtccgtggacggggcaaatgcactgtgctcctttgtcggccttaagggcaggctgtttcagggcccgaactcctcgataagaactaacttttctatatgtgattgatgaacacacatgttagcttcaagtaggcctttttgtgtattgatcgataaacacgtgtgatgtcgaggatgtcctttcgtgtcatttttggtaaacacagcaaaacgttcctaattatgtggagtaattgcaatgtgttaatcctacatttcgttatggaaactgaaactgttgaacaaaataatcaccattaaccaaactctattggtcatgtggtacattccgtgatcaatcagccattcattacccacaaagggtatttcatgtatacaggccactagctgggtatcaaaacattgggttgccaaacaagctaccttctcagattcagatcaatagcttctcaggtccaacaagtgagctttttgcaccagtagcttttgcaaccgattgacggaagtttgttttgtcacccaagacctatcacttgtcacctattcaaagtgcagggggaagggaacggtgctgataatgcaagtgctggccaaaaaaaatggcgctgtggagcatctgaaacgctgcttcccttggctcatatgaatgtcagtttaggccttaggatagagcaaagtagcataatctcaagcacaagtttactatgtctgggatggcatttgatgattcacctgcccaagtgaatgttgaaggagatgtttcagagaaaaaagtagaagttcaagaccagaatgaagtgggtgggatgccctcacgacaagaggaggaggcagcaattaagaaaaagtatgaaggaatattgcccagaaagactcctgcttatatctaagattcttagctaagggctggcatgatgcatctgtcaacaagatcaccagttttccacgctgttgaatcgcagcacaagtttactatgtctgggatggcatctgatgattcacctgcccaagtgaatgttgaaggagatgtttcggagaaaaaaagtagaagttcaagaccagaatgaagtgggtgggatgccctcaagacaagaggaggtatagcagacaaatacagaaaagggctggcctggttaaaaacggttcaggttagcaagcatcatggcccgtatccagaaggtagcttcacgtttgagagaaggtggcttcgaacgagacctgatcgtttccttcgtcctgggcgacttggctggctcttgctcaatgggagttgacaggacagatcacggctagccagtcaggttcgttgtgatgagatccagaagcaagcagcatggctcgatgtgatgagctgtacaagaggcgatgatgcgttatcatctcaggcagatttatatcggaggagatgaatcgcgttcgcgtggctcttctctcggttctgttttactgatgtaaattttagcttatttttaactagaggaacgatgtaagtttaaccagaccaataaaacaaccgtgtatgctctgcttccaatccagctattagct

SEQ ID NO: 39022 - DNA, 3255 bp, Zea Mays
tttctctcctcgcctgctccaccaccacaccgcttgccctccccgatctccgcacgctccggccagcgggacccaacggacagccagccgaacatatcccccctacgctggcgccgtcgcacgcgccgccactaggtgtcacccgtccttgcgccgccgccgcatccttcgactttcgatctgcgagctagcgattctccgctgaggagtggggcccatccctccggagcccaaccccagggcatccgcccgcccccgccgccgtggctcaggccccacgcgtcatccccgcgacggacaacgtagtcacgcaggtggagcgcggtccactcccccccccccccccccccccgcgcttcgcctccgctgagaccgcgccctgctggtgcgagtacccgggagcttccaaaccctagggccgggcatcgagcgagcgagggggtgagcgcggagcccaggcatgccttgccgcccgcggggatccaggcagtgatgcgcggatcggcgcggcgggggcggcccggaagctcggccgcatgaggtgcctcgtcggcggcggcgtccaggacagcccgcgcgcagcggccaaaagagtatcgccggcgtcgtggcggctggacgccgccacagcggaggcggacgcggggagagctgaggccaagggggtcaggttctgcgtcaggccgccggacgtcatggagacggtgcacgagatggtatcagatgaagattagtgcaatgtgggaggaaggtggcaacaaaacaccggcttcacctgccagggtcgtgcaatatgaaggcatttggaaaatagatgacgtcgacaatagcttccacacacagccgtttcggatcaagtatgccagacaagatatctatctgtcagttatggtgtcgttcaacatattcaacattgaagaggagcagcctcggcggtgatgttgaagtttgagctgatgtatgccccaacactagagaacgggtctgagcttcaagcttctagtgtcacatcttcagcagctgtgcatgaatttaggatcccccacagagcactcctgggtctacactcctactgtccagttcattttgatgcgttccactctgtgcttgttgatctgacattacacatagtgtacctgaaagctggtgcaactaaaccatcattgaaggtaccggaccaaggtttaggtcctacatcatatcatattgtcaaggcattattaacttctagaaagttgttgctggaagaactgaagaaaatcagtggtgctattggtaagacagtagaggaattagatgttgctgacttgaatcttggtagatatgagtcatttaatccatcaaaatctggattaccaaattctagtaaagtgttccctgcaactggcaagggtgtgggacagttgactggagttttacatgatttcttggagaaaaacaacgatatggttaatggtacagatgattctatgctggtaaataaaacaaagatattggagtacttgcacgatgcttgggctattgacaggaaggcagaatggtcaatatggactgttcactcaaaaattgagatccctcatcgctatttgcggagtatgaatgatgaatcatctcaccgtcattcacttcttagagtttctggatcaaggaagttccatgacgatcctgcacagaactctgcttcacgggctgaactacaccggaaaagcatagcacaaatgaagaacaacatgtcatggttgttccacagcatagttccagcaaggatttggcttcgaatgcttctgaacaaaaggatactattgtgctacctaaactacaaggagagcctctggtacccaaaagtagtgttggtaaaaaaagtgggcgcatcttgcgagctgtcatttttgtgcatggttttcagggccaccatttggatttacgtcttgttagaaaccaatggcttctattggaccctggagctgattgcctaatgtctgaggctaatgaagataaaacatctggagacttcaaagaaatgggtagcaggttggccggggaggtaattgccttcctgaagaagaaaatggataagctttctagatatggaggctgcaaagagctgaagttaagttttgtcggccattccatcgggaacatcatcattagaagtgccctggcagccatacttgaagaacctctacacttacatgtcaatatcagggcctcacttgggttactggtacagttcaaattctttgttcaattctggactctggctgctgaaaaagctcaagaatgctcaatgcatccatcaactcactttcagtgatgatcaagacccccacaatacatacttctataagctttgcaagttgaaaacattggagaacttcaaaaatatcatattgttatcatcaccacaggatggctatgtaccatatcactcagcgagaatggagctctgcccagccgcatcatcggacacctcaaagaagggtcaagtcttcacagaaatgctcaacaattgcttggatcagatccgtgcgccctcatctgacacccggacgttcatgcgctgcgatgtgaattttgaccagtccaaccacggacggagcctgaacaccatgattggcagggcagcccacatcgagttccttgagaccgacatctacgccaagttcatcatgtggtccttccctgacctgttccgatgacagacaacgccgctcgtctctgtaatgtctctgtaatactgctgcataccaaacctacaaaccgatagcgcacactactgagtactgaccaggcaaggaaaagtaagcttgcataaaggctcccccagaatccaacaccgccacaggcagagtagcgctgtaaagatcctagaagcaacggtttttccagcttgctagatctgattctgtataaatagttgattctttcgtcattccattcatagtgctgtagatgtgcacctttgctgtgaatttataatcctttgtcggcttgtgtatctaacgcttcggtttaggatgtgctgacaatcagtgagcttatgtccaaataagccccctttcttaatgtttggttttagtcaccttggtctttgtgctgctgtaaatccagggtgttgtttctgtttggtgaaatgactgctacatgaatatctggttctggcatcttgccatagccggatcttgcttctgctaaggttattcctatcagggatatataggattggaaaaaaatatgaaagattttgatttattt

SEQ ID NO: 39023 - DNA, 249 bp, Zea Mays
aaacacccgcccatggcgaaggacagcagcgtggcggcgccgaccaacggtgagtaaatcctcggtccttgcttgctcccatggatccacagaaccacgaacacaatcctcggatcacgacgaatcttcctagccttcatccgagtcactggcgacggtgtagcgatcggtcattggcggtgactgggatttctccctccccattagcagcgacggtggttagaaccgcacaatttttgagcaggcgat

SEQ ID NO: 39024 - DNA, 358 bp, Zea Mays
cccgtggctacgacaacagtaggtcaagaaagtcattggcttccaggggtagcgtggtcagccccaaaagatttgtgattacaactcaaatatgagcttcaacatgctctcctgaagctcgaagcagcaaaaggcttcaacaacacagtaaaagcaaatttggatattatgggttgtgcaatctgttgaccctgcttggctacttttgttcagcgggtggaatgcatttttttctttggagagagacgaactacggggattgagttcttcatgtgcgaatagattgcaattcataacagttcattgctaactggtttagcatcgtctattcagacctggcttcaagttacttagaaac

SEQ ID NO: 39025 - DNA, 2573 bp, Zea Mays
cccgtcgtcctctccatttccttctgtctgcttgccctcaaaccctagcccgtaccggcgtccaccttcgcgcaccctcgcctcaccaaacacccacggcgcattggcgcttccacctcttatcgtacgaaggcgagcggctttcacggtgtctctctgtcgcatgcaatggcaccgctgtttgaggggcgcccaacagctgcctgcccacggcatgctcaggggcgctggggtcccttgccgctgtccctgaagtctagcctgggttgttgatcttgccgcagatgcggtactccattacttctccgcccgcgccatcatttcggccacacctcagtctgttgtgttcaggactgtcagggttgtgctacctggatgtcggttgcctcattgataggaatcatcgtgcagattgtcgtgttttggacaatgccaacctttgtttccgctgtgcctgccaaggttgtggcttccttgggtgatgcttatttgagaacatagctgttgtgctctgagcatgtcctgtgtgcctgtcatggcggcttcttttggcgacatcataccaacatattcaatgtcaggctttaaaggagtgagctggtttctatattttaactgatgcaccttgatgctttattgagcggtgtctatgaaatgatttggatggaaggtaaatttcccaccaatttaattttagatattttaaataattccttgccatatctgcattcagcctgttattgtgtttatgttcacccttttttagtagggaaatcaaaacatagttaatccagtactactgggttttattatgcctgattttgtttctgcttttgagtctatcatgattatagggctgttaatgacacatgacattgtcaattggaaataccatgtcaacggactgattaagaaatacaaaatctttgcttagatgggacatatttggaaaataccccttatattaaaaaacacatggtgtgtcaagcattttttttacaaactgtagcaaactgaaaactagttgcattggtcatgcggaaatgtctcatctatctcatgtatgttgcttatattttgtctcttgaagatcacaagcgaatgcacttttctcttgtctctcttgtttgttgtttctctccagatgagctgtcctattcttgttgcattttgtccgcaactcctatcacccctatcttaatccttcctgtaggatggtaggtgtactgaaacagatgatgacaaactttctgaattgcatgaaagtgaaccaggatatgctaattggattttccaaaagattggatcttttgagtggaatatcacaaattctcttactacaaaaaataggtcccactgggactcgaacccaggttgccagattcaaagtctggagtgataaccactacaccatggaaccatttatgtgtgttctccctagataatatatttatggtaacatgtttccatagcattattttgtttttttgtgtgcttttgctagccattccaaaaaatcatgttaggagtgagctagtgtcacacctggttttggaaaaagtaacctagtgcataccatatacgtgccaaggtcaaatttcacgtacacagtcacataagtgaattacatagcataacgctcgaaatacacataaacgtaactgttatattacagactcagtcttcaccataacagttaaactcatactatatttttttgacatagtaaataactaagtgacaatggaaagcgatagatgacatccatgggcaaataactgaagacaacaccaacgtagaacttatcatagttttggaacttctgcgggtactcctttggaacatcatgacttgagaaacggttgcatctcagcaagtgtcccatttaggttaaagtggattgaccatttaggttaaagtggattgactcatacatttccaatatgtgttgctgcctgctgtcccttcatgtttgtgatttcaaaaggctatcctatgctgctgatcagtacttaatggatgggagaagggtcagacctcagataagtacctaacttgctatttcctatttttttatcacttttattgatgcccaattgcatctaaagtgttgtccacttctattgcagcagtgcttgaggattcagtgatcagcagatctgcaaggacaaaaggaccaaaggagtgagctggtttttatattttaactgatgcacctggatgctttattgagcggtgtctatgaaatgagttggatggaagattgtcgtgttttggacaatgccaacctttgtttccgctgtgcctgccaaggttgtggcttccttgggtgatgcttatttgagaacatagctgttgtgctctgagcatgtcctgtgtgcctgtcatggcggcttcttttggcgacatcataccaacatattcaatgtcaggctttaaaggagtgagctggtttttatattttaactgatgcacctggatgctttattgagcggtgtctatgaaatgatttggatggaagatactgagctgagtaattcgggatttggcactgctgtggagagactgttaag

SEQ ID NO: 39026 - DNA, 788 bp, Zea Mays
aaccattttgtatgaccgtataccaccccgcacccacccgaggtgattgggattgtgaagaagagaggagagaaggtgaagtggactgcacagcacacacaactcgtcctcggtcctccgtacccttccgcgctccgccccagcacgaaacgccgaaaccctaccctttggcttctccgtcctcgtcctcgcccccgcccatccgcgcaccagccgaatgtcgtcgggaggcggtggggggcagcagttccgctacacgcagacgccgtccaaggtgctgcacctgcggaaccttccgtgggagtgcgcggaagaggagctcgtcgagctctgcaagcctttcggccgcatcgtcaacaccaagagcggcgtcggcgccaaccacaaccaggcctttgtcgagttcactgacgttaatcaggcaagaaataattaacaacaagagtcctggagagactgctggaaatgtcttgcttgttaccatagagggtgttcaatctagtgatgtcaccattgatgtgatccatatggttttctcggcttttgggtatgttcataaaatagccacctttgaaaaggctgcaggttttcaggcattgatccagtacactgatgcggctactgcttcagctgctaaagaatccttagatggaaggagcatcccaagttacttgcttccggagcatgtaacatcctgctgcctgcgaatttctttttctgcacataaggatttgaacatcaagtttcagtcgaaaccgcagcaggttgcaggacaagaagtatattta

SEQ ID NO: 39027 - DNA, 790 bp, Zea Mays
aaaaaatcctacatctcagcagtgagcttgttgctatcttcccttcatctctaccaaagagtatttttttctaccatacttcaaggcaaagcttatagccatggttattaaagaggtaaacgataaaacgttaggagccacctttccaacatttaaacgttaatgttgaaccgtcttttcagacatgacataaaacaacaggatacaatatgttcatactcttaatttacttgagttcacaaaacaagtagcataaaaggaaatggatcgagttcaaccatagaagtctatgcaacatgcagattagaacttgcatctaggatcagtaaccatcatccaactcatcaatattaagagcatgagcagctaagcaggatgacgacggccttgactcagaatctcagatggccagatcacttaccgaatagagcagctgggtgattcactgtcttgactcctgccctggaacttgatggctgtaagcgacgctggctgctagaggagctagagggcggtgttaggggcagtcggcgctggaggagggaggagggaggcggtgctcgggcgttggaggaggcgaacggcgctagtggcgagcgtcgtggcggcactggaggagggaggagaggaggagaggagggaggcgggcggcgctgaacggctggggctagaggagaggcgggaggcgggtggcggcggtagtaggcgttggacggctggatggatgggcggcgctagaggagaggacggtgacctgtgttttttcgggcctttgagaggcccaatagca

SEQ ID NO: 39028 - DNA, 2817 bp, Zea Mays
aaatatttgtgcgctctcttccaggtgggccctttctctccccttctcccctcaccggctcaccctctcccctcgacgatacatttcacctccccggatctatctcgccgcgtcggcgcgctggtcacccgacgaagctaggaggcagtcaaggcggacgaagcgctgcaccaaatttgacgggggatcgagcacaggaggcgtagtggaaaatgtttaagtttctcaaggaggtggtcgcgggatccggatcggggctcaaggacttcccctacaccattggtgagacatacgcatccgcctggggttcatggacacaccaccgcggtacctccaaggatgatgggtcacctgtgtcaattttttctctgtcagggagcaaccctcaggacagacacatggttgctggccgtaatggtgttaagagattacgaacggtgcggcatccaaatatcttatcctttttacacagtactgaagcagaagttgcggatggacctgccatcaaacacacgatttatattgtaacagagcctgttatgccactttctgaaaagctcaaggaactgaatcttggtggtacacagagagatgagtactttgcatgggggcttcatcagatatccaaagctgtgagctttctcaataatgattgcaaacttgttcatgggaatgtatgcttagccagtgttgttgttacacaaaccctggattggaagcttcatgccttcgatgttctgtcagaatttgatgctaacaatgaagcctctggtagccccatgctgcaatttgagtggttagttgggatgcaatacaagccaatggagctgtcaaagtcagattgggcttcaattagaaaatcacctccgtgggccattgattcttggggactggggtgtttaatatatgaactcttttctggtgcaaagctggctagaacagaggaccttcgaaatactgcttcaatcccaaagtctctacttccagattaccagaggctcttgaattccacacctactcgtagactaaatccttcaaaacttattgacaacagcgagtttttccagaataagttagtagagactatccagttcatggaaattcttaatttgaaagacacctttgagaaagacagctttttccggaagcttcccaatatagctgaacagcttccccgtgagatagtcctgaaaaagctgctccctgtcttggcttcttctcttgagtttggctcagctgctgctccagccttaactgttttgttaaagatgggttcctggcttcctacggaccaatttagtatcaaggtcttgccaactattgtcaagctttttgcctccaatgaccgagctatccgagcatgtcttttgcaccacatagatcagtttggggaatcaatgtctgctcaaactgttgatgaacaacaactggattttccgatactgatggtactatccgtgaactgacattaaagtcaatgctcatattagcaccaaaactatctcagcgtacaatctcaggatctctcttgaaatatctctctaagctacaggtgaagttcacttttggatttgaaaaggtttatactgcagttatgatagacactgctttctgtgacaggtggatgaagaacctggaatcaggacgaacactacaattcttcttggcaatattgcaagctacatgaatgatgggactaggaagagagtactgatcaatgcattcacagttcgtgcactacgtgataccttccctccggccagagcagctggaatcatggcactgagtgtcactggttcatactacgaaatgacagagattgcaactcgcatcctgcctaacattgttgtcctcacatttgacccagatagtgacgagcagctccgactcccccagacggatcccacatggacaaaggaactcgacgacgcctacatccaaacaccggaagagaaggaggaagccctccaatgatcagtagtgggtgcatgcaagaattgacaaaccttattgattgaaaaactcaaattaggtcgtgtcaaaatcaaatatttactcagcggagtcgcattaggcttgcaattcatcattgcaactctaccaagcaaatctgaagcatacttagtccgaggcaagtgaatactatcgcaagttttgtgtacctcaattccaaggaagtaatggagttgtcctaggtccttcaatgcaaactctgaactcaaatattgaagcacaacatcaatagcatcctgtgaagagttagcaactttaatgtcatcaatggtagaccaagagaaatattgatacactttccttgctataagaataaaatatgggtccatggcaaaagggtctcagatattgctcccagattattcagcattattccaaaaagaattattaacagaagactgtgcagcaggccctattgaacagacgatggattgcagacatcaaaggggctcttacagttggagccattgtagattatctacacctttggaatatcctcgactcctcgtagattttgtgctgcagcctaacactgaggatagacacattttcagcttatcattgaatggcagatactctgcaaagtcagcttatattggttttttccttgggtctaccacctttgggcactataaaagggtttggtgatcttgggctccaccaaagtgctgttttttcatttggttggtggcacataatagatgttggacaactgatcgcttggcaaaaaggggattgaatcaccctatcagatgtcctttatgtgaccagcaaggtgaaaccctgaaccacttgctcgtgaat

SEQ ID NO: 39029 - DNA, 4775 bp, Zea Mays
tccacatcactactataattccaaccctcggattatgaaccgacgtcccatataaaattcgaaaaaaggaaaaaaattccgccaaatgctgtcgaatcttccgaaggaaggcgcgtgtcctcgcttgcatcgagagtcttctacggaatgaataaattaggggaaaaaatcttcactgtcgtaacctcctagcaaaggtaaaggacatttacagagagagaaaacacaaacacaacaaaaactccatcaccagacgacatcggctcccccactttttcatcattctcaagtttccctgccgcacttcagttctctatcccattatatttttaggaatgaaatgatgaagtcctgattctcttacgccacctcgggataacacgttcattcaaagccagaggtctagggagctgagtttctacctacaacattttcctcagctttatttcttgtgctacctatgtaacaaaatacatactaaaacataaaaataccatgttttgcagtagttgaaagttcattcaaataaaaaaatttggacggctgaatatcgaccatcaacaaagcaacaaaggaaatggatggcaacgacgaaccagatccccctacttctcatgtgacttctcgtgtaactgatacttgggcatttactcctcaaagaaagatttcatccatgactacccacaaaaacgttgcactagcatgaccgattagtcccccaaggtaccaatgaatacaaataattcactatattaattagttacaatgactaacaacattaatacttagtctgttgcctctaacattacagtgacctaggtctgcatctgtactttccacgacatgttcaatctccttctacggccatgtctagactttccacatcggactcatcaagtgtgagccaaaagctaacatattctccagcaaagaataaacatgagttcacactgccgacagccttagccggtatggagcttggcctcgagtgtaggcccccaggaatgtcaggctaacaccaagccaagctgggttcgtcttctacatagtctcgtttgccaatatgcgatggaccccgcgctggcgagggaggtcctggccgccatcaaggctgacgccgcgggcgctctcagtggatttgcggtggcagtgatgctgttcgtggccagggtgccgaggttcaacgagggtgccgtgagtgtgctccgggatgcggtcgtggtgtcccgccgggattaccgaatgtcaaggcggtgcaagtggttgccggattgtatggaaggggaatatgcacgggccactcaatgtgtcgagaagggaatactaaaatctgtcgacgagagcattgttggcagggagcatgttgtgccaagcattgttcaggtggcttttcgcctgttagaagtctcagaaggtgatcaaggtgaggaagctggcttaggtgaaggagtaatgagcaccgaagaaataggcattaatatgctcaaatcattgtttgaggtccatgaaatggcacggactgagataattgaacagtgcaagttccggattctctcggcaaagcctcagcaaagtgtgccagttctcaggttgattggatgcttgattttgagtcatccatttccaatgctggaattcattgcacatttaaaggagttgttggattatttttcttttatgaatgacaagatatcaactgctttgatcagttgcatcttgccactcacaaagttcagccgtgatctgaaggattacgtaatactggttgtaagaaaggcgatgttcaagagggaggacatggttcgaattgctgctacaaatgctataattgagctgattattgcagaaaacaagaaaaatgaagccaatccttttgaagattcaacaagtcagccaagctctagccaacagcctgaaacacatctagagtttggtaggtgtctctttcaggaactaagtgggttgcttcggagatgtctctcacatcaggtttcactggtttcattatgatgtactaccatacaactgcttcatctctactgtttctgacaatatccttgattttctctggcctcacttccaaaactattactcagaggatgcagaatgtcctcttaaaattggttcatgcttcaaagtagagcatgccaaactatgcattgtggaacctttagattgtctgctgtcatgtatctcaagaattctgcaaattaagcaacatagtaaatgtgaacgaccacgtgatgcatattggaagtgctttggttttgctgcttcacaagataatgaggttggacgagcatcatcaagtgatttattcgtgaaagctttatcaagcatccaaaagtatttgaggatatccctcacagagcagagaggacaaagccaagaagctggatctctttcttcaccatcagagatggctcattgtcataactttgctatgcttggaatcattgaggtttttattgatttttctgcttcaaaactggagaaagcctctggcaaatcgaaggaaatgatagaaaaagaaatcgtggagcttgttgatgcgcacagtggctttgagaaaaaaattagcagtggtagggaaaggatagcacggagaagagcaaatgctggtgatgctacagataagcacaccaacgaacccagggagaattctaatgcttcattgcagaaacatcatggaaacaggggtaaatttgctgattcgagtttgtatgaactttcggtaatgtgtgtcaagcagtgccatgctgataactacaacaatgttagtcaacattctagccaaactaaattgaaccagagctccaatttgacatcctttgtactgaaagcctttcttgaattgttgaaatcacttgcatcaaagcacagtagggacttcacaataaagctgcatggagattttaaaaagttaagccagccaataatgcagctagtatggtgttttctgttagacccaattcaagaaaatggtggaagcaagaagaacatgacccaaggaaagaaaaacactgagtgcaaaaaggatcagttatatttggctctgacatgcctaaaaaaattccttgagccaagtgtttcaggagaacactctagtgatatcattgattttctaatatctttggctccacctaatatagaggatacaatgggtactggggatcttgacaataatgataccactatggttgaagatagaagcacaagaaatgtccatgtgattttgaacatactgaagacgttatatgccagacttcttacccaatcagttttacgtgaatctgaggctgtaattgaattgattctgggtatttcaagaaaactgcaacttgaacgaaggcatcttgttggaaaatgggctacagatctatgtagaaagaaaaccatgcaaagtcctagaatggcacgagagatgttaaaactagctatacatcttacaccagctccagatgacatgattcttgtttatgaggtgtctactgagttgatgaatttaatgacctctggagatgatggagattcttctgatacatttcatatcattaactgtaaaacaaagagctcactcgctgctctctctcttcaaatggttgagtcatctcttactgaattggattggggctttggaaagcttaaagcaatgcttacattaggttatgattgtgctaacattgatgaagatcaaccagcagatgaaataatgctaaggttggctttggagaaagcactctactcgagatcaacattagtagttcaagtgctctcttcctttgcacatatgagccctatggatactcaagcagaacattttctgaaattgactgtcaagttctacaagcttttaactcgcatgtcaaagtcccagattgtacctaaaggctacagacaatccattccaagcctcaagtttcagaaactggcagaagtaacttgcaaaatgctcaccgctcccctttatgattttgtgtttcaacagaatcagcaaatacccataaagggaaacctcgccaaaattagaagagaaaccaaatgtatccctgatcttatttttcagattgaggattatgagaagtatttaatacagctaagcaaactaactaaggtaaaccttttgaggcatgccaaacgcagtgtagcaagagacttccagataaaagataaatctgggggacaacaggaagatgatcacattccagacaatgctgcagcatctgataacgaggctgataaggacgcaatgggtccaaacgcaccagttgaatcatgtgctgacgatgctcaaaaatcatatgctgacgaaaatgcatcatgtgaaagtgggcatgatgaggatgcaggaggtccaaacactccagcagaagcagatgctgatgaaatcattaggtctagcattccatatggtagtccagtccaggagtctgaatctgatagagaagaggaagaattattagcacggacgaagagagctaagacaaaacaagttgtgcaggattctgatgaggatgcagatgagtaggtttttaaacattatcaatagttcaattttcgaagcgtctattgtgggcaacatcatgccaaggtgtatatacataagtttttatgggttatcttgctgattatagacgatgaacacaagagatgtaaaatatatggttttgcaaaaattcttgtgggccatcatgttgattatagaccatgcacagaacatatgtaaaatactttattgtaaattataagttattctaattttctttaagtgaaaa

SEQ ID NO: 39030 - DNA, 302 bp, Zea Mays
tgtgaacttgtatggagctgagcatgaatgccacatgtatgagccctgcactgctggcgttcccagaacatttccccactgagtcttatataagttcagagatggttgcccatgttcagttaccattaaggcatggtccagcgatggttttcctacccttgagtccagcctatgttcatcacaaaaggggatgtagctcttgagtttgagtcgatgtaaacccctccccggtctctggtatggtttacttcaaagcttgcacgccgtgacctgagtctggtgaccacaacctgtaattctcc

SEQ ID NO: 39031 - DNA, 226 bp, Zea Mays
ccgggtgcatcttataaatgcgccaaagaagacaacatatataataacagagtgtatagagataaatgtcataataacatcagagtacttattacatagcggaagtcttacaaaataaaagataattataaaaggatctaaaatccatctttggcgctagaaagtcaactgggagacgccacctagatcgaatcgaactcctcgtggtgtggctcctcttgaacca

SEQ ID NO: 39032 - DNA, 2815 bp, Zea Mays
ctcaactcgactgccgccgccgcaggcacacgggatcctgactgagagctgcccccgcaaggaaaacggacaagagaggcggaggctgatagggagaggagacggaggaccaagagcggcgtcgatctaaaagcgttggcggcggccatggccaccgcggaccggacccggactttcatgaaggacgtcaaacgcgtcatcatcaaggtgggcactgcagtcgtcacgaggggtgatgatgggcgactggctgtgggccggttggggtgtctttgtgagcaggtaaaagagctgaatgtcttaggatacgaggtgatccttgtgacctcaggtgctgttggtgtggggaagcagaggctcaagtacaggaagcttgtcaatagcagctttgctgatctgcaaaagccacagatggagctggatggaaaggcttgcgctgctgttggtcagagtggcctcatggctctttatgatatgctatttacccaacttgatgtgtcctcctcgcaacttcttgtgacagatagtgattttgagaatccaaactttcgggagaggctctgtgaaactgttgagtcactattagaccttaaagttgtaccaatatttaatgaaaatgatgccatcagcactagaaaggctccatatgaggattcatctggtatattctgggataatgacagtttagctggtcttttggctattgaacttaaagcagatctccttgttctactaagtgatgtagatggtctatacagcggtccaccaagcgaaccgggatcaaagatcattcatacctacattaaagataaacattacagtggaataacttttggggataagtcacgtgtaggtagaggaggaatgacagctaaagtgaaggctgcttttgtggcttcgaacagtggcacacctgttgttattacaagtggatttgcatctcagagcattgttagagttctccaaggagagaagattggtactctcttccataaggatgcaagtctgtgggagccatccaaggatgttagtgctcgtgagatggctgttgctgcaagagaatgttcaaggcgtctgcagaatttatcatcggatgaacgcaagaaaatattgttagacattgcagatgctttggaacaaaatgaggatctaattagaactgaaaatgaagctgatgtatctgcagcacaagatgctggatatcagaaatctttggttgatagattgacattgaagccagaaaagatagcaagccttgcgaaatccatacgcactcttgcaaatatggaagacccaatcaaccagatactcaaaagaacagaggttgctgaagacttagtgctcgaaaaaacatcttgccctctgggtgtgctgttgattgtttttgagtccaggcctgatgccttagtccagattgcgtctttagcagttcgaagtggcaatggtcttctcctgaaaggtggaaaagaagccatgagatcgaacacagtattacataaggttataactggcgcaattcctgacaacgtgggtcaaaaacttattggccttgttacaagtagagatgaaatcgctgatttactaaagcttgatgatgtcattgatcttgtcattccaagaggcagcaataagctggtttcgcaaatcaaagcatcaactaagatacctgtcctcggtcatgcggatggtatttgtcatgtatacattgacaaatcagctgacatgaatatggcaaaacgaatagtgatggatgccaaaactgattacccagcagcctgcaatgctatggagacattgcttgttcataaagaccttataaaggctccaggtcttgatgatatactcctatcactcaaaacagaaggagttgctatttatggagggcctgttgcacatgaagtactgtgtattccgaaagcagattcattccatcatgaatatagctctatggcctgcacaattgagttcgttgatgatgtacagtcagcaattaaccatatacatcgttatggaagtgcacatacagattgcattatcaccacagatgataaagtagcagaaacttttctgcgtcaagttgatagtgctgctgtatttcataatgcgagtacacgattctctgatggggctcgttttggattgggtgccgaggttggcataagcacagggcgtatacatgctcgcgggcctgtgggtgttgaaggtctcttaacaacacgctggatcatgcgaggaagtgggcaagtggtgaatggtgacaagaatgttgcatacacccataagaaccttcccttacaatgaggctgtttttgtgcttgatcaggattcgtgtctatccagtgatgtttgatagtttcatcaggcaggagcatagaatggtgaatcttttcgattgaggactgtgaatccatggatgttcagtcattgtttgtgtagacattgtggtgagcttggaggccaccccacctccccaataaagcagtgctgggagtaatagagcactgatgtactgagggtgcctaggttaaacaagaggaaccggttatatttgttttgcggtcgaacacaaacaatttttgttggtgacttgtttcttatgattctacatatttcaaggtttatgtgctgtcctaaccgggttctttgataccgggtattttggatactgtaggcatactgtaacgacagcaaaagctggctgcagtagccacagctgtactgctgcaaatagctgttactaaaatatcgtgcatcacatgtcggccacaattacccaaaattgcgttgttctagttctaggcaatggtatttgtct

SEQ ID NO: 39033 - DNA, 2687 bp, Zea Mays
gagcaactcacatcgaccatgtcacccacaaaattatgcagtttttggagactcaagggttcttggattatctggagagatgcaacactgcagaagaaaatgcccacaaccttctcgataagttgcaggatgcaaccggaagaggacaaaaccctctaaccatatttccttctcaagtttctgatcctgagattataacaatagccaatcctgagattgaaggactagacaatagacactgctataagaggtttccagcaaatgcaagaacagaagaacaagaagaaaaacttctccttctatccgagtaaatgggggcccaaaggcagaaagtctgagcccaagagagagggcggctgagagagaaaggatggttctggacataaaagtgaagctccagggactctggcttcgtcttctgagactaggggcaactgaggatcctctctcatcttttgaatatggcaccatcctagctttgattgagtctgacgcagaaggcatcgggggaagtggctttgttgaatgcatcagagagcatattcattcgggctggcaatgtcgcttgactgatgaacaattcattgctgtaaaagaattgcttaagatggctataactcttgcgaactctcgcaacgacctggcgaccattagagatgctcttgaagtttctgctgaaatgtacagaaaagacccaaacaatgttcaagattatgttcagcgccatctattatcattgtcagtatgggaggagcttcgcttctgggatggctacttcgaatatttgatggaaaattgttcaaataagtcagcaaattatgtaacgttagttactgcacagctcattctcatggcaactcacatggctggattgggattacctgacattgactcttggaatatgattgagaaaatagccgagagaaacaacttgggttataaacagcttatcaaacttagagcattgctcacacatctgcaacaactccggattggctattggggggttgctacagggaaaagccaaccattgcagtcatatggcatggcttcacctcatgcgatcgatgtgattgatgaaagccaacaacctgctgaagcatctgggttgggccgaagttgggtgcaaagtatgtttagcagagacagaagtttaagagccagctctttcaaccgagctagtgatggaaatgctgttgctgccacgggcaaaaccgaaatctcagctgcacaaaagaaaactcaaactaacatgaggacccttagagggcatacaggtgctattactgctcttcattgcgtaacaagaaaggaggtctgggatcttgttggtgatcgtgaagatgctggttttttcatcagcggaagcacagattgcacggtaaaaatttgggatccaagtttgcgtggttctgaacttcgagcaacacttaaagggcatactagggcaattcgaacaatcagttcagatcgtggcaaaatagtttctggagctgatgatcagtctgtcatagtatgggataagcagacttttaagcttttggaagaactgaagggccacgaggcaccggttagttctgtccggatgctctcaggagaacgtgtccttattgcatcccatgatggtactgtgaagatgtgggatgtccggactgatacttgtgttgttaccgtgggtcgttgccaaagtgctgttctctgtatggaatatgatgattccactgggattctggcggctgctggaagagatatcacggcacatgtctgggatattcgctccagcaagcagatgttcaagcttcaagggcatacaaagtggataagatcaatgaggatgaccggagagaccataataacaggtagtgatgattggactgctagagtgtggtcccttaaccggggaacatgtgatgcagtgttagcatgccatgctggtcccgtactatgtgtggaatactcaccttcagataaaggaattatcactggttcagctgatgggctcatacgattttgggaaaatgaaggaggaataaaatgcgtcaagaatcttacacttcacacagcatccgttctgtccattagtgccagtgatcactggctagcgattggtgctgctgataattctatgtctctttttcatcggccacaagaaagattcggtggcttctcaaatgcaggatcaaaagttgcaggatggcagctttacagaactccccaaaaaactgctgcagtggtgagatgtatagcatctgacctggataggaaaagaatatgtagtggtggtcgcaacggactcctgcggctttgggatgcaactacaagcatctaggactgatagatgttcatgtgaaaaggcaattgacatgatgttgcatgccattttccttttagctaggaatttatgtgctatttagaggatgcgaaaggagccggactttgttctactgtttctttatcatctaaaaaaccctgcccagttgagtatatgtttgacgtcgtgtaaaattttgtttatattttcgggttcagatagccttacgtggctacgattttgtaagaactatgagaaacttgggaagttctgtactactaccagtgcaaatgtttgttttagtacaacattattttttatgtgcatattcatcgtatgaacctgcactagtgcaaacatgactgctagcatatgc

SEQ ID NO: 39034 - DNA, 3022 bp, Zea Mays
gttttctcgttgtatggcccgagtttgtctgttcttacgtggactgctccagaaattttggcacaggatttcctatatttctttctaaatacaatgtcgttcacttctgggtcgtcagtatcttattgaatatttctgtatttttttcttcttttcgtcacccttatgttctcttcgaggagatgttttcgtcattgtcatcttaagtcgatctatcattctgaagagctcttgcgaaaggctgttccatgttgtttatgcgtatgcgcttcgagctccgagccacaggagagtcccccactcacaggcaatcacgcaacgatttggatccatgccatttctttttcctggtcttgaagtgaatgggatggaacagccacgttccattttatttgtttttatatttattcgtggggagtgtgccggtcgcatcgactttaacatttcgtgttacaccacggttattatgagttgtcgtttactcacatcgacacggttcctgttttggaatcagctccacggagaattttgagtttgtgggaaaaaaactgatgataattggactgggaatatagtgtctctgattagaagtataaaagttggtgttcttccagttggaggagattgcctgccatctctgagaaatctctggttgagcaatccaagctgagatggaaggccatgtagcaatggggtggaaggatcctaatccaggccaagaatcttccatggtcttccaatccagagctgttcggccagacaccgtagaggggcacagcaacgaggacgttgaagccggatttgagaagcatggcttgtcagccgccttaaactcgcctcagcacgaaggccgatcactgccactgaccccacagtttggccagaactccagtcctggaagcagcctcgccgagaggatgcaggcaagagccggattcaaggtgccgaagctgaacatgcctttcagcacggtagctggagatgatagttcagtgccaggagctccatcgccctacctcacgatcccgcctggcttgagcccagcaacgctgctggagtcacctgtcttcatttcgaatgccctgggacaagcctcaccaaccacggggaagctattcttgtttggtagcacaaatgacaacgatcctattcgacctggaggccctccagttggagatggcactgatgctttttctttcaagcccttagatctgaaatcctcacactacactgctgaagtaatgaaggaacaaaatacgcagtcttctgtgaagactgaagctaagactcaggcagtccaagaggctaatttgctgggccaactgaaccagcagaatcacgatgggcagacaaacatgaatagtgacggtgctcgtgactccaagctcagccgtcttgcgtctggcaccggtgcaggcaatgaacacgcatcacccccggattacggccagagagccgaggaagctgatgcgagggaagactacccggcggcaatggccgttacagcgccagcggaggacgggtacagctggaggaagtacgggcagaagcaggtgaagcacagcgagtacccgcgcagctacttcaagtgcacgcatcccaactgcctggtgaagaagaaggttgagcgctcgcacgaggggcacgtcacggagatcatctacaagggaacgcacaaccacccgaagcccacgcagagccgccggccaggcgcaggcgcgcacccgttgggcggcggtgcgcaggcggacgcagccgacaacctgcaggggtcacaggcaaacgcggcggaagccaaccaggcgtggcgtgcgggtgtccaggatggcgtggacgcgacgtcgcccccgtcggttcccggtgagctctgtgactcggcggcgtcgatgcaggtcgactgcgcggcccggtttgggtcccccgagggcgcggacgtgacgtctgccgtgtctgacgaggtggacggggacgacagggtgactctgactcatggcggtgccaacgcggcggagggcgacgaactggaatctaaacgaaggaagctggagtcatacgccattgacatgagcactgcgtcgagagctgttcgcgagcctcgagtggtgatccaaacgacgagcgaggtggacatcctcgatgacggctaccgctggcgcaagtacgggcagaaggtcgtcaagggcaacccgaatccaaggagctactacaagtgcacgcaaccgggctgcacggtgcggaagcacgtggagcgcgcgtcgcacgacctcaaggccgtgatcaccacgtacgagggcaagcacaaccacgaggttcccgccgcgaggaacagcggccacccgagcgccgcggcggcgccaggcgcgggtggcccgcgcaggcaggagcacccgtccgtgcacgacggcctgatgagacagcacctgggcggctgcggcgtgccgttcggcctgccgccgccgccgccgccgccaagggacccgctggcgccgatgcgcaactacccgacgtacggcttcactgcccttggcgccggctccacgtcactgccgagcctgccgatgctcccggtgttggcgccgtcctccctgcaccagcacccgctgctgaggcaccggcaggcggtgcaggctgccggtctcgcgtggcgcccaaggccgacgtgaaggtagagggcagcgttgccggcggcgggatcccgtcggtgtaccagcagatgatccgctgcgggctgcgtctgccccaccagatgtagatacttaaaagtggagaggattagagtgattctcaagttcgtttcttaccattcctgttagtatgagttcgtgataagtattatagcgtggaaactgacgcccgctgcattcgttttttttcacccttctgttccacttcattttttcccgtatttatttatttactacccttcctcaatgatattcggttcttcttgttcagcaagacagcaactggcatcagttaatgttcatttgagaaatgaccaacagtttctgggctggcaact

SEQ ID NO: 39035 - DNA, 4288 bp, Zea Mays
atgggatctggccgcgccgtcatgctctgtgggacccttgccctggtgcctaaagatcttgcgctgccaccctgccggagcacgagagggtggggatcatcgggcggacaaggcttggtcggcggacaccacagcggcggggagcgaccacagttttggctaccccgcgggaagaagatgaaggaggaccgttggatgcgcgatgaagaattgagcaggcagaggaaacctgagcgcaatggcagtgtatttacacctatagctgcaatgtattccagtggtcatgcactccctgttgcaaataggagccacggtttggtatttggcagtctgagcaaggactgggacgacattcgccagcgcaaggatcagttggtcaacttccttgctagtcttgaacgagcctctggagattctgcggcagctggcaaaatcgaagatagcaaattggccagtcctgtggagccaactgaacaaaaagagaaggctgccataatcgttcttgattcagacgatgaggacggaaatggttcaggaaacagtaagttggcatctgagactaacaaagaactcggaacatctggattgattaataatatcgcagaaaggatgacgtttaatgggagccaagcatttggaaccgtgcatacttatggagataagaacacacagattgttccgtatggtcaatgttctgctttagtgaatcagtttcctttgcaaaccagttggcaaccatctattcagtttgagagagtcgtgctgcagaaaaggcctgaggagcagcgaatgcaagatcttgtggctgctagcatagccgagaagagagcagaaacacaagtgttcctttcacttcccacagagaaaaagcgaaggagatcagaccccagtctgcatgccagtgacgatactgctactgtccctaaacaaagaaaaagtaaaggtgccacagttgtagcagcagctaatttgtcattggtttcacaacaaactgctacatcaccagaacctgacatggttatagaggaagaggagaaacataaaaatgaaagtgatggtcttgacgattattggaaagattttgcattggctgttgaaagcacaaagggaggagagagttacatgcttgctggcggtgggctctgtccagtagaggttcagtggctgatatgtacaaccgtagtggtaggtatcggagttcatgttgttgagtacgacatagttggtaaacagtgcacgcttgccgcttgcgggtatgtttgcacgtttagtcgtggctatagtgactgcggtacacaccacacacacacagtaacaacatgtacaactatggtcttcgacgtggcgatagtgctcttttgaccacaatgttgtctattgcatttaatgcgatggacagcaagccttatcttgtctaccctgtgccacccgaccgctcgaacagaggcgcttgtggcgcctgggccgtctcaccccaggggcgtcctagggaatgtttgggtggccctcggttgtgtgccccagtctacagggggcctaggacctgactgagtcggtgcttgaccgccagcctggagggcccataggcttggaggccctcgggattttgctctttgctttaagggccctggatttagtaggaacagggcatgccctcctggggcttggggctggtatgagccgggcccactgcgggttttcttctgctgacaggatctcagaagtcgtattgctaatatccgggcttgacgaagttgatgaggcggcaattgaaaaggaagataatggaaagatggaggacatcgattgcaatcatgacatccggattcatgaagatttgggtcatgtatgccgtgtgtgtggtatgattgtgagaagagctgattcaataattgattatcagtggaaaaaggcttcaaggagaagaacgaatggctatggaggacattcaaaagatgctgatgagatagattgtggtactgttaaactgtctgaagatttcatagtcgcagatattgctattcatcctagacatgctcggataatgaaaccacatcagttggaaggtttcaactttttggttaagaatttgattggagacaagcctggaggttgcattctagctcatgccccaggtacagggaaaacatttatgcttataagcttcattcagagcttcatggcaaggtatccatctgcaaggcctcttgttgtgctgcccaaagggattctaggtatatggaagacagaaattaaacgatggcaagtgcaggatataccagtgtacgatttttactctgtcaaggctgaaaaaagagtagaacagttgcaaatcctcaaatcttgggaagacaagatgagtatactatttcttggatacaagcagttctccacaatcgtcactgatgatgggggcagcaatgtcacagctgcatgtcgagacaggctgcttaaggttcccaaccttctgatacttgacgaaggacatacacctagaaatcgggagactaatgtactcgaatcactaaatagagtggaaacaccacgcaaagtggttctttcgggtacacttttccagaatcatgttgaagaagtgtttaatatcttgaatctcgttcgcccaaagtttctcaggatggaatcatcccgtcctactgccagacgtataatgagtcaagttgaaatagttggtagaagttcgaaagggcttgctgatggcgcattcactaaggcagttgaagaaaccttattgaatgatgagaacttcaagagaaaagctcatgttattagaggtcttagagaactaacaaaggatgttcttcactattataagggtgatatcttagatgaactacctggcttagtagacttcagtgtgtttttgaagctcacacccaaacagaaagacattatttataagttggaagcacatgatcggttcaaaagaaatgcagtagggagtgcactgtacattcatccatgtctttcagaactttcagaggttaatgctgagcatagggctaacacctttagagatgatttagttgatagtctggtagattctatcactgtgagagatggcgtgaaggccaattttttcatgaatatcctgtcacttgctaattctgcaggagagaaagtgctagctttcagtcaatatatatctcccatgattttctttgaaaggctgctggtgaagaagaaaggctggcatgtggggaaagagatctttatgatctctggtgatactagccaagaagacagagaattggcaacggaccattttaacaactctgctgacgcaaaaattatgtttggttctatcaaggcatgtggggagggtatctccctcgttggtgcgtcgagagttgtcattctggacgtacacctgaacccatctgtcacccgtcaagcgattgggcgtgcattcaggcccggacagcagaagaaggtgtttgtgtacaggcttgtagctgccgattctgacgaggtaaaggtccatgagacagcattcaagaaagaagtcataccgaagctgtggttcgaatggagcgagcactgtactacggaagacttcaaacttggtcaaattgatattgatgactctggtgacgaactgttggatactaaagcaatccgcaaggatatcaaagcgctgtatagaaggtgagcttccctccttcccttacaattgttttgcatgctagttgcctcatctagtgcctttgtaggtaggtaacaagctttgtggccactggacaccatgtacatattgcagtgctgaccgtcgagctgatccttaaactgaagaaagaggtgacgggtgttgcggtggctacattgcgcggtcattcccagctatatccgtggaatggcggcttcttttgttcgtagtatgtgccaacttggggcagcagtcagctgatccccagacacatttctagactcttttttaggctcaagtttctgagaattaacctgctatggcgtttagccttaagtaaatatttcgttcgcaacaataataacccagtaaacctaatttgttcttgtgcgtttgtggtggtggttcttgaaatttacctggcgccttcttcctgggctagatgctatgcaggtgtcacaggttggtttgttggcatgtagaatcgggaaatgctaatctcgaaagctcgtagtttccttttcccccccgggtgacatgtttattcacctcttactagttaccacgtccatttccaactataagatatgatactttggcttttgaagatacattacttttatt

SEQ ID NO: 39036 - DNA, 1678 bp, Zea Mays
tgggtttatttggagtctgtaatggcctgttaagagaccggatatatactctgtacttggccagttggcaaacgacgatcagaataatccagagaatcatatccgtaacaaactcacctcggttgttgcgactcgctgacgctccgacgaactcacgtcccggcggtggcgcgccggcggccacgggttgtctcacatcagccctagctgcgcttgccctggttccagcagctcgacgccagcccctctcaatcttccatcgctgccgctcagcttgtcccagccccaacgccgaccccctgttccctctagcttcgacgtccgtcgagccctgcccctaccccatggtcggcctacctcgccggtgaggccctggcgctacctctcaactcgccctcaagcctagagtctcgttgttcccctcctcacgttgatgctgcagcggggctacgcctctcccttttgcagtacctcaccactatttcgtttgttgtcggatgttgacaattggaaatccatgtagcaaataaatgattttggaactgggggcagacattggaggtggatttccctcaattggagatattgacaaattggaaaaaaaatgtgacttgacctgtgctgcaacaaccttaaactaggaggggattctaattcttcatctctaccaacaatcctctcctgttactttttaaaccaataactttttcatgtttttgtgcagatgcacacatccttgagccaaaatagaaaaaaatcatagaagagttctttggctgtcacgtgattcaagagtattaatgatatacaaaagtttgctttatggcaagttaggtaaccacaaattttgggcaatgacagggacgtgcagtggtggtctcttaaaagaattttgtgtccagtgtagctatttccactgcaaactatcaaatcattacaaactgctgggaacatgctccatcttatcgaagcatgtatcttgagaaagttgatcgatacatctgcttatttatggcctggttatgttgtaccatctgggactttaaaagatacagctttgccccaagaatccccttggttaaactttatgaaagtgtctcgactttcaggaccccttattgatgctctggtcgcatctcctgcttcaaggtgtttcaagctctgcaaggtgaggtctgttcagtttggccagaaaggcatctcctacctgaacacctacgacggccgcacaatccgctaccccgacctgctcatcaaggccaacgacaccatcaagatcgatctagagaccaacaagatcatggacttcttcaagtttgacgtcagcaacgtgttcatggtaaccggcgggaggaacaccaggcgtgtaggagtgatcaagaactgggagaagcacaaggccagcttcgaggtcatcgacgtgctgcttggagctttttgcatgctatgtctagttttctcctatttgttgtacaagaaaacataaaatggaattcaaatttggtggtcgcaaaagtgtggagacttgaattcatataaagttaggcttaacattagtgcaaaaagttgtattttagtttagatttagagtacacttatgtatgccttgtttgacaatacttatttatgatatattgaatggtacctattgtaattgtctattattgtaggatattcg

SEQ ID NO: 39037 - DNA, 208 bp, Zea Mays
tattgcaaatatcaaaatctttagccttagcaatcaaattctcattttctactctaaggctagcaagagatacattcaattcctcaatcttagcaagcaaatcatcattatcatctctaagatttggaattgaaacattacaaacatttgaatcaaccttagcaattaatttagcattttcatttctaaggttggtaatagtgtcatg

SEQ ID NO: 39038 - DNA, 3681 bp, Zea Mays
gttcaggcgttcaacgcattgttcagattcgtgtgcacgtgttcgggcgttcagcgcagtgttcagcaatatttgtcgattctgaacaagcaccgtttgatgggcccggcaaagggttctcgaacaattaacaagaccatagtaaaaggatatgaagatcaacagcagcatgatgacccatctagttcaagcaaagctaaacagaaaaagaggaaaatttcagatttagatcccaaatggagcaaggatgaacttacacgcttttatgaagcctaccgtcaacatgggaaggattggaaaaagatcagcatagcgataggcggtaagtcgtcggacatggtgcggtctctttacagtgcacatcggactttcttatctcttccagaacatcaagctactgccatggggtttatcgcgctggtgactggtcatcacaatgcttcggagaaaaccacgagtcatagaggatatgatcacatagccagagcatctggaaaggcaaggaaacatggagaacaacagaaatcaattgatggacctgacctgcacaactgtcatgaaggggaaattactggattttcagcttccttcaaaaaacgatactatggcgaattggtcaggaacagccgaaatcatgctgttcagaggcgtactcctcttataccagttatagctcctgcagacaggagtaccattgatgagcccacaccaggaattgaaaacgtcatcaattttaattctaccaagagaaaatatgaagcggccaatcatggctgtgctgttgctccaacaaataagtactcttcggacagagtttctggattcgctgaaacatgcaaggctgatcaaggccatagttacttggataccatggaaattggggacatagcgatgtgtcaacaacattttaagaaaacacgaattcagcaaactgtggaggaaagtcagactggtatagttgagcatgagacaacgatggcatctaaagaagggaataagctagtctcttctgtaaacaacaatcagatacttatcgacagtatttctgaagatgatatgttggtcttggatgtattgaatagcctggtgaatgcaccctctaaaatgtcagaactagagattaatattccttcaggttcgcttggaaaaactgactctgtgttaagggaggaaggccaccctaccattgatctgtctaaacaagggaagccagttcgtaaatccagtgcttccaagactaggaagaaaaaacataagaagatattaggtgcagaggtgcctgctgaagcacaaaaaaaatgtgacgataatttagtcctgccggaaacactgagggttggtatcactgatgattcttccttgtgtactgactctggaagagcgaggacaccggaagcatctgaagatatttctgctgaagtccccaatacacaaacagaagccaagcctgaatttataatgtctggaaggaccaggttgaaatctcagatgcattgcaaaacaaagcctatgtcgtgcaatgaaggttcagataattttcaggcaaagaagttgctgcactgtttgtcatctgaaccacttcgtagatggtgcacatatgagtggttctacagtgcagttgattatccatggttttcaaataatgagtttgtgcactacttagatcatgcaaaattgagtcatctttcaaggttgactagatcagaatggagcgcgattcgaagctcccttggtaaaccgcggcgattttcaaatcattttctggcagtggaaaaagaaaaacttgaggattatcgggagaaagttagaaaaatctacgctcaactcaatgatggttcacgggattctctacctgcagacctagctaggccattttcaattggtcagcaggttattgttcgtcatccaagttctagggaactttgtgatggcaaagtggtgatgatggggccggattgttacaaggtccattttgatgatcctgaccttggtgttgatactgtgaaggacactgattgtatgccagttaattggctgcataatcgtcctgacaacatgagaaggaactacctttcaaatgatgtgtacaacatactggagatggatcacattcctgaccttacaccaagtgagaaccggaatcatgctataaatggaactactgtattcgaggagctcaaaagtctgcgcttaacatcagatagacagcctaaggcagaatctattatacatagtgaacggccaccatataggagtacatctgatggccctacaagttctagtggtttctcttgcccagacaataatgctggtcacaacggtgaactagagtcatatgtagctgcattttttgaaaactcactatcacaagccaggcagatggttgacgaagccatccaggcaaactctggtggtagtgatgatgaaaaggtatgcatgttaaatcaagtgacaggatgtctaggctcagattctcgtggcgtgcaacttccatctgacctgatatcaaactgcatcgcaacggttatttcaatcaagcgccttagcgactcgcgacatccatttggtaacgtagcaggcgtcttggagcatgctttatcaatgctgcgtccaagctgtccacagaacctcggagtttacacagaaataaagagagacctttgcaccatagcgaaccagatttttgcacttgtgccaacagcatcgggcaattgcagccctcctgtctcgcccatgtaactgggacctgccccggatagacccgttgccttcttgcaggccctgcagtagacacgctgcttcctctgctgtgagttcaaaacagaggttttgctgctgttggagcttgatgttatgaagtccggttgaatggtagcatacggaggacgcaagtctgatgtgctgacttgagcttgtatatgcagcgtgcgatcattaattggctagcctccttgtaacctgtgtatatacctgaatgaataatttataggtccatatacagattcaggatagttaatatctgatacagtagtgaataaagatgtatttctgcagtcatgattctcgtcttctcgatgtaatgtcacaggaacgtttcttgataggaaatttacataataatattaaaatgagcgagccaagagttcaagacccgttcgctgtgaaccgcgacaggtttccttagtgcctctgtacattgggacaggacataaattattcgatcctgatcgtacatacacacatttgggaacacgtattttatcaaataaatttgtgtcggcctggtaccttcacagtatcaacacaaatttattcttcctaattcctggacaaagaaatttacggatgataacaacacaactgcttcatcctcaactgtgttcttaacagaacatcatccttgaatcctgcaattacggtcattagatcctaattatgtcaaacgacactcaattcatagctcaattagagtattagaaaagagaaatttctcaagaataaactaacctttaatcagtatagtacaagagcaaggatttttcacattccccacaaatgtgtacttttcttctacgagaacatactcatagacaagatcagatgagcctagacaattttcagtcaagtcatcaactgaattgatagctccaccaccacgtgatagctcgaagagcaataatc

SEQ ID NO: 39039 - DNA, 2385 bp, Zea Mays
atggcctccggttcaggaagggcccgaggcggcggcatccgaatccaagaaccgggtagtaggcaccgcgatgagtccaacgccggcgccgccgccgcagctgcagagccgccgccaccctctccgtccaccgacggtctccaagaacggccccatgggccattgggagccgagagcgggagcccctctgcggccgccgccgcactgaaggggaagggggtcttggctccatccccactgccttccccgacccgctccgaggaaaccaactccctggtatcatccgacatcgtctccgacgaggaagccgaagagttgaggtccgccaacacgctcgcggacggtgacaggaggtttggagtgtcttggaagagcccgttggtggaggcgatgatggaggtgccgaaggtgacgaggcatatcgattcgaagacggcgttcgacaacttgtcgatggagcagcaatgggccctggcggaggagatagaaatgcaacagcggcagcaggcgcagcagaggaaatgtctctggatcacattcaaaggtggcatgtcaaacatgtttttggactggataggaaggcaaatgcacaacttcaattcagattctacagtaatcataccccatgtgaatcaccagacaatccctatgaccgggatcattgagcattacaacctcatggaaacggatgctggacgaggagtaatatttcattcaaatgtactgaaccttcgtcgtgcctattctgaatttaggccagtgcatggagatggagactgtttctacaggagcttcatgttttcctacctcgagcaagttcttgataggcaggatacacacgaggaacaccgtcttcttgctgctgttgaaggagtggctaggcatcatgcgcaccttgagtggaactccgaattttccctgagacacaaagatatgcacattgtttcacattagtggtgtattggcatgccatcacaattttacctcttgacattgatacagatttgttttttttttgaaaatataacatatgaatacatgttgaaataagatcaatttcatataacagcactgatgagtaatatttacagttatttagtaataaataactcatgcttctacttccccgagataatgcacccaagctgttttgtgtgttcatctgattcaatcacaaatgtttcctttcacacttctctattaaaacatttttttttcaattacttaccatgtaatcggtgttctttggctgaaggttctcagacaagtgttatcatggtcatacttgctcatgcctttgttataagtgatcagtattgtgtaagcattgttgctgtatacagtgacaatctgattctttcaggcatttaagacgttgataaagaaagtaatgagatggaaaagacacaacagatggaagaatgtactgacgaccgatagctacagcaaacagaaacttctcaagttcttcagcggttgtggcaggccagacaacatttttgctttcctcagattggtagcagctatctggatatattcgcacagtgaagagtttgaaccacttatacccgagctcgatgaatatgacactctcagagaatggtgctctcaggaagtaatcaggcataaggttttcacagatcatgtccagatgacagcattggtcaccgctcttggggtgccgctgcgagtggagtacctcttacaagtaggagatggtcaagacctctacgatcgtcaggaggattcgcaagactatacgccaacaagtacatgttggtctagtcatcgtcgtcaactaccccatgttcatgtagtcccccgtgtgaccgtgctctacacaaacgctcactatgacatcatctatccccaccgtcgcgatggtcctcctgttccttctattgatgagagatgttgtcagcagactgcactggtacagcgcccaactactgagagttcaggtcaacaaattgcccagagagatagctgcagtggtactggtgagagttcaagccaacatattgctcaggtggagatctccactgatgagaattcagatcaacatgcagagctaaagttgacttctactgatgcccatgagtatgatgatcattgctgagtgaagctataggtagagaattagggcattaggcacacactgatgactgagatagctgatattctggactttttgttacattggtacaaactgctggtgccaactggagatcagtagctactcctcccttatatgaaaactctgcaaaggatgagaatcaggcatacagtgatgaggtagcaattaattgttacaagttcataatttttttttgctgaaaatttagtattcgatcaaatccgcctcaaccaggggtggagggagag

SEQ ID NO: 39040 - DNA, 312 bp, Zea Mays
ttataacgatgtttgcattgtaagtgtcgctcatacttccacatatgtgtgttattattagtgagctgtataaaatttcaatatctgacatgcacgtgtgacttgcagaatgcaacatgatcagcaggagattctttacggttccaagcccaatgctagtgccagtaaaagggttgggtatctcaacccaatacttatattcgaggaaagccacacgtttagaatcgggaaagacaacgatgaaatacggggaaagacggacgaagaagttgagaagcgtataaaggatatgaagaaggattttgaagctcg

SEQ ID NO: 39041 - DNA, 468 bp, Zea Mays
cggccggccgggcgcgggggacagcagaactgcaggagggcaggcgcggcgtggaggtgagcagtcatgcatgaaggcctcgcggcgcgtagcactgcacggccggcgttcaattcgcgagtcacgacgacgactcacgtacggaaggtctcgcgcggcaccaccccagtacgcacgtacgaaaggtctgccgccgtgctgtccggcggtaggagcccaggacgggcttgccaacgaccgcgcgccgtgacgggtcggggcacgggcacgggcacgggcacggggtcaccgctctccggctattgattggccgctacccgggctgctacggcgggatggtgtatggaaccgtggtcgagttcgacttgactgcgtgcgtgggtgccgtgtcgcgtggcgggcgtagggtcgtatttttgtaatcgatcgctggtgcgtgcgcgcgtatccgtatgtacttggcctccc

SEQ ID NO: 39042 - DNA, 3327 bp, Zea Mays
attgaagctacttctagcctatcaaatatcgagcagatactgaaggaagctcaacaccgatggttacgccctgctgaaatatgtgaaatactgaaaaactacaggaatttccgtattgctccagaaccaccaaacagaccaccaagtggctcactttttttatttgatcggaaagtattgagatacttcaggaaggatggtcataattggaggaagaaaaatgatcagaagactgtcaaggaagcccatgaaaggttgaagtctggaagtattgatgtgcttcactgttactatgctcatggggaagagaatataaacttccaaaggaggacttactggatgttggaagaggactatatgcacattgtacttgtgcattatcttgagacaaagggtggcaagtcatctcgtgctagaggaaataacattattcaagaagctgctgtgggtagtccttcacagattatggaggtagaaagctcacttagtggacaggcctcagaatacgaagaggcagaatcagaatatctaaagcaaaattcggtgcagcagatatttattcaggaggagctggatacgactctttcacttggatgcaacagcatgaaaatggaactggacccgtgatagattcttctctcttcagctcttacacacctgcttcgtccatagaactggacgagcctggtcaaatgccccatctccagtttcctgtcccttctgatcaaggtgctaccacggaaggcctgggagttgattacttaacatttgatgaagtatattctgatggcctcagtctcaacgatattggtgcagcaggaactcatgggaagtcatatctgcagttctctagtgctactggtgatttgtctgcaacagagaacagcctccctcaacaaaatgatggttctctggaggaggcagccattggctatccatttttgaagactcagtcatctaatctatctgatatcctaaaagacagctttaagaaaactgacagttttacaagatggatgagcaaagagcttcctgaagtggaagattctcaaattcattctagttctggggggttctggagcactggagaagcaaatgatatcatcgaagcatcaagccatgagccgctggatcagtttactgtttccccgatgctctcgcaggagcagctctttagtatagtagattttgctccaaactggacatatgtgggttcaaagactaagattttagttgctggtaacatcctgaatgacagtcaaatcaccgagagatgcaagtggtcatgtatgtttggagaagttgaagttccagcaaagattttagcagatggtactctcatctgttattcgccccagcataaactcggtcgagttcctttttacattacctgctccaacaggttggcctgcagtgaagtgcgggagtttgaatttcgaccaactgtttcccaatacatggatgctcctagtccacatggtgaaacaaacaaagtttatttccagatacgccttgacaagttgttgtcccttgaaccagatgagtaccaggcaactgtatctaaccccagcctggagatgattgacttaagtaagaagataagttcactgatggcgagtaatgatgagtggtccaacttgctaaagttggctgttgataatgagccttctactgctgatcaccatgatcagtttgttgaaaaattgattaaggaaaaattgcatgtctggcttctaaataaagttggtatgggtggcaagggacccagtgtgttagatgatgaagggcagggcgtgcttcacttagcagctgcccttggatatgattgggctataaggccgacacttgctgctggcgtgaatattaatttcagagatgttcatgggtggactgcactccattgggctgcgatttgtggccgagagcggactgtagttgcgcttattgctctaggagcagctcctggagctttgacagacccgactcctgatttccctggaagtacaccagcagatatcgcatcagctaatggccaaaagggaatatctggtttcttggcagagtcttctctgaccagtcatcttcaggccctcaatctgaaggaagctaatatggctcaaatatctggtctacctggtattggagatgttactgagagagattcactgcatcctccaagcggagattcattaggtcctgttcgaaatgctgctcaagctgctgcgcggatatatcaagttttcagggtgcaatccttccagagaaagcaagcggctcaatctgaggatgataaaggtggaatgtctgatgagcgtgccctctcactcctttctgtcaagccacccaagtcagggcagcttgatcctctgcattctgctgcaactcgcatacagaataagttcagaggatggaaggggagaaaggagtttcttcttattaggcagcgaattgtgaagatccaggctcatgtgcgaggtcaacaagtgaggaagcattatcggaaaatagtttggtctgttggcatcgtggagaaagttatattgcgttggaggcgtagaggggctggcttacgtgggtttcggtctacagaaggttcagtggagagcagcaatggcggaacgagtagcagttcaatccaagataagccttctggggatgattatgattttctgcaagaaggacgaaaacagactgaagaacggctccagaaagctcttgcgagagtgaagtccatggctcaatacccagaagcaagagatcagtaccataggattttgactgttgtgtcaaaaatgcaggagtctcaggctatggaagaaaagatgctggaggagtcagcagggatggacttcatgagtgaattcaaggaattgtgggatgacgacacacctatacctggttatatttagttttcaaacctactttgttggatttctctgtagattgcctcctttgtcttgagtgctactgaattgatggcgcacatagctgataacccgaagtagcgttgctggagcagtggagcatgacctgacatgcttgaatttggacttagatgtagtatttcatttgccttatgtacagtagaatgttctctacatttgaggaagccttgtatttactgtgtgaaatcggtgtaaagagtttgacattagagatcttaccagatgacttaacggttgcatgtgtggcgtgcagtccagaagttaggaatttgacccgtcgtggctttctgaaccgatcaaaggctgtggccgtgctcatcatctactaccaccatcgcctcggccagaaccacgccgctcgcctagctagctggggtttgaa

SEQ ID NO: 39043 - DNA, 5286 bp, Zea Mays
cctccgaaaggccttaaccccaaacgaaaccaccctccgcgacaaagccgactactataggctgtcgtagccaacaagcgcgacatcctccgcccccacctcgccgccggcgatggagccgccttcgcctccggcgacccactccgcggccgtccgtgtcctctcccgcactcctccgccgacctccccgaacccctcctccacgggcccggcggccccgtcgcccgcctcccgcgacggggtcgtcgccgtcggcttcgtgggcgccgcggggaccgcccgcctcgcggaccggatcctcgacgcccacgtcttctctcccggtggctcggcggggagcctcgcgggaagggtaaggtaccaccgcgacgccggcaagaggatggtgttccttcacctcacgccgccgccgcccgcgccgctcgaggcggtggcaggatgctgcgatgacggcgaactaccggagatgctcttcatgttctctgtctgccacgtaattatatttctgcaacaaggcttcagatttaacacacaaaccttaaagaagttccgactgctgcaatcttcaaagcatgctctcgctccatttgtcaagccattggtggcagctgcaatgcctgccagaactgttgcctctgacaccccaacaagagcaacccacagggcttcttccgtctcccctccaacacgccgaggaggtcacgctgggcgtcagtcctcggctatctcacttatgtctggaaccagttcaactccttctgtcttgccaggccaatgcattcctgtattgctctttgtctttgaggatgatgcggttgatgtttcaagtgctgcagcaagtcccgatgatataggtgatgcatcttcatcaaatcagggttctacccctgatggactaccaaaacagagcttagcttcaaaaagttctggttcagtaattatgctttcccgggcagcaaacaaatctgagggcagttcaggcaaaaaactgcattcgtcactggagggacagatccgtgtcttgatcaagaagtgcagggtgcttgcaggcatggagcctggacatattggcccaaggggcgtaagtaacatgagtcatcatttacccctgttctcactcgatacctcgagggtagttgcactgttggaacggtatattaataagaaacaggaaccactggacaccattgcaggactatttgaagattctttgtgctccaaatcgccattggatattctttcgctcgaaaacaactaccatccaacaaaccatgatgactttcagttgatcaaggattttatatttcggcagtctgatgcgctgagagggaaagggggatattcaagcaatgcaagtgccgggtctgttgcaggtgttggcatggtggctgctgctgctgcagcagctgcagcatcagctgcatctgggaaaccagttaatgcacctgacctccctacttttgataaatggttgtccataagtacctctattctaactgcactgttgagtggaagaaatgtgctgagatgtcagtctgaaagcaagactcatacaagtcctactgagaagaatggccaacttcctgtaggatctaatgctattgagatcgcattatcgtgcttggaaagtaacaatgggctgaacatgaaattttcttcatcatggtgtcaaagggtgcttccagctgctaaggagatatacctgaaaggtttgcctgccttttaccccacaagaatgcatgaagtgcagctacagaaggcattgcggtcctttggctcaatggttaaaggaccagcagtcagggtattctcaaagaagctagaagatgagtgccgggcaatatgggaatctggaaggcagcaatgtgacgctgttagcctaactggcagaccatgtaagcaccgcaggcatggcgatttcttttcatcagatgcaatggagcaacattctagtggatatgtcttcctccatgcatgttcctgtggccggtcacgccgccttagagatgatccttttgactttcagacagccaacgtgtcttttaattgtttccaaaattgcgatgacctattacctacccttgcgcttccaagaggcagcaatgatggttcattttcagtatcctcttggtgcttggtgcgtcttggaggagcaaggtactacaagccaacaaaaggactccttcaaagtggatttagctccaaggagaggtatcttctaaggtggattgtatctgttcataaggggcaagtgagaaatgacattcgttctaatactattacttcatccgcaagatctggtatgaacccgcagactcccccaatagtcactggtgaagtaaaatctgccataacccaagtcacagcacaaattaaatatgcaaagcttgaaaattctggaaaacaagctgaagttgaaccagtgagcaacttaggcattaattttggtaaaggtctgccaaattttactatgaaaaagcccttttctgaagttgttgctggcaccacatcaaaagataccgagtttcctgctcttcagcagacaaggccaccaaaacctggtggtcgaaaagatgagcagcgtcaaatgaatatagtagaccagactaatggccgaggtcatgtggctgtcagccaagggtctgtagctgaaactgaatcggcaaaagcaagcagaaacaagagtagtgaaaatgctgatgggaagccctttttacagatagggagcaatatagtaccagtgattgctggaaatgagactagagaaactagtcagccagtacaacagtttgttgtgtatattggatttgagcatgagtgtccctatggtcatcgcttcttactgtcagagaaacatatgaaggagatcgagtcttcctgtttgcagtatcaaagacctcatctaaacaaagaagcagaagtcaagcatgcacaaaagttgctccaaaatgcatctggtttaatagcatctgcagtggacataaacagtgcacggaaaaacagtaagccattggaatcatcagggagaaacagccagcagcaatcactgcagctgaggattgatgcagagacctcacagccttctcctcggctttcagatccacagaatgccaaaaggtgggagcattattttcgaagcgttacaattgatgatggtggagaagcattttcactgatgaacagaaacttgccaatatatatgcgctgtccacattgcaaggtctcagaaaggaaggaacatcaagatgtaaagtttgctggtgttgtgtctcaacttcagcggattttcattgtgacacctgatttccctgttctgttggcaagctgcccacttgtacagtttgaggggtcatgtttgccatcaaatgtctctgatcatgatcgagaaggatcattcagtattgggtgccgagttatcctcccacctgagagctttcttactatgaggcttccctttgtctatggtgttgagacaaaggagggaagtaaatttcccctcaaatactttgagcgacaaccagaactcacagcatggcttgttgcaggcacagccctgcaaatcgtgtcggtaggggatgtcactgagaaagaaaccgttatgaagtgatagacatgtcatataaagctttactggctttagcatgttctagtcatatatcagtgatttgctatcggcattgaataggtctgttgatggttatattctgtctgaagttttcacttctactcctgaacttgtgctgctaagctgttgacacaactattgcttgctttcactgtgctggaagcattgtgaaatagaagttccgctgatatctgcctgacctggatggtgtatatagatgcaagcagagggggcaggcccacaggcaatcacgccgttcttgtctttgtacatgaaaggtgccaggaggttaagtttagctggttatgtaaaggtccgctttttgaggacctgtccagtggatcaatcccattcctagactggtttgccttgaggcttggagattttgtagtaagactattagttcaattgagctgtttgtccagttgatgagttgttttattcctaggcttgttgagaaatctggccttggaatatagaacccagaagaaaggatttttctgaatgatgttgtagcaaacggttgcttgagatgcatgatctcctcaaataaacttgactgatctgcctgtatcccttattctttcttgtatataatgtatgcagtacaggtatttccccgcagtctttggagaagaagatggatttgtgaagtgatagcacaaaaaaaaaagtcatcaggcgcttctggtggtagactggagactgggctggagaaatgttggagctggaaggaaacgcacggatggctcctgcttgacaagtgtaaaggcaggcggcaagcagggacgtcgagtcgagcgctaccatttgtccacgtccgatgggtgaagtgaagcatgactgactgactgcatgggtttgagtgagttgcttggacaagtggctgtgtgtggtgctgctactgctacctaaccttttgcttggccgatagataagaataccggactgatggatggaagtggatgtgaacaaacagctggttggctcagggcaggctccacaccaccaacggccggagcagatggacatggacgtctcacttaggttagctagcttcttttcctttgtgaccgtgatctgctactgcaggaaaccatgcatgattcacaagcagctagcagcctccagtcatattcctctttattttatttttttatataaaaaaaagaaagaggaaagcaggatgggagctgcacgtgatgttccgtgcttgcacgagcaggatggtgtggagcatgtgacgtgtaggctggagcttggcttggcttagaggttactagctagctcactctgaatgatctccattcttcaggaggagaaggcagatgcggcagaagcaccagcacactgaatgcaatcattcaatactcatctacagctagccaagatgtgagaagagagcaaggaagaattgtcaagcctcccacgtttccccaatcttctctcttcttttcatttccccacttttaatatgtttattttcctcttatttgcaacagctcctttaattatatagcaacattttttttaagatatagtagtatatatattaattttatcatatctctagtccgaataccacgcaaaagtagctagtaagtaggatgtaccaactagctacagcagtgtataataaagaaaaaagtcgttgggcggtc

SEQ ID NO: 39044 - DNA, 614 bp, Zea Mays
gtcggcaaaaaaattctcggccgtccgattgttcaccaatggcggcaatctctcccctgcgtcgtgtgtggatggttctaggaagtgtcaccagctgatgcgtctccaatctcgcctcactcctcctcccagaatctcaccttcccccgcgtgcaccgactgcttttctcccgcgtgcgctggctgcttttggccaccgatacgctgcgtcggcgctccaaagttccaggtcaggagaggctagagttccaaatcgtagttcgtgtgaaccagtgtgaaccagttgaatctcatcaatcttatcaagtcatctaataaaaaaaggttcgacgcgtcttagagttctacgatgcatccaagaattcagagaacgttgacaaatatatagatcagctgaccaacaatgaattgtcatcaccacccaaaaagatgaagcacacccaggttaacaaagccattccagattctacatgttccaagaatgacaacagttagaccatcctgaaatacatcaaggttgggcggcttccgaagtcattcagacctgcgtccgagcctacatcatcatttggtttgaatcgcggaacgatgtcgttcgtcactgcgttgttcta

SEQ ID NO: 39045 - DNA, 2012 bp, Zea Mays
agaatatttcttttagagtagaaatttagagtagaatgagtgcggatagcctaaaactttagcgtacgatagagtgcggatagccgtggcaggccacgcaggacatgcgctgcggcgccgtgccacagaggatccatgtcagcacgtggcggcgcacgggcccccgacggaaaaatttggaccttgccgcgcgccacacgcggggcccacatgccagcactccgatttcaaacccaaacccaagccagcgtttctatcccgggatcctcgttttgtttcccttcccccacccttcctcttcctccctatctatcagcactgctcgccggcgccgcctctgcaaaaggctcacttttgcctccggaacccagcggaatccgccggcggaccggaaacactcgctcgcccccctcaccccctgtctgcccggccgtcggagcgcgtcgcctccgggcgtgcagcagcagatccgtggagccaaagctactgattgccttgtcctgaccagcgaaagagggatctttgggaggcaatcagaggtgttcggtttggtcaaacaaagctcagctctcttgggatgcttgctgcgagctgcttgtgttcatacttgagagaataaaacagtgcatcatcttgctgtcttgtccttcgtgattggaagagaaaacgtgctgctgttcttgctatgtctgtctcggagaaggtggcgccatcgaagtcatcagtttcttcgtcgtcagatttggatccgctgctgaaggatctcacggagaagaagttgacctttaggaggaacgtggtgtcattggcagctgagctcaaggatgcgaggaacaagcttgcctcccaggagcagctgtttgtaaaggaatctcaaactagaaaggttgttgagacaaaggcaaggagcatggaagaggaagtaagcaagctgcagaaatgcttgcaggacaaggatgagcaactgcgttcatccgcaagtagcacggaacagtacctccatgagttggatgatcttagaacacaactgtcaattactcaagctacagcagaagcgagtgctgcatcagccaagtcagctcaggtgcagtgcttgtcattgctgaaagagctgaatgagaaggacatctcgctcaaagagcatgagcttcgagtgaacaagctaggtgagcagctcgatcttctccagaaggatctacaagcaagggagctctcacaaatgcaacttaaggatgaagttctaagaattgagaccgacatcatggatgcaattgccaaagctgggtctaggtctgacaaagacaatgagcttttaaagatcttatctgacgtttcaccaaggaatgtccagaacctcaacagccttttgaatgctaagaatacagaaattgcgaggttgagagaggaaatcagaatattatctgctcactggacgaacaaaaccaaggaacttgaatcacagttagaaaagcagcgaagaactgatcaggagctgaagaagagggtcctgaagcttgaattttgccttcaagaatctcagtcccagatgcgaaaattaaagaggatgggggagaaaagagacaaggctctcaaggagctcatggaccaggtggccatgaagcagcccaacagcatgtgccatggaaacaaggataatttctgggagagccagggcttcaggttcattgcctctatgtcgatgctggcgctagtgatcctcgcaaagcgttgaagcggcatagtttaagcagatgtgaatgtagcgtttacattagcttgtaggcttgggcagttgtgcatactgcatgccaaaatttgccgacatccaatcctagtctgtaaactgtaaaaatagttgtggcctgtaatccgtagcgcagtttctgctagttcatgtaaacccatataagctgtcttgtagtcacagctagtgaatgtcagctcatgtagtcaagaatctacaaccttataatttcagttccagaactgcttgagcagttgtcacatgtaac

SEQ ID NO: 39046 - DNA, 2910 bp, Zea Mays
cccgcaaacacggagctacagcccgagagccaggctgctcggccatggcggcaaacacactctaaactaccctgccccggtgcccccgctccacgacgccgcggcaccgcacccgcacgtagtccggacggcgagcacttgagctgagtcggccgcgcttcggctttctcgcccgagttactcggtgccgcgtcttccctctttcggcggcgtgatctgcgtctcggcgctaagatagctgtcgtctcccggctcccgcacttgcacaagaccttgagctgatcggccggccttctgcgcgacggtgtatctccgcttctctttttgataatttcccgcaagtcccctcacttcggatttgactgaaggagttggttttcctcctctcgcgctgaagtaggttcagtcaaaagtcagaccggcctgtgagcggaattttcctggcttggatccgaaagcctgtgcattggctacgacaactggtggaaagcggttggtcatcaaatcgccgctgctaaagtttctgctccctgaactcagttggatcatagagttttggttcagtgtaccatcctgaattctgccgtgaattgttggatgtgttgtttgatcccaattgcattaaaaaaaaacttctattttgggctgggggctacaactacaagagagcaacaacaagaaggctcgatcagctcgttctttttgttgaccatctctgtctggcgagtgcttgaggaagaaaacgacttgctcagctcgccttttcgttgttgatccgatcaaagactagggaaatgggggtaatgtcacgacgggttctgccggcctgcagcagcctttgctacttctgcccctctgcgggcgcgctcccggcagcctgtcaagcggtagaagaagatcatagcagatatctaccagcttccaccggatggagagccaaacgatagaagggttgggaaactctgtgattatgtctcgagaaatccaacaagcataccaaaggtcagagttcattcataagtagctcataattaattcacaaaagctgagaagacggggggtcacacatcatacttcttttgccattgcaatggaaaacaactacgcatgcccaccacccagcaagggaaacctgatcacagtcttgagcatcgatggtggtggggtcaagggcgtcatccctgctaccttccttgcattccttgagtctaaactccaggagcttgatgggagcagcgcgcgcatagctaactactttgatgtcatcgctggcacaagcacaggtggtcttattgctgcaatgctggcagctccgtcgctgagcaatgccaagcaaccatgctatgaggccaaggacatcgtgccattctacctcgagcacagtcctcgcatcttcccatgcaggtttgtatggctagctgtttaacgaatatctgtacgatttcccatctgagactgctcagttttatctatctctaaattgtttatgtacaaggtaaccagaatttcgcgttttgtctcagtatgtatgtattactatatctataaaactacatggaaaaaaaaatacttcaccttgttattcgttctgatgctgcaagaccagaactgggattttgggctggttcttcaagatcctacaaacagttaaggtgatgatcgggccaaaatatgacgggaagtacctgcacaaagtgaccagtgatctgctgggtggtaccagagtggaagagacgctgacaaatgtcgtcattcctactttcgatgtcaagtgcgtaaagccaacaatattcagcacattcaaggcaagatctagtgccttgatgaatgctcgtcttgctgatgtgtgcattggcacgtccgcagcaccgacggtcctccctgcgcactactttgaaaccgtggatcaccgcactggcgcatcgcgtagcttcaacgttatcgacgggggcctcgccgcaaacaatccgaacagatgaggcagaagagcaaggagttccccgagaccaagcccctggactaccacaggtatctggtagtgtcactaggcacaggccttccagagcaggacatcaagttcgacgcgtgccgtgtcgccaagtggggcatcttcggatggctcggccgccgggagaacaccgtgcccttgctgcagatgttcatgcacgcgagctcagacatgacggacagctacgtcgccgaccttttcaaagcgatcgggtgctcggaccaactgctgctgcgtgttcaggaccgcaacatacccatagcggctgtggcagctgacctctcgacggagaagaatctgcgagggctggttaagattgcagagaaccttctgcataagccactaggcgaggacgattataagaccgacgaccgcgtcgagacgacgccgagagatggccgtgccatactaacctatgctggtatgctcgcacggtttgcaaagctcctttctgatgagaggaagcttaggcttcagaacatgggacactgtatgccggtcatagcaaatcgtgaagcttgagaggtcttccgaaacacatattgatacatccatcttataggagttagagagttcgttcgtgtaggctatctgcaagctgttgtgtgtgtattgcaagttgtgacgacgacgtgagtgtgtacgtaaatggataaggcgatatggtttgctttggagccctgtacgtaaatggagaaaatgtgatgccctggcgtctggttgtctagcattctaccagctggctctccgatcctagtcacatccatccagctcctccttttcagaacgccctgtacttctcaatgatgcagcactcctagtactaaacctttaatatatcataaacacttgtttttccccctttcaatatatatatgtatgcagctaaaactatgattgtg

SEQ ID NO: 39047 - DNA, 7123 bp, Zea Mays
gaggggagcagccggcgggggagcagcaggaggggatgagcgccggcgggggagcaatttctatgaccgtgtgggagggagaccgagcggctgcacagcgcgcgctaatactcccgcgcgcgcgcgctaaaaattgtcgcgcgcccgcctgcgcgcccgcttaggcgcctgcgcgccgcccactcgccgcctaggcgcggctgagcgccgcctagtcgccgcggtcgcctagacgccgcacaggaccctaggctacgcggcagcctatcgactagcgcctaggcgcgcctaatcgccgcctagtcggcgcctagccgaacactggtagcagctcctttttgcacaacagctcacataattgccaactacaacatgtcagcatcattaggagtaagagaatatataatccttgaacattagaccacacagatacctgatcgtccccgcggccgaaatgcaacatgttgtcttggagcatcttcagaagggggatcacgacaccatccttccatgttgccacggctgttgcggccagtgcaccgatcaaatccctcgcaaatacagtgtctcccttccataacacagagaacaacgaacggcctcaggaactagagcacccaatccacccccatcggcaaccatccctgctgcctgttgcctgccgcgtcagttccgtgcacactatcagaccccgacgcgagcgcctggacaaaggggtggtcgtgggccgggaagcgagagcctgagtgaagggcacaggtcgcgagcacggagactatcttgacgagacaggaagcgagtcgtggggcggggaggccacgaggggcgcgatatggagcggtagggcgacatctgacgggaggaggtcggggcaggaggcgatgagacgggcgagggaggccgcagcgtgcgcggcaactgcaggatgaggcgaagcgaggagggctgaggcggcgtcgtgggcggccgcgagggaggaggtcgaagacgcccccaaacacacggtgcagcagtgtggggtccgggacctaggtggtcaacgaggcgggagagcgccgtcgtggtggaggcggtggaggaaagcatggctataggcgcgacatctgacggggtcgggagtgtgtttagccggagaggatggagctagaaccttctcgttgcgtcgtgaaacggagagcggcgcgtcaccgtcgagaagcgatcagacggctgaaaattttataagcgacgtggacacattctcatgcccgttttcgatccggctttaatatataggaaataccagttgaagctattgaatcaagtggtagccaagtgcttgaacaactactcagagtcatgcttccaagatttctgaagcatgttggtttaattttatttgacgtgctatagatactttttcattaacatttttttagttcagcctttagattttttccaagcttcagcactttctttgagattacgactctagaagaatttgtgttagagcaagtaaagagtgagttggtctataagataatatactgatataggaaattgagatgaaattatatttctagaattacctctcgctttattgtaaattggacagtccattgttttaaaaagagttgaggttggtttacttcactatataatatcgttttgatgatccactagctgtgcttacccattttttaacttatattctcttgtcttttccatccgaagttaaactttaaaagcaaaccaaatgtttgggcctatttctctattaaggcaagtatatgtccatccaaactggttttttcttttgtgttatacatcaccacagctgaaagtatcactcttgactatttatttttgtttctttgtttcaataaaatttcttgctaaaatacatatccttgtatgatacaaactaactgaaatattgtttttattttttgaattttcagtctgggggagcaattcgctatacatctttgttgttttatcccggtaggtcaactttttcctattaaaaagttttgatacgtctttgttgtaaattcttcagtcggatggagacagtcatgtaatgtatgcaaagaatgtcagtaagtctatattcccctatgcacatttcgtaggtatgaaagctagctttagcggacaagtacgtgccacttgctgactaattaatcagtggtgagtaaggtcatcaatggataagttatcgtttatatattggataatttgtcaagattgctctaaaatgctgcaagtttgtgttgcggcggcgtacaattttgcttgtgcgcatgtgtagataaccatatggttcatagaaaagatgcttatggtttctgaagtgcttgcagaagcagaaaagggcgacgaaacttaatctctatatctcaggcctcatcatattgaactgtgtttttacatcgttatgttttgtgatatgtcaagcacattgtttgtacaggttgcctattgttacatgctcttggaattattacaagtctatagatctcatggggtcatctttagtggaaacatgtcatatattacttaggtagaagctagaagacttttgagcattataatttgtgttatagtttgattatgtcctatgaagtcccttgtacgatggcatgtaagagtggccactttttgttctaatgttgttttatatgaactcacagctatcaattctatattcaagtccaatccctttctacaaaatatgacgagagatgcaagaatgttggagatggggcatctaatctaacaaacaatggatgaggctactttccgtgatacccaggtatatttgtgattctattagaatgctagcaacttcatcctcgagtttggctgtgagcatttcttttttatgtttgcatgaaaatatgttagaaatttattatgccatagttaagccacaaaaaattgtatgaagaagttgttttaaaatgccattttccaaataaatacatataccatatacatcgtgagcacatctcacacctacatttatgtcagcaccccccccctgctagtttatctgcattgtattctgttctagaaagattaacagaaaaaggaaattatctacaggcctacagtctacctttgaactcaggattttactacttagccctccaaaatccagttgatcccatggtggtttatgcagaactcttttgtgtttatttcattttatggctttttgttttttttcttttagtaatttcagggcaattatatttttccaggttcacgtccatagatgtctacatattcagagaactgcaacagtgcacactcctttcaaagactgggtgcagcaaagattgttcttactgccctcagtaacattggatcgaaagctcaaaaatgatggacaaggatgttggagcagcaaaaaaaggtactgttattgtctgggaggtaacaagttggcttcaattattttttaaactgtcataaagtacatctaatcttattgttgattgcgggcttaaaactttataactcatgaaattctttgttgtattattattgctcgacataacgagaatatgattgccatccaaactaaacttgtatcagaatttgtgctttctgtttttgtataagactgccaaacattttgatttaaatatagtgctttctggttttgtataaaactgccaaatattttgatttaaagatagtgctttctggttttgtataaaactgccaaacattttgatttaaagatagatcgacttcacccaagaatgcgccctaaaaactcttcaaaatgctcgtctcagaaaaataaagaaacttaagttaattgatttaataaatggtgctccccccgttcctttttatttgttgccatttagttaaaaaatgaactagcgggctacaaatattcgagaacggaggtagtataacattttgattttaatcttagtatcttagttgttttgaagatacttcttccagtagatttgaattcgtggaccttgaatttgtttcatatgcaaacccacatgcagacccagttgttctcccaaatatctacaacacattgactgtcataactttcgtttgcaattctttttatctctacattagcctaaataaatgacaacatgctatttatttttggggtcagcgatgaaatatgcctttaggaaacacattcatgttccttagatcttgaacttagcaaaaagtggtgatgtaggactaaattgtgacctacctacaaacttttagtactgtcttttgacttctgcttatttgatgctttatacagtgtcccacccctttgctcaaccatagttgatggtgaaaaggctctaattacctttggcagttacaacgggaactacaacaacgaggtgttcagttcaagtaaatgatatttattcatattattttttctaaaatgattcatacggtgttactttagatattagatccatttttctgggattgtcttcatatatgttggcggcttgagtgcttgagtttctttcagtatctattcctgatgttaaaatcatgcttagctatccggcagaatgagcattctgctattgttgttgttttttttaaatgattcatatgttgaacataatatattagattcatttttctgtgattgccttcgtatatgttggtgacttgagtgcctgagtttctttcagttatctgtttatgatgttaaagacatatttaactatctgacagaaggagcactttgttgcagatctttgttttgaaacacaaggcaagacatttagttcaacctcgtcttcttcagtcacccgttgtagctgtcgtcgccgcttctgtgacaattggctatgttgtaattactaccacagatgagaaacccagagatattattgtgacagataattttgatatcaagagaactcaacctgcaagtaattccaaaatgatcgttgctgaaactgatgtacttactggagagaatggtaaactagcgaccagactggcagaagttcgtgatgaaaattaaattatatattagacatgacaaacttgccatatggtgaattggcaaagaagcttaaattagttcaagatcaactagcaccagagggttcaagatgatagaagcctgatgtgctaaacttaaacatgcagttgattctgtgaccctgaacgcttattttctggtttctttcgcttctgattacttgccttttgtcctgaacctgtcaacttagtcccaaattgctgctgcacggaagagaatgaaatctttgtggttttctttgtctaattttgtggctgcattacaatatgtcatatatagtacaacatatggttggttacttggtttaatttagtcccgtgcatgaggtgctagcgcccaatagggcgcttcctttttctagttccataaatactactgccactgcaacaatatgttgcatacgtacttttttttaagttccaggcatcattaatcaattaataacttagttaatgaaatggagattcatatatttttcttttgtttctctgtataacggatttgcacggagctgcgtttattcgtttcacatcttctaagggttcaaatgagttttgaaatcgcacgcagggcccgcggcatacactagtgtaattagggcctgttcgttttgttttaaaatccacgtggattgaggggagtactagtctaaatccatctcaatccacccccaatacccctcaattcacatggttttgggatgaaacacgatgccgctggatccagtggcggatctccgaccggggctgcctgggctgcagccccggtcgcggcccaaaaatcagtgaaatggcccatcagctccagccgcgcgaccacgtgaacagcccccggtcgcaggtctctcctcctccctctaccctcggcctccagccgccagccgcccatgccccgacgcccggagcaccgctgcaacccgcagcgtcgctcgcccggaggccggactgctagagcaccgccgcttgcctcgcccggagcaccgccacgaccacgccgctgtccagccgccgctccgtgctccctcctgctgctaattcgtggagctcaggtttgtacacacgtgctgagaagaaagtgtgcttagctattagcttgttcttgcgttggagtgatgagcctgacagccagtgatgtatggccttgccataatgccatcgagatgtgcggcgtgtgccaatgcccctccaagctttctgttggggattccttgttctgatgggagtttgggacgatgaaggaataggaggacaaaagagtttctgctaatttgtgacaaatcatgtaggaataggacgctctgtgcaaattgagaagcagaaacaacgaaggtgaagctgtgatttgtgaagtaggcaagcagtgaaggtaaaacatgtgctattatttgctttgagtttgattaagttttgatttgattatttatttggtagcaatcccatgtttataggaataaaatggataaattctcatcaagatccagaagaaagatgcttctaattctaaaacaattagggcgaataagagccgtgtagaacaaaagagaccatatatagtagccccctcttggatcaattctagatccgccactggctggatccgccctgcattttctcgcgcgctttggatccacccggcgacgccgctgatcgctcgctcccacctccgagacggaagagaccgcgggtcgcgggagcaggcagccgccttccacacgagtacacgacgaaccaaaagtacgatatcgcgagtgaaaacgtaatatactggaatacgtgttaacaaggccatgtgggttgtggcctgtgggcagtgagggccaatgcatataagccaagtgaaaatagaatcatcgaataacaacagaaaacacgaaccgtaccttgggttcctctcctctctggagattcgccattgctgtgcacacgagagtaacgcaccagccgacggcgtcgctcgtaaccccgcgcggcgtcgctcgtcaatgcaccagccgacggcgcagcgtcgctcgtaaccctaggcagaggcgcagagcgtggggtagcgggcggatgggagcttgcgggaggaacaacttcggctgcg

SEQ ID NO: 39048 - DNA, 934 bp, Zea Mays
gaaattctaataaatcgttgacaaatccaccttccgacctatcgattcgaaggcggatctagaatggcagatcactcgtgcaactcttctgccccatcgcaaatcaaaatcccaccgaatcaccccgtgacccctcctcccctcccacaatcccagccacaatccaccaagccccacccacagatcaagtcaagcatctcctaataacctagacatcagcaggcctctcccgtcgacccccttgcttctctccggttgccgtcaacatctttactaggcggaagaatccgatgtcaccatgcgccaaggtcagttgtgcgggtgaggcggcagttgctgtgccagctcaggttcgacttgattcgaccactccatcctaggccaacgtaaatctcgaacatgtacctagatcaacttctacaagatcagctctagaggaaatcaacctagtccaatacaaaagatcctaggcaagagtttctaggcgcagaagcggaaccaaaaattgaagtcgcagagagtttttcaagcaaaggtgtactgttgcttagaaggggaaagagaaattggttgaacatctttcaattgcaggtgcgccgctgcccaatctcgaccgaaatgctcaacggacatcacatcacgccgtggaagaagggtgtcttttctagacaccagccaccgaccaagcctcatggagtggcctcccattgctgctgaccactgcgctcaccaaggtcaagagggggaagccagtgagaggggctcatcgatagttagaccccgccattggtggaggatagggacagaacattcaaagttagtttagtgaagccaataaccacagagcgaggctgacagagtgagcaataaaattttcaggttttgttaacggtaaatgtttcaattgcttttctcagtaccaccagttagcaaa

SEQ ID NO: 39049 - DNA, 591 bp, Zea Mays
attcggatcgtcgttacttctcggacatgaagacttggtcactgacttacacgtagcaatctagtggactcaaggggtgataaaagatggctagtgtaggctaagtgactgaactaggatagaaagaactctagatacaggtaataacttaacctgataataaaactggatttttaaggatccactgatagtaagcttttctgcaaacagagtctttgattcttgataagctttaccttgaatcccacaagccagcatttccttgagaagtcttttcctttgtcgggtaagacttgcgaaagtacactccgtactcagggttttcgaacccatgttgttgtaggtgatgaaacagctgagttttgctatttctgctcgaaggtggtgccaaagcaggaggaaaatccataaacttgttggtgggaggatattgtgcctcccagttatgtaatattaagtgctgcactcgaacacccgttatgtaataaatactctctctatattttatatgagtgtaaattatgttattgtaatccttccgcttattctttactccgattatgtgtgtaatgtctgcgtgatggatgaagc

SEQ ID NO: 39050 - DNA, 1827 bp, Zea Mays
cacgagcgttggccgttgggctcttcgcatatccaccacccacccataaggcatcagcgccgctgccgacttcatcttttgcgttccccgtggcgggttggcaggccacttcatccgcctcgtcggcttcattcatcaccaggaatttccatcgccgcgcccggcgtctcctccactcgcctcccctactctatagcattccatttctgagctcgctaactgcgtttcttcggctcgccggtgagccacggattgggttcggcgggaggccgggaaacgggaatttatttcaccagtatgcaacagatggccatgccatcgttcgccgtaacctcacctccgtcgcatggcactaccttatgggcgcctcatgctcgtcgtcctcaaagactgcacaagagacacgtgcgcagccaagtccgggcagtggcacaagcacagctgcagtaccagaagctgggggactcagacctcctcatcagtgaggtcactcttggaacgatgacttttggcgagcaaaacacggagaaggaagcacatgacattatcgcttattctttcgatcaaggtgtcaatatcctagacacagcggaaattgtggatgcaatcaaaaccacgagacaagataattttggccaccaaagttgccggttattcagagcggtctacatttcttcgagacaatgcaaaagtggttcgtgttgatgctgccaatatcaaagaaagtattgaaaagagtcttaaacgcttgtctacagattacattgatttgcttcagatacactggccagataggtatgtggcactatttggtgagtttagttataatccgaccaaatggaggccaagcatcccttttgaagaacaattgaaggctttacaggagttagttgacgaaggaaaggttcgctatatcggtgtttcaaacgagacctcatacggagtaatggagtttgtacatgctgcaaaggctcaaggccttccaaagatcgtgagcatccagaacagttacagtctacttgtgagatgccgctttgaagttgatcttgttgaagtttgccacccgaataactgcaacgttggactgcttgcatactccccgttggctggtggggttctcactgggaagtatcttgacgctaacgctgacatctcaaagagcaggctaaatctcttccctggatacatggcacgctacaatgactctttggctaaagaagcgacattagagtacgttaagcttgccaagaagcacgggctaactccagtccagcttgcccttggcttcgtgcgtgatcgtccattcaccgctagctccatcattggagcgaccaccatggagcaggtgaaggagaacatcgacgcgtttaccagcactccacggcctctaccacaggaagttcttgacggcattgaggatcttttcaagagatacaaagatccagcaatcctctagtttttcattcaccttttttggcgaaaagtagcaatcctcggacaatacaaagcccagaaaacatattacaacctatgatcgtatggtcataccattttgttcatgctgatacaattattgctttgttcttgtattggctctacaggcaataccagcagagcagaattatgttttctttccttcactgtgtaagtagaatgcaggttttcactgtgtaagcgttcttttatactctgctagtaactgtatgatgtcttcgacattgacaggtctcaagtggacaggtttaaccactactctctgcatggtaacagtagtaaaagatcgttaaactacaagatgcatttttttaatgataaatccaatgatac

SEQ ID NO: 39051 - DNA, 2723 bp, Zea Mays
caaccgaacaaacaggccagcgctctgtaccggcgtttctcctcctgtctcctccccgctcgcgctgtcgcttcgccgcttcagatccaaacccgcgtattaaaaagcgctccaagcgaccaaaaccctaaccctaatcaccgcaattccccaatcatcggccccgcgcaaaaccctagcccagcgccacctacccgtccctctcgccgccgccgacatggcaggctcatccggcggcgcagcctcctcttcctcctcccgtggcgtgccggagaacaggttctataatcctccccacgtacgacgccaacagcagcagcaggggcaacggccgttgcggcccgcatcaccgtcgccctcgccgcggccggtgcggcagaagccccctccgccggcggcggccgttgccgcgtcggcggatgtggacatccgggtggattccgacgactcttcgtcgacgacctcgtccaagccatcggtggcgtccaccgcggctactgcagcagcgggtgaggtgaatgtggccgtggcggaggcggaggctgggaatttggagaggttcctcgcctccacgacgccctctgtgaccgctcagttcttgcccatggtattttccggcttgctctttgatgctccagtttggactgatgtgtttttgtaggatatcgcttcgtagaggtatctgccgtggtcgataggaaagggatccgatggagaggattgtagtctctgtgccatttctactgcatttgcagagccaaacagatgagtcgacagaaacactgcactgtagattagataaatgatgaatcgtgaagtaatcgtttagctctggttgacggttatttatcgaaagccccacaatcttcctttgatatcaaacgacgattgacataatggcatatgtaatgtgtgtatgcatatctgtcgttgtctctggattatgcatttgtgtgaagcgatctctggcaaataaataaactgcaatttggatgatgctgtttgtttctgtatccgtgtgtagtaataaagtttgtgctactacattcttcatccgttacaattttcgattctttggttgaaataccactcccgtttaaggaactgttttgtttttctgctgctgactagcttcaaatattttccactgcagtcaagcctaaggatgcggcgaggtggtgatgctatggattcacgaccttatttctgcctgggagatctttgggaatcattcagggaatggagtgcttatggggccggtgttccacttgtgctaaatggcagtgactctgtgattcagtattatgtgccatatctttctgctatccaactatttgcagatccatcaagacctgcttcaagaaacagttatttttctcgcttacttaaggcgtcctggggatgaaagtgatggggactctatggatactagcagtgagagcagcattgagaatgacgttgagcggctaagagtctcatcatcactggaaggtaaacatcgactggaaaatggtggcatacgaagtgatgatggtgaaggcgatgcatcttcaagttttccaatatttcagtatatggagagggatcctccatatggtagagagcctctgacagacaaggtatcaactcttgcacacagatttccagctctgaagacattcaaaagctgtgatcttctgccatcgagctggatgtctgttgcatgaggatgcctaccagttgcaatgcctaacaatggcttgcctactgtgctgaatttcagcataagatacaacctgtgtagaagagcaacgctgttaacctggtgttgctatgattctatacgttactggtttcatcctcatgcttccgattgcaggtaccccatttatagaattccaacagggccaacattgaaggatctcgatgcctgttttttgacattccattgcctagcaacaccttgcaaggattgtgaccctcctacgccagcatgccctggctttgggggaattaaccgcggcacgactgcagctgggaaactatctttgcctatctttgggctggcaccttacaaattacgtgcctccatttggacatctgacaaaactcaagaacgggacctcgtcacctctctgatgcaggaggctgacagctggctccgcagaatacaagtagaccatccggatttccggtttttcgtatcccatttcagtacaacgtggagatgacccgtggctgtaaatggttcatttagtatgaatatggcatagagacacctgagtgcccttttgtaacgggggggaatgtatgagttataagcctgcgtgcataactttttctcttgtctccagtaagctgtatcttttgtaggtttgttttgttgtggggtgaaagtaaagatggatggtggaaaaagcaaaattggaggcattgtggaactgaagtgaaatatggggaaaaaagaataaagatttccagttattagagttgagaaaggtccagtgtttcatgtttaggttacctgagctgcccgtgtgtttggtccatcactcatcggttctacaataaatagaggaaatacaccagaagtacagatactgatcttcgaagtgcagatgttggtcctcttcgttttaacagtgggtttcttcaggtagttttttttaaatagagcgtttaggccttattcaatctgactgttgcaatacaattaggcaaaatcttattcaatctgagagcaa

SEQ ID NO: 39052 - DNA, 2225 bp, Zea Mays
gcagttcttcatttttttgtacatacatcaaatgctccatttgatctcagaagaaagatccacttttggtgaaggtgaataagctgacatccacgaagacgcaacttccctactcatattactctcttcctttctgtaaaccaaacacgatagttgacagtgcagagaatcttggagaagttctgcgtggtgatcgcattgagaactctccttatgtgtttgagatgggggaacccaagatgtgccagattatctgcaaagcaaaaattgatgataaacaggcaaaggagctcaaggaaaaaatagaggatgagtatcgggtgaacatgattcttgacaatctcccactagttgttcctcttgcaaggcaggataggggtgctactgtttaccaggctggatatcatgttggtgtcaagggccaatacgctggtaacaatgataagaagtcctttatccacaatcacttggcatttttagtaaaataccacaaggatgaaactacagatctctctagaattgttggatttgaggtcaaaccattcagtatcaatcaccagtttgaagggccgtggaatgataaaaacactcgtttaatcacatgtgatcctcatgccagcaagcttctggtaaactcagatactcctcaggaggttgaagccgggaaggaaatcatatttacctatgatgagagtgatatcaagtgggcttctcgctgggacacctacttgttaatgatagatgatcaaattcactggttttctattgtgaactctctcatgatcgtactcttcttatctgggatggtggcaatgattatgctccgcaccctgtatagagatatctctaggtacaatcagcttgaaactgaagaagaaacccaagaggagacaggatggaagcttgttcatggagacgtattccgccctcctgcaaactctgacttactctgtgtctgtgttgggactggtgttcagttcttcggtatgctgctagtaaccatgatctttgctgttctgggtttcctttcaccatcaaaccggggaggactgatgactgccatgctgctcacttgggtcttgatggggttgtttgctggatatgcttcttcacgcctgtataagatgttgaaaggatcagaatggaagagcatcaccctgaggaccgccttcctgtttcctgggattgctttcggtattttcttcgtccttaatgctctaatatggggggagaagtcgtctggcgctgttcctttcaccacaatgtttgccttggtcctcctctggtttggtatctcggttcctcttgtatttgtcgggagctatctgggcttcaagcaacctgccattgaggctccggtgaagacgaacaagatcccgagacaggtccccgagcaagcttggtacatgaaccctgccttcaccattctgattggtggcatacttccgttcggagcagtcttcatcgagctcttcttcatcctgacgtcgatctggcttcatcagttctactacatctttggcttcctgttcctggtgttcattatcctcatcgtcacctgtgcggagatcacaatcgtgctgtgctatttccaactgtgcagtgaggactacctgtggtggtggaggtcctttctgacttcaggatcatcagcaatctacctcttcctgtatgccgggttctacttcttcactaagctgcagatcactaaggtggtgtcgggcatgctgtactttggctacatgcttcttgcctcgttcgctttctgtgtgctcaccggtacgatcggcttctacgcctgcttctgcttcacaagattgatttattcttctgtgaagatcgactaggcatgttccatgggcctgcagcgagtatgcccattgcgtttttttcatgaattttcagtgcagctgtacttttggtgttagcttataaaccatttatgctcactgtggttcagagttgtacaaggataggacactactgctagctttatatggggtaattttaacttgtgctgttgagaactgctgcatacgttcaatccatagtctcgttatcgtctgccacccctttcctgcttcagctgcatgatgatgtccatacgtgcttggctttcatcaagaaaatgttagcttcatctccacagaatatttcggggactccggcggcactcatcctcaccaggcgaataccgtacttgatcagtttatgcaaaatattcg

SEQ ID NO: 39053 - DNA, 4442 bp, Zea Mays
ccaggtctcatttgggcccaaaggcagaaccggactcgccacctcctgcgcctcccctcttcctgtccaggcctccagggtttaggctcgccgccgtcccgtcccgtcccgtcccgcctcgcccaccgcgcgccgcgatgcctccttccaagggcaagaagaagaacccatcgacgtcgccgcggccgtccccacgcacgccttcatcttgtccctccgctggctccggaactggcgatggcgagagaagcgtcgacctcccatccatcgccgccgccgccgcggagcagttcccggcgctcgtgccacgcggcggtagtggctactttgctggcatcgttgccgaagtggcccctagggatgggagccgcggcggccgcttggggaggctctggctctccgaggccgctatggtcggcgccgggatgcggcctgggtgctttgtctccgtctcactaatttcgtcaagcagtgatcagttagatggttttccattaattaatttatttgaggagtgcaacagattctttgatcttgatctggacaatgatctcctttatggtgaagctgggaaaaactttgtggttgctacagttctcccctcgcgtgaggttccaaagaatggtatcaagctctcttgggatcttgcttgtgttttgggacacccttttgtaggtcgatcattgtttatttgccccttatgtacacttcaggccccaaagcgtagtgatgatgttcatattttacgggtaatgaaatgcaagaatctttatcttagcctagttccacctaatgttggatcttccaaaggcattgaatcagagtctgactaccatcctgaaagaagcgcaatggttatggagacacctaagaggggtccttcaactccactgcgtaagaaggaatcgcatcactttgcttccaacaatggctcttcaatgtgcttggatccaaccactgcaagatcagcactagcagatgagaaaatcaatgagttgttgcatacttcagcattgtggtggctcaatggtagacacttgcttaaaggaaactttgttcctctctcaatatgcggaaaactgtctctatttgtggtcatgggagcagaaccagatagttcttctcaagatgttttgtatgagaatgggaatacactgtctaatgcagaggattcaactaaatcccaggaaaacccagttttattccttgttgacagaaccacaaaagttcatttatctgattctgtctgcacaaagcagcttgactcagataaaccgggtttaccatcagaacctcacgagtatgatgataaaagaaatgcagatttcaatcattctccaacacttggtgggttatctaaagagtcagcaaccataaaaggaataatttcattttcactagctgatcaaattggtctgccaagatacaaaggtattcttctttatggtccacctggaacagggaagacctctcttgcttcttcctgtgcctatgatgcaggggtcaacctttttacaatcaatggaccagagatcattagtcattattacggagaaagcgagcaatctttgtacgatgttttcacttcagccaagcaagcagcacctgctgtggagtgccatccccaggacagaggatggacatacttcgccaccttctaattggagttcatcactctctgaccaatgaagaagttgagtctgttgctctagcaacccatggatttgtgggtgctgatctagcagcagtgtgcaatgaggctgcattgagtgctctccggcgttacatcagcctaaaagaaaattcaattcaacaacttggtcatcctggctgtagtttttataagtgtaatagtcaagatactgaagattcaagctcattatcgtcatctttctcaaagttgaccatgtcatcatatgttgcttgcatgaacggtggtaacataaaaagtagcgagtcttatgatgatacagatgaaataccactatatgtaaccaataaggattttgacaaggctaaaacaaaagttagaccgagtgcgatgcgcgaggttattcttgagcttccgaaggtacgttgggaagatgttggtggtcagtgcagtgtcaaggagcaactgattgaagctatccaattaccacaaaaatgcccagaagcatttgaacgtttagggatccgaccccctagaggattgctaatgataggaccaccaggttgcagcaagactttgatggctcgtgctgcagcttctgaagcaaaattgaatttcctggctgttaagggtcctgaacttttcagcaagtgggtcggtgactcagaaaaggcagtgagatcgctatttgcaaaggcgcgggctaatgcaccagcaatattattttttgatgaaatagatgggcttgcagtaactcgtgggcaagaaaatgatggcacgtctgttgctgatagggtcctcagtcagttgcttgtggaaatggatggtttggaccagagagttggtgttactgttattgcagctacaaatcgccctgacaaaattgatcccgcacttctgaggccaggtcgtttcgatagggtgctggatgtgcaaccacctgatgaagctgaccgtgcagatattttccggatccatacacgcagcatgccatgcagtgccgacatgaatctaaatgaactcgctagactcacagaaggctacactggcgccgacataaagctcatctgcagggaagctgctgttgccgcacttgatgagaggtttgacattcaagaagtagcaatgagacatttcaattctgcgatcgacagaacaaaaccttcagatgtcaagttcttccaagaacttgcaaagcaattccgcagatcgttgacttcactgaggaagcaataattctgagaaagcgttgaggaatgggtcaagcatcaccctctcactccctacatttttgcttggtccagagaatggagttggttaatccatacaagtacacggctagcttagccatctggaatcagttcatccaaagaaataaaacatggggtgacctcattctggatattcatgtgatttctcaaagcaggcgccacatcagtgaacctggcgtgactgaatctgggctggtatctaagaagccttgtcctcgttgctctgcatcttcgaaatttctgcgttgttcctctgacttcaattactatgccactgtagatagtattgctttaaaagttgactagaattttctgttccagaaacctttttgctgctatttattgggggagcaattttctcttttctgactcttctcaacattacactcgagagaaacttgctagacatgtttatagatcgagacagtttcagtgggcctgttttaaccttgtcttatctcttctttggaaggatttgagcattgttgccaacattgttccctgtcatcttgctgtcggtatgtttccctgaaggaagtgatggagatggcacagtttatgctgagggcgatctgatctccttaacattttgcacaactgatgtaactgtaggcctgatttttgtctctgggttactgaacttggtggtagcagtaacatctgcatgttttcttggtgtctttggtccactggagctgtcaactgctgtatgagtagatgtcagatgcgatgttcttccagttttctgacttgagcctgtctctcgtcatactcaatgtggccctctgatttagtcccaagcaagggttgctcgtgcttcttagaggcttttacagtcagagtcctgatatctgaacttgcacactcattttctggtcgatcaggcacaggatccacaggtgaccgttcctcaacttcgcatggactgtcagcaggcgcagtggtatcctcttcaatgtgttcgtcagattcatcaatgtcctggatagctaatggcagcattctgcatcaattggcggagttccagccacaagttcagatgcttcagctgacgaatcttgcacgtggggattgctttcagaatgatcagaggaatgcttgatcccaaacttgcagctgtcatggcaagagctggtggatgctcgtaggaaatgcgggaccggcttctacttcctctttaacatcaggtgtcatgctgctgccatccataactactagagcagcatttatcaggtcttcacatttgttatgtgagggactaaaatttagttagaggaaccaaacatggtcttagtcttcaactcttcatggtttgagcatgggagaaggggggagtggactataaattgggcgtagaggttgtggatttgtgaacctagaatgaaatagattctgctgttattctcaagaaattgaggcatgaagtctaaaaagacgaatttaaaggaaaaataaataaatgttgcagcagtttaaacagccaactttaatccgaagctaacagcctgctttgaacgtta

SEQ ID NO: 39054 - DNA, 1580 bp, Zea Mays
ccgtcgtccgcgcacaccgacgacgtggagcaacggccagcgcacgtaagtgcccgctcttccagccccacatttgcatccgcttgccttctggcaccacgccaccacctaccatgccgacgttcccgcgcgccggccggtggtccacctccagcacatggccacggaaaaccgccggcgcggcgtccacggcgctggccgccgtcgtcttcgcggtcctggacgtcgccgacgtgatcctctgcttcgcgtacgccctcctcgacggcgtgctcgaggacagccccgtgcgctgctactgccacaggagctacgacgacggcatccgcgaggcggccgcgggggcatcagtggatggcggcggccacgaggaggtctccgacacgctgtacgcgtgcggccggaggagcaccgtcagggacgcgctgctggggctcgtgcgacgcgtcgtgccgaggactaggaggacacgggcgccgccagatgagacggtggcgccgtgcaagtggcgcagccccaggtggtctgactgcgcgtgtaagtcgtgcgtcgcgtggcggtgcggcgaagaaggcggcggccggctgcacgtcgtcgtcaaagagccgggcccgaaagatgcagcggcagcaggaacaacaacacgcgcccctgatcccgagaacgccatcttcgtgcacggtttcgcgtcgtcgtcgtccttctggtcggagacggtgttccgggagtcctcgtgcatcctcgacggttgcaggttgttcgcggtggatctcctcggcttcggccggagccccaagcctgccaactgcatgtacagggtgagagaccacgtggaggcgatcgagagaaccctcatcctcgccggcgacggtgaatcgcagagtctgatgagctccttccacctggtcagccactccatgggctgcaccatcgccctcgccttggctgccaagcacccgacgcgagtcaaatccatcacgctggttgcaccgagagcgagccaggtggcgctcaacaggctggccgagaagaagctgtggccaccgctgctgttcggttccgcggtgatgtcgtgggtgagggatctgacgaagcacactcaccactcggcgtggcacaccatgcacaacgtcatctgcggcggggcggcgctgcaggacgcgaacctggaggccgtcgcggcggccggcatcccggtgcaggtgctccacggcgccgacgaccaggtggttccggtcgagtgcggccgccatgtcaaggcgaagatcccgcgcgccaagctccgtgtcatggagaggcgcgaccactctacggtggttctcggcagggagagaggcttcgccgaggagctcaaggcgttctggtgcgcttcaaggtccccggttcacgtccaggatgcggagcaacaggaaacactagacatcagcagcccctcaaaagattcaaagatcatccaacatgacaacacctcagtgcccaccatcctcgctcggcgtctgcggattgatctttgcattagcagccttcaacaggagcttcgcgccatcatgcagcaagtcctggagttcccttttgcttaa

SEQ ID NO: 39055 - DNA, 883 bp, Zea Mays
aaaataaagggaaatacccataaatggacaacaccaacgccttcccccacctctgtgccgccggctccgacgccttccaccgcaccgacgccgctggctccaccgcctacccctcctcgacgccactggtcctgttcacgccttgagccctctactggacgtcaagagaagtgctgccctgcgagttcgaatccaggcagaggctctccatgacttcatctgtctctggctcttcaaaatcacctcgtaagcctccggtgtcgtaccggaaatggatggatgcagataatcctgtttgttgcaagtgctcaggtgttatgttggagctgacctcgtggaccgattccaacccaagcagaggattccttcgttgccaaaagaagggtgtaatcttttccaatgggtgagtccccccccctttcggactttgataaaaaactgatgttacaagtgcaggataagatttatgctttgagagaggccaacaacgatctgagagacagacttgatgaatcgaacgaacgtgtggttgtgcaggaagctgagatcgccagactgagaatgcagctagagaagatcactagtgatcgccagactgaaaatgatttcagctgtagtgtttgttgtaatcttgtgtttgctcacgcgcttgtttcaacatggggctgtggtcgacagtagcaaatcttatgaactgatgtagttgttttggtcagcaatggatagccaagcagtggtgaactgatgtaggtattttggtcagcagtggttatgaattgatgtagttcttttggtcagcaatggatagccaagcagtggtgaactggtgtgtggaatgagctccaccggggcaagggtatttatagagggattagggatgaaa

SEQ ID NO: 39056 - DNA, 1374 bp, Zea Mays
gctaagtcgagatagaaggggcgagcgcgctgcgctatccatcccaccatccattctctgccaagctttccgactcccagccaacacgaaatggcggcggcggccgcacccgtgtccctggtcttcttgtgcacgcgtgggcagcagcagctggtacttgtcgacgccaccaagccccctctgcccctgcgcagccgcgctttctccgtccgcgccgctcagcagcagcagcagcagcagcaccgcgcccgcccacggccccctcgcaggaacaagccccccggacccgcgcgccgtccgcccagggtccctctggaccaagatgaatacgacggcggctatgatgaccgggaggaggggaggttcgctgggggcacccgggccgccgccatgcccaagccaccggccggcttcgtgctggatgaccagggcaggtgcatcgccgcagcatccaagcgcatcgtcaccatcatcgacgacaccaacaaccgccccttggagtgcataatcaggagagtattccggagctcgcaggaccacgactgcatgcttctctgcccagttgacatgcctgtgcaggtcctcaagagcacaaatttcagtggctgggtagctgtatgacttggccctcatatacattccttcaactgattatttcatttattttcccatggttcctaatacctgtttatttatttaggtcgatgacgaccaactcaagcaaatcattccatctgttgcctatgcccttgccagagtacatatgcactttgtagaaagcggattctgttatacagcaaggggtggcttctgctttcctgaagaggccattcaagagtttcatgattccggtgaaggtgtgccttttgaaggataaggatggtgtgctacgcatcgctgaggatgatctgatggaagaccctgcagttctggatgcggtagatgaagagacagaatttacagctctagtggaggaggaggaggcccttcttgaaacggtacttggtgaaaggtgatggatgccagggagtacttgtacaggaagaggaagagagactcgtctgattgtagtagaatagaatggaatggaatggaatggagtgcatttgcaactgtaagcagctgcaacctgcaatacttggagtggagtgatggacaacgcagttgataagcaactgctgctgctaatctttgtctagtgtaggatagatagctcaatgggacgatcaaagctatttatgatgtgctcatgtgtttgaattaattaataaaattaccccaatctgaatagaatacctggtggatggaagaaatgaagcaaaatacccccactgcaaccgttttttcttttgaattttcaagcgtattgagtcc

SEQ ID NO: 39057 - DNA, 432 bp, Zea Mays
cccgggcctggtactgcaatctacggcccgcccgttccaagttggtagttgggttgtgaccgctttggcgaaggccatggcgtcccaacctctagagcggcgcgcaatgcgtgaggctggtttcacagagcagcgaataccatccgcttccaacggtggaaggataacgggccactgcactccaggcccacctaggctcaggcgctctttctggcagaccaccttttttgttttttggcttgtcttgcacagctactcgtttgccactgcagcccatttgtccaaccagcagcgtctagcaacaaccatcatcaatcgattatgtagccgatttgagcctctaggcactggtcctctggacgttcgatacattccacatgtaacatgttcttgccattttgtacatactagtgtgttctggttgagtttaca

SEQ ID NO: 39058 - DNA, 1004 bp, Zea Mays
ctacattttcaaaagcactctcaacaattgattcatcctcatcatcagctgctgcagtaaatatcatgaatacgcaacgccaccctgactttatgctaccaacttttgacttgatcaactacatgtacatccagcaaagtttttacatgtagcatcatttggtaagaaacaccagatcattacatttcatagattcatatatgtgtcaaagttcatgcacaaggacatacctgaacaatgcaatcaacaattaaacctcggatttttgagttgtgggtattcctcattaaaatgacaaaaggtttcagtatgtcactctgaaatgtgaaattgtttaattcagcacgctccaagtacttcataccaagctgtcttagtgaatcaatggcatacattgcaactttctcctcattgtggcttccagcagcaataaagtgctgggccaacacagaccatattctagcccacacctacatttccatgtataaatgtttagaccaacttatttatcacttcataattattgtctaggaaaaatggtgtaaaatggatggcacagagaacaagaaacagagcataccagccgaatgcgagccatgttataatagcttatctctacaagcttctgcaagctaaagacacgagcaggtgtttgttttagttcttcagcagaaacaccacatagggcggtgaagaattcaacaattgaatcacttggcagttttacactgtttacaaagatttgttcagcaggctttccagccaactctttcagcgattggactacagaatccctcgatatttgatttgatcccagcattacagttgcagaaattgaagggttcgaagtgatatactcgagtcttgagacacattctaaaacagcattccaagtatcttgtaaagcatccatatcagtgtcagctaaaccaagaagagtcctcagtgcctcaacatttttactgcgcatctccttgggagcgtgcaaaaatgtaaacctgcaa

SEQ ID NO: 39059 - DNA, 389 bp, Zea Mays
attcgatctaggtcgagtagggaggctgatcctactgttgacgttgttgggggccttcgttttcctaaggtcctcaataacatgaactaaccattggccatcagtatatttgtcaagcattgcaggagcttcagaatcagactacctttagtgtagaacgatggaagagtatcgaaggtagcttcgtcataacaacaatgggaaggtggtgcaaggagaaggtgtcaccacgaacaccaaaggcagaagacaatgctatccctgtactgtttgtaaatcttgtgtgcaattcttaatggcataagtgtaatttcatatgaagctatatgatttcgtataaatagatgaacagtgccccgcataaagtactttttggcggattgggcgat

SEQ ID NO: 39060 - DNA, 273 bp, Zea Mays
cgctttgtccctgacggcactaaaagggatccacttgtatgtccaattagatggtgtcaactgtttttctcaagagacaaatcttccagctagatggcgctaagaacgaggtagcgttggcatgggagatattacacctcctcgattctagctatgaataaaacagtgcgccggcatgcattttttgactctcggtgcgccgtgcatgcatttaatgccaagtgcatacatgcaaaagcaggaatgtcatgcgtccagtgtaccagtgtacgc

SEQ ID NO: 39061 - DNA, 5362 bp, Zea Mays
actctagggaggattaagaaacattcagacaatagacaatttacctattcttctgtaccggcggggttaacatttggtaacaccgtagcaggcatccgccgatcctcggctccgatcaatggcgtccaccaacgcaatcgatttccaactcacccaggcccgggcgctgctgtccgaattcgacaaccggctccgcgagattgattccaagtgggagacccgcgtcggcgtcctcgaaacgaaagttgcggactctgctcgaaatctggagacgatctccaaggagatccgcgacggggtggtggcgcagttggcggcggccgaggcgggtgtggatttccggatccgcctgcttgagacggggaccatcattcgcgtcgctgcgctcgagtcgactgcccacgccttcgagctgtggcgtcctcacgtcgacttgtcgatcgacagtctcttctcctccattgacgcggtttgtaccgaggtcgagaaattggggatccaccggttcccaggaccgcgtcccagcgatggcgcagcagcaccggggaccgcgacgcaaccggaaccctcttctcatcggccacgttcatcgcctccgcccgaggtccatgacggcgacgatgacgatgaagaaattgacgatgacgatgacgacgacgacgacgacgacgacgacgacgacgacgacgacgacgacgacgacgacgaggtttgggtttgtttccagcttcacgcgggtctcttggggttgtgtgcgttggcaggttctggatttcttgattcgcggcacccaatttcttggggattaatttctcccgttctgatagaaggcgatggctcatcgactgggtcggtcgtaggctggttttcgtttgaacacgtcctcgatttgattgaccattgggtcgggtttttgattttacggggaaacccagaaaagaaggaaggaaggggaaaccgcaatgccagttattgaatatcgcggagtggtgccatggcaatttcgagtgtccgttttttgtcccgttctggctgattcttgccctctgaagtttttcgtcgctttattcaatcatccgtttacatttttatgtgtcataatttgggcttccttcagggatttgatccatttgcaggatgacttagtttttgtagataggtaaatttagcaaattcgaggtgtgaatcatgtgaagcatttttttctttttccgtttagaattccgcgagaaaactcggtacatgttgagcacattatttggattctttttttacgtgtttttgttgtaaatggacatatcatgataccagaggtcatgccatgacttgcatgtcttctggaaagtttttttagactatggccaatcattcgagtaggataaaataggtgaattactgggattatttcgttgtgctctccctgcttccatttggaaataaaataaaataataaattacctgatgattgcaactcacaaggattatgagggcttcacagacgaagagctggacaaattcgaaagcgccttcggatggggttctacattcttgagtgatcctcaagttctttgtatggactcgagtgatccacaaaacccccctcgtattggccggcaaaattatgagccgctcaccgcacaggagtttttttcactgcgccacaattggcaacagctgctcgatggcaagaagacatacctccgcccaccaaagaacaaccgtgttgccaagcacagttatgctaactgcacctttgtaaccccagaacctcttgagaaggcactacaatgtcaggagccgctatctgattttggtcggaaatatgcagaaaattctatagttcagcaaaagtttaagattcttagtgaacattatgcgcacgtcagacaaatgcgaatggatggatcatctttttacagagctttccttttctcttacttggaaaaccttgggaaaatgcaagctagtcatgctgaggtcactcgcttaatggaatgtgtggcaaggtccagagagaaattttgtcgtttacattggaatgatgcgtacttctcaaatcctgaagcatttttctcaagtgttgtttctgagttcgagcaattggtcaattcagttgccaatgggctaaatgctgatgagctttacaagagaagcctacatgagattacatcatccaggattctttgtttgtttagattgctgacagaggttcatatccgtacacatcatgcggactacccagaattcagtcaggaaacagaagcccttatgttttgcttagcatcggtgcgtccctttgaagctggagctaacattctacaaatgagtgctctatcaagtgcacttggcatcccattgcacctggcatgtacggatgtaaccacgagtgatgatgaaattgtgacagtaaagtgctttgacttgtttcctcaatcagaatcaggagcaagcacaacatcaggagctacgagttcaatcagaagttactctctgtcaagcacaactgataaacacccagagcaaggaagggatgataacaactcaaccatgccggctggaaacttgttttcgtctgatcgcatgcctttagttatcttactgagtaggaagggtcaatatggcattctttatcgcaagtgaacaagttctgactatacggcagcctctggtggacagttctaaccggaactgtttgggttataacatggaaacctattgacaacctactctagtgtgggtgtttgattgtgcatctgcttccaaaatgtatctggttacatttttgcccccgacaaaaaatactccatttgctagatgtgctgatgcatgcagtttatgaaacaaatttggacttggcataaaatctgaggctgggagcagtgggacagatctgttactttttcggtttatttttcttatggatgtttgtaccattgctgaagcatggatggaagattcatatttggtaagaacatatgaaggactagttgttttctgatacagcaggacgtggtttggatcattcaagttcaaggaccaataacaccaaaatttcagaatgaaggcattttttgagagtccttgttactgcaggctctcctgaggacactaaaagttggatgcattctagaaggagcttcaaattattgataatgatgtggactttgtatttttattgtgaaaaatctttgaacacacttcttgtggagaactaggattagcattgacagcagactcaatcaaatgaaaatatagtatgcgagcggtcatttttctgggataaaaaactcatgtgaatggagtactcattcagtcttgcgtatttttgcagcttgcatggcacaaatagggctgttgagtaaaaaatttaaagccttttatgggagagattaaattggaaatacatatttgcttcaagtggaaggttgtggacatacagcgccacctacttgacatgatgaatggttcgtgacattcaaacacagacagacaagtctggttctacctccttaactttattggctggtcatcttcgcgtcacaagggcaggagagaacaataatttcgtcgagtggtgggtcaaaatcaacaaatgggtgccttcaaccttaaaaaagggtctaattccttgataatcctaggctcctggatgatttggaaacaaagaaattagattgttttcaattggaccacacgagtatcctgaggattcttgtccagattgaggaggctcatctgtggtgtcttgcaggagccaaagagctagcccgcgcaactgtagcaccgctacctcttaacttctgtggcaggcgaaagccttgcttgacaacgttgtaacccttctcggatctggcatttaacaagcacttgagcagcagcagaagcactgccgttctttacaaaactcctatccaagatgtattctggcaagagtgacatattaggcagctaaggatatgagggagcactggtgttcactaagtcgaggcattaagcgcaaggcgattttgcattgttctggtagagccaagtgatatgctgtaaaaatccttgcactttagtactccaaatgggccaaagtacttcaaagggagcttcacacatggttgggaatttaccatgaccaacctgaaatcgatttggataaccatgcttatcagtctgtatcttcattttgttctgaactcaactcagttcattcttgagatccaaatttagctgcccatagcatcagaactatcggaaagaagtggaggcatagtcctaaagttttttttaaaagagaaacaggagggtagcaagcccctagtgcataatcctataaagttggaaccagagacttataacatgctacatggtttgcggcacaatgaaggttgatatgtgataaattctactaggttatatttgaggcaaacaagatgcatagagctttgaggagtttctagtttcaagtgcaaaatgcggaagcccaagatgctgcaatacaatctcctccacagcgcaaaaagcaattggcttgttgagaaagggaagaacaaagtttacaaaggggcaatccaggtaccagaagaacttcttaagaaactaggagctttatcccctaagtcggaatcttcaagtacagatctctttgaacaatttgcacagatcacctaagcattgatagagcatggacaacaactgaaaaagaaaaaaaaggctagaaaaaccagaaaagcgccagtcgccaatcagatggtctcagcacctcttattgctctctcactaaggaaaatatgaaagccagatggtctgaacacatcttatcgctctctcacttaggaaaatatggaaatcatcaaagccgtgaggaaggaacgctgataattcaacatcatccaaggttctatcagtccagcaagctatctgaacctttctgatccaaggttttccagagttcagacttctgtttgtttattgacaatagcttagctttggtagtaaggacatgtcgcgtgccggcctctgttgttgtaagtggtgctcaatgctaaagcccttagcaagtttttcttgtggttcttttctagacgaagcttttttagccttgtttagtgtgtttctccttagcaagttgagttttagatggttggaggtgagctagatgtgtttgttgtggttatttttttcttttcttgagctagctgtggtggttaacctctacttgtaaggtttttgggcccgtttttcccttaaaagttgggccatgactctccttttctcttctaataaaattagctgcaaaacttttgctgtcatttcgaaaaaaacacacactggttcagcctgcagtctgaatatttttttggagcaagagcat

SEQ ID NO: 39062 - DNA, 281 bp, Zea Mays
ggaggacgatcgtgctatcatgaaggcatggtgtgacaaagcaatggataaggctatccgggctggccggattttgatgaagaggcctggcgttgtggtgcctgatgacattgtagttgatgtactcgttgcatcgggtactttgagtaatccttctgcttctggtgaccctgtggacaaggttcctcgcgaggatgctcatgcacagtaactagagagtgagagtgtacattgatttgttcaaacagataataacttttcattgagatggtatttttcgc

SEQ ID NO: 39063 - DNA, 4691 bp, Zea Mays
ccacctgcatccttgccagaggtcgccccggaacccaagtgtcagcagcggacctgtggactgtgatgtcgcgagcgcgcgcgtgtgtggataacgattttgaccgatctaaacgggccaaatggatctatcaggtctttgacccacattatttcaaattcgcgtgtagggaaagctagcggatcgctcgacggaatccggaaggcggaagccaccgaggcgagcggcgagcgcacgcaccggcacaagcaccacaccgccgctaccgactcgaccatcactcacccaattcgtggaggtgagagatggcggcgtcgggatcgggaggcaacgagcccagcggacggccctggactgcaaccagcacgtggacccccggtcccgccggcggggccgtggcggacgctgtctcgtttgagacctccgacgacgacgcggaggcgtcaccggcgggcgtcgtgctctgccacccgtcggccgactcggaccgcgacatgactccctgcccctgcgaggtcactggggaaagtatgagattcacagggtatatgtgcgaagcacggctcggatatatgaactataccactctcctgatgcaaagggtaccagcaaggattatctatgcactgtgcgttgtggacttgctgttaaagaaacacagtgctgtggtgaagaaagtatgtcacagtggactggcagtgctttaaacagtgacaagcgtgaacatgaggcaaaaagtgtaagcagtgcaagtgatgaagatagttgggttgatgtcaagattccagaatctcctgcaggaaataaaacaccagaatctcaagaaaggagtgtgattcgaacctgccgagaaaatactctgccacactatgaagctactgctgagatgactgatgtgaacccatgtgtatctcttactgtacgtcttctatcacttcagtcgaagacatccgtgcacattgaggaaatctacatatttgctgatcctgttgagcccaccgatgatgtttcagtaagaggtcctgtaaacatgggaggtagttctttgctggcaatgcttgttcctggccttatgcaaatgtctaaatcaaggaatttgaaaatcgatgacagttatttttctgacggatcaaggaatcaagaaagcagcaaatgtgaaagctttacacaggaagcagggccatgtagcacaaatgattcaaaacatacgtctgcaggaatagaaaatggaatgaactctacagtcggtgtttcagcatctgatgataaaagcagccaaggtgaattccatttcaaggacccagattctcttccactccctgtacaaacattagaaagtacacaagcgccttcagtgaagaaccagcatgaattaaacacaggttatcttgctaatcccatcatgagtgaaaaccttactccttctaatcatattgagagaaagctggacactctgctttcgaaggtagagaatatggaattattttgctctaggtttgaggacagcatgataaagccccttggtagcattgaggcaaggcttcagcgactggaggaacagtttagttcgttcgctgttgatattcagtctttgagagattattctgcatttaggtcagcaccagatggtatgcctaatacaaagagctcacaggaggaagcacataatgatgctaatgatagaagtacttctacatctgacaggaagccaggtttagttgtcagggcgccagattttgtgtcagatgattcatgtggttgtaatgtgataactaatggaagccgtgttaattgtcatgggcctaatgtggtgccaagaatacttgtgaaggcccctgattttatttcccaacctgagttaacggatgaaaacctccatgacggacatgctctatcttctgaaaaggagtgtaagacttccccaggtttagttgtcaaggttcctgaactcccagatgatgatgatgatgatggagtcgaagataagaaacaggcagaagtttgtggtgatggtgatgatcacacaaggtctgatgatactctaaggaaaagcacagctggcaacaccaagagcaaaaaatctgtatctatcaatggcgcgttggcatccgcattggaggcattactcacttctaccataggaacatcatattcaaaacctactatttgtgctaccagtaatttaagtgctgaaaatattaatggtttcttcagttgctccccttgtcctgaaaaaactggcgagatgtccactaaagatggttcagctgtccaaattctgggtacatctggtgatccaaatttggtcggtgccttcatatcttctcaggaaattgatacagctccacataattctctctcaaaggaaatgttggatagcaaggttgagataaatgaacagaactgtgacatcaatacagaaaatgtggcatttgttgcaatcacagaaccattggatgttccctcacaggctgatacagttgaggaatctattaatgatggaagttgggtgaatagacaaaactatggttctaatttgaatgcaatgccttatgccatgaacgttgaacctttggatcctcctaagcctcctacagtttctgaacctgttgatagtggagttcaggtgaatgaagatagaccttccatatccttggtggagtttcttgcagcaaggaatgctagctcttgtaagaatggtacttctgaggtatgccttggtaatgttgccgctgaaaaactgtcttttgagagaacatcggctggagctggtaaaaactcgaaaaatatcagtcagcttctagtgaagaaagctcttgaggttgatgcggacaagatattttttttgtttagtgtacccattgggccaaaatttgaaggatcaagcagtcccacccccagaactagtgggcacaatattaataatacagaagaagctgtctcagataaggaatgtggcgtgaaggataccaagaatggatttaggccctctttggggatggactctatattttctcagtaccatgctacagattctaagaaaaatttgagtgagaacagcagttcggaccggattctagatgagagtttctcaaaacagaatggagaacaatctcggtcaagtctgagtagtatggtgtcatttagtggagcatctgccacagaacccgttgttccagggagtggcacatcggaaaattacgtggaagatcttacaggcgttagagatcgtcctgttgcaacactaaattctggggaagagctccaaaaggtctgtgatttactttatgagtttaaggatgaaatgttgagggcctccgtagcgaagtgtacaaataagagcagcccgtcacttgaagctttgcttgctgaatcatctgattctgaagcgcaaatctctgatctggagggtactgacagtggtgctggcattggctccggtcgactgtttagtacactctcatcttcagatgacgatgatgcttctgctgcggacgagcctttagttgatgttgctgacctgactacgccaccagagcgatatacttctgtccccagcgacgagcctctggttgacatagctgacctgacaaacccttcagggatagatgcttcttcagtgaatgagcctccggctgatgtggttgatctgctacatacttcaaacgagcctttggtcagtttggatggtctgccaaaccatccagagatgtgttttggtgggagcagtggagaacataccgacagtcttatttaaaggataaggccatgcggtactgatagttcagagatgagcggaacatataagtccatgcggctgatgtgaacgacagtctcatataagtgtgttccaagttatgcataagtttttgtacgtaaataagcctttgtgtctgcatcagtttatactaaatactatgaaagcagagtaactttggttttgggttgctattctcccgtttatgtaaatccattacaactaacactttgccgatataactttttactgttgcacgttctttttcaagttctgagcattgcaggagaaagcaaagttactacttaccagacgcgcctatattggtaccatttcagtttgaagtgatgtcacattgtcaccagacctgagttacaatcatgatgaacaacatctagaccagaccagacaagtgacaggttaagctcggaacatgctgtgttcttttactttcgatggaacacgccatgttccttccataagtaagcgaacagaagaacaggcggcgctctgttcacatgtgagcatgactgccacctgctgcgcgcctgcgctccgtgtatagaacacgggctagccctggtcctggcgaagtcgtcccgccattaatacgagacacggcccggcccggcccgtgcggcccattagtgggtccgactccgtcttcgctctgtctaggttcaaggaataggttataggaatccatggattcgcattcgcatccccgcgagatcacaaacacaaagagacacaagagaaacaatagtggataaacttttctcttgttatttagtatgagaaggtagatgcttatgatatacaaaagtagagccacttatggatatgtttgatattgtgcacttaaccatcgtatggtttcttaatattataccattttgtcttctctttataatagtatataatactatatgtg

SEQ ID NO: 39064 - DNA, 2577 bp, Zea Mays
ctttctgctgcgaacttgcgcgacctgcactgcgtccctctctccactctcccgtctctcgggtctcggctctcgccgtcgccactcgccgcgagcgagatgcagggcctagccgtatcatgccagcttcctcctgctgcggccgcagctcggtggcggccgcgcgcttcttcctctaatagggaagcagttttacaatgttggaagtatgaattaagtcaagaccactatttgggaggccccctaaggataggtcagtctcaaggaagtttgcacagacatcgctctacaaattttctcagaccagctgctgcagctatttcagttgaacaagatgaagtcaatacttatcttccaaaaggtgatatgtggtctgtgcacaagttcggtggaacctgtatgggaactcccaaaagaatccagtgtgttgcaaatatagttcttggtgattcttctgagaggaagctgatcattgtttccgcaatgtccaaagtaactgacatgatgtacaaccttgtacaaaaggctcagtcacgggatgattcatatgcaatagcactggcagaagtttttgagaagcatatgactgcagcaaaggatcttcttgacggagaagatcttgcaagattcttgtctcagttgcattcagacgtcagcaacttgcgagccatgctccgtgctatttatatagctgggcatgcgacagaatctttctctgactttgttgttgggcatggagagttgtggtctgcgcagatgctgtcgtatgcaataaagaagtctggggcaccctgcagttggatggatacaagagaagttctagttgtaacacccagtggttgtaatcaagtagaccctgattacttggaatgtgagaagcgacttcagaaatggttttctcgacaaccagctgagataatagttgctacaggatttattgcaagtacagctggaaacattccaacaactctaaaaagggatggaagtgatttctcagcagccatagttggttctcttgtcagggcacgccaggtcactatttggactgatgttgacggggtatttagcgcagatcctagaaaagttagtgaggctgtgatcttaagcactctgtcttaccaggaggcctgggaaatgtcatattttggggcaaatgttttgcatccgcgcaccattatacctgtgatgaaagacaacattcccattgttattaggaacatgttcaacctctctgcccctggaaccatgatttgcaagcagcctgccaatgaaaatggtgatttagacgcatgtgtcaaatcatttgctactgtcgataatttagcacttgttaatgttgaaggaactggaatggctggcgttccaggtacagcaagtgctatatttagtgctgttaaggatgttggagctaatgttatcatgatatctcaggctagcagcgaacattcagtatgctttgctgttccagaaaaggaagttgctgtagtttctgctgagttacatgataggtttcgtgaggcattagctgcagggaggctgtctaaggttgaagttattaatggttgcagcattcttgctgctgttggtctgaggatggccagcactccaggagtcagtgcaatactttttgatgcattagcaaaggcaaacattaatgttcgagcaatagctcaaggttgcagtgaatacaatattactgttgtattgaagcaacaagattgtgtaagggctctgagagctgctcactcaaggttcttcctctccaaaaccacacttgctgttgggatcattggacctggtttaattggtggagcactccttaaccagttgaagaatcagactgctgttctcaaggaaaatatgaacattgatctgcgtgtcattggaataactggctcaagtacaatgcttctgagcgacacgggaatagacttaacccagtggaaacagcttctacaaaaggaagcagaaccagctgatattggtagttttgttcatcatttatctgataatcatgtatttccgaacaaagttttggtggactgcacagcggatacaagtgtggcatcccactattacgattggttaaagaagggtattcatgtcatcacgccaaataagaaagcaaattctgggccacttgatcagcaactgttggtgctggcctcccaatcatcagcaccttgcgaggtcttctggagacgggtgacaagatactgcgtattgagggcattttcagtggaactttgagttatatatttaacaatttcgaaggaacaagggcgtttagtgatgttgttgccgaagcaagagaggcgggatacactgaacctgacccaagggatgatctatctggaactgacgttgcccgaaaggtcgttgtcctcgcgagggaatctggtctgaggcttgaactttctgacattcctgtgaagagccttgtgccagaaacacttgcatcatgctcgtcagcagatgaattcatgcagaagctaccgtccttcgacgaggactgggccaggcaacgcagtgatgctgaggctgcaggcgaaaggtgattcggcttggctttcccct

SEQ ID NO: 39065 - DNA, 2767 bp, Zea Mays
ggggttcctttcttctcccaccgtcgctgccgccagctgcccagctgcgcctcgtcgtcagagggttccctttcctgttcgatgtgacgcagccccccgctgcgccccgacggcggcggcctcaccggctggcgatgggcacgacaaactgagacctccctttccacccaagttctctttcctccttctctctctctctccctctctctgcggaaggtggcggtgctgcactctgttggtacaagagtctggagtgcagtgcagatccacccggccggacctggatcgatatctccgtttgttgcatacaatcaaatccgaatctttggtggcgctgctgaacaagcctactctaattcatccatgtatgatcccgtcaggttctttccatcgtgcaggttcaataaaaccaataaattctggggttcaactgaacccccaatccgagtataacggccactctgtgctgcaaggtttgtctaagattttcgtgcaataacggccatgtggaggctcaagcagttcatccccaaggagcagcccagccccagcggcctcgagggtcggacggtcgatgttggcaatgtcaaggtgcacgtccgagaggccattgctgagggtgggttctcatctgtctatgctgctcgagacctggtaaacccagcgaagcagtacgccctcaagcgcgtgattgtccaggacgaggagtcgctgaacctggtccagaaggagatcacggtgatgcggtcgctcaaggggcaccctaatgtggtcacactggttgcacacgccatactggacatgggacggatgagggaggcactgctgctcatggagttctgcgggaagtcactggtttctgtgttggagggcagaggagcaggttactttgatgaggagaaggtggcgctgatcttccgggatgtttgcaatgctgtctttgcgatgcattgccagacgccacctcttgctcacaggctcttgggtgtctcttgtatagaatttgctacttcaaatcagcatttgatggagaatcaaagctccaaatacttaacgggaactatcgcatcccagaattgccgaagtacagttcttctattacaacacttatcaaagacatgcttaattcttctccagatgccagaccggacatcacacaggtgtggttccgtattaatgagttacttccattggagctgcaaaaggatttacctgatggatctccatctggatcagcatttgaatctcacactgccactgatgaagtatcaatgaggccacagcagatgagtggctcttcatcaagagagaatatcaagaatacctctcttagtgattcttccaacataatggtacaaagtcctctgaaagctatagggaacatgggttctatgggtgcattttggtcaactcaacatgctcaggagctatcttttgctgatgacaaggagccagcttttgataaagagcccattgatcaagtcagatcaaagcaatcacaggctaagaaccagaacacagcagctcgcaattcatctcggaagtctctgtctgcatcagttgatagttcccctggggatttcgaaattaggttttctgcaaatggctcggagtctaggttggaggaaaccaaaacggtaataacagagaataaaacaaagatacaaactactgccttcaactcctgtgcgtcagactttgataatatcaaaatgaactcacgaaacactactgacagtataaacataactagcaaattgaaagagcttcaattggaagcagaagtaactttactcaaggaacaattaaagatagcaaacctggagaaggaagaaatttcgttgaagtttgataagttgtctgccatttgctcctctcagaggcgagagatacaagagcttaagcaagctttggctgcagcttatgttacgccaccagctaaacagttcagagaaaattcaagtgttgaagtcaccccacccagcaaaagcctcgacactccgccgagggagaagattgaaggaacccctccagagctccggcaaggcctgtttacttcaagcccaggaacaccaagccctgacctgaaaacatggtcagctttccttgaagagccaaaatctcaagcagctgtgaagagtgtccaccccaggtcagtccgaactctgcgtgcatcaaacagcaacaaagccagctcgttgggacagtcaaatataagttctagcaccgatccatttgcgtttggtcaagatagttttaaggctgctccttctggaactgtacttcccctgttatcaaacatggggaatacttctcagctcagtaatctgaatatagaagaaaagaaagacggatcctaccaaccagatggatggactgggttttgattgtgctatagtaatttatgtgccaaaagagtcaagagttcatatggtcttggtggtgtggtatactgaaggtgcagagaggaatgcctgaactggtgtaggtatgtgtgacaatgctttttgtacaattgttctggtcctgagctagcatcgtgatgcgttcagttgtaactgtagtgcaaatgtaagttgcaacttgcaattaattgctagatattagatataggaagatgtttttttttcttatgtagacaagcttgtggtgtcatgaattttggaggcatgctatatagatatagccatctattataccatatcatgaataaagggttatcatttagtgacaattggccaatatactcactttaatactattcatg

SEQ ID NO: 39066 - DNA, 3281 bp, Zea Mays
caagcgcgcacggcacgaacacggatccttccactgccactgccactgccactgccacgcgggacccaaccagccagcgaacgcctcctaggccacgtccgcgcggccgaacaaccactccggcacgcatccaccggcacgcggggccacattgacgggcacgcacgcgcaggccaggcaggcagaggccacaggcggtggccttgtggcgcggcgcaggagcaggccttgccgcgccggcgctgccttgctcgcgaagacgccagttcccaactatttgcggagccgagagccggaggcggaggcgttaagcgtaaggcagcgagcataaagcgccctggcgcccgcccgcccgccgcagccgcaccaaagcctagccaccctcctctgccctcgagtccacgtctcgtctcctcgctccactcgccagtcgccacccaagccggagcgaacccgctgcccgaatagagtaatccgaggagccagccaaatggtggtggccgcgtgagtgtagggtccgggggatatagagagagagagactaggggccggccgcgatgcgggcgtgggagatgcacccgctctgctgcctcgccggtgagtggccggcctcgggcggcgggctcgcgcccggcgaccgctccccgccggcggaggacgcgggggcggcgccggcggtggcgggggtcctgtacaagtggaccaacatcggcaaggggtggcgcccgcgctggttcgcgatccgcggcggcgtgctcgcctactccaagatccggcgccgcgtcgcggcggagccgcgtcccgaggccgcgggcggcgtccggctgatcggggtggcgcgcggcgccgcgggcgccgctgagcgccccatcggattcgtgcctctcaagatatcatcatttagtgaaagtaaatcagatgataaacggttttatataattactccgaccaaaacacttcaactgaggactggttgtgctaatgaccgggcgacttggattgaagcgcttgtcactgcaagaagcgaatattcttttaatggggatttatcaggtgatcagaatgatgcatcattttccacagaaaagctcagaaatcgcttgaatgctgaaggcgttggcgaggccgttattaaagactgtgagcagattattcattcagaattttcgcagtaccaaacacagatgaagcaacgttgtgaagagtatttaagctttattggcactcttccacaggatgttgaggtagttaattcagtagattcaactgtccctgagaagccacggctagagctgttcaagcatgactgctccagctctggaaaatgtagtgaatatagcaacacagaatcttctgatgatgttggcaagcaagagattagtgaactatcagacggagatgaatttcatttctatgacacaaggcaaagtttcagtgaatttgcttctagtcctgctgacccgagaaagggatgtttaaacaacggaaatgaagatcataaatctgttgaatcattgacggttgacaaggctgagaaatatatgctatcacattcaaaaaggcgcttacagttgcctgaaccaatagaaaaggagaaaggagttagcctttggtcaatgatcaaagacaatgttggaaaggatctaacaagagtttgtcttcctgtttactttaatgagcctttatcttctctccagaagtgctttgaagagttggagtattcttatttgttggatcgtgcatatgaatgtggtttaagggggaatggtctgatgagaattctttatgttgctgcatttgcggtctctggatatgcatccacagattcccggccttgcaaacctttcaatccattgcttggggaaacctatgaagctgattaccctgaaaaggggatccgttttttctctgaaaaggcctgaaagaggaatcactaaaaacatcacgtacaaggatccaccactggagtattactaaaattttattatatatgagaacacacttgactaaatgtttttgtttattcttgcaccaggtcagtcatcatcctatggtcatggcatgtcactgtgaggggaaaggttggaaattttggggagacagcaatctgaagagcaaattctggggacaatccattcaattggatcctaatggtgtgctaactttagagtttgatgatggagaaattttccaatggagcaaggcacctgccgcatggggatgaagtggatgcaggaaggcgtcacgtcaagcggattggtcttgggcatcattttcaggttacaacaacaattaacaaccttatccttggtcgagtatattgccatcaccatggcacaatgaacataagtgggaatagacgatattcatgcaagctgacttttaaggagcagtctttccttgatcggaatcctcgccaggttcaaggagtcgtcaaggatgctggtggaagcaaggttgcaacattgacggggaagtgggatgaaagtgtgcattgtgtcatcaacaatgatgcctctaaggtgaactctcatggtccacatcagagttctggttccactttgctatgggagaaaaatgagcctccagtcaatcctacccgctacaacttgtccgcatttgcaataacactaaatgagttaacaccagagctcgaggagaagctgccaccgacggattcaaggctgagaccagatcaacggcacctggagaatggggagtacgagaaggccaatgctgaaaaactgcgcctcgagacacagcaacggatggcaaggaagatgcaggagagtggctggaaaccaagatggttccaaagggacagcgaggatggaacgtaccgctacgtcggaggttactgggaggcaagggagcagagaacatgggtcggctgcaatgacatatttggtaacttgtctagcagccagaagctcccaccatccgctctctacacgagctgaagtatataggggtgggtaaggccggaagggcatgttcagtagttgttgacatcgcattaaccagagggtttttctctcgtttctgttgtgttaagctgtgagctaacatgtttttcttgtcaattgtcacattgaagccaaggacatccaagcataacccaaccttttgtcgatactaggatacttatgagagatcttgtggacattattgcgaaaagaattgtcgatgatactattttcttctttgcattccgcaaggacgtgtctgcatttggcccttatgttgtcgtgcttttgtgtgtttatctcgcattggtgatg

SEQ ID NO: 39067 - DNA, 2360 bp, Zea Mays
tttctaattacatgataattcatcttgatgctactctacctcaagatcacttcgtgattgggcatttcaaaggaatctaaaaaactcagtcagggagggaaataccgtcctccaggtattatataagagaccgaaacatggtcctggccgagaaaatcaccgaacactggccctccatcactagcgggtcgtcaccacccactctgcaacggcccaatcggaggatggcgcgcaggacgtaacccggaagcgtgcggggcacaacgaggggattttttttaaacgaagtccgaaatttgcccccgagagggatcgaatcgggaacctggagacaattgcaacagtatgtgtatttctagcgtcaaaagttgaagatactccttgtcccctggactatgtagttagagtatcctatgaaacaatgtataggcgggacactgctgcggctcaaaggatccgccagaaggatgtttttgagaaacagaaagcgctcattttgattggagagagattgcttctgacaacaattcgatttgatttcaacattcagcatccttatagaccacttcttgatgctatgcaaaatcttggcatcaataaaaaagaagtgaagcaagtagcatggaactttgtgaatgactgtataaaccccagtacatagctgctggttccctttacctggctgcaaggcttcacgatatcaagcttcctttgcatggagcacatgtttggtggcaccaatttggtgttgcaccaaagcctctggaagctgtcattcatcaaatgatggagcttgcggctgtgaacaaatcgaatcctgttcgtcccaatctggttaagccaaaggaaactttatgtgaagctaaactgagcttatctaatagcccagactctgtgttgaatcaatcaagcttgttaataagcagctctagtcctgatattggcgagaccagtgaccaagtgcaggtggattcttgtcaatacttgataagcagccatacgggtgattgtagggtctcatgtcctgacaacagttcgttggatacttctggtaaagctcatgatgaagagagattggatcaggccttaataaccaagcatgacagtgggatgatgccttctactagtaaccagacatcattagatgctactgtaggcactgagagcagtgctgaatatatgaagcaggatgtaagccattgcgatgacttcaatatcagagtcaatgaccaaagcttgaaccaggcgttaagaaatcagcatggtgatgctgtcccattacctgacatggtatcactagatgctaaggtggacaaggaaagtagttggtgtctggaaccattgattgcaaacttcgactgctgcattgacagcgttaatgtggatagcttgtgcactgatcagagattggctgatgttgcttcaggccccacagctgatgtgccatccgtgctgctggccaaggagaattctgatcctttgagtgcaaagctcgaaaatattgatgttgccaggataaaaggtttactgatgaagaggaagagccggagagagatccaaaaccaagccattgcttcagatggcctcagtgaagaagcctggattgagagagagctggagtctgggattgtcacaaaacaagaagccaattgtgccgccatctcagatgagctaagtgatgaagcctggattgagagagagctcgagtcagggattgtgaccggaccaacaaacgagcaggcgatcacttttgatggtttgagtgaaaatgattggatcgagagagagcttgagtctgggatcatcattgagccagcacctgctatcaagaagcggaagctggagtcaagctgttagctctttagctgctgcattcagaggccagattccaagcaggtgaataattacagatggaggtaccctgcgactagggcacatcgaagccaagagatgtcgcatagatgggaggatcaatattttccttttttttatttctttaaccaaacacctcggaatactttggcacgagggttgtgtgtacagtgggatcttcccagtttcttgaattcagaatcacacgaggtttgtgtgtacagtgggatcttcccagtttcttgaattcagaatcatatccactgtatctgttccttgtttgtgtaaatctagcatgcccgaagttcggctttaattagattgtaggtgtaactgtagcagggattgtctcgtgttaagcccgacgaaaaaatgattcagtgtaactgttactggtaaccaaagaaaattagttattcactatagacttattgttaacaaaagaaaagacagttactggtgtacgatgtttataaattgatggcgaa

SEQ ID NO: 39068 - DNA, 851 bp, Zea Mays
tttcactctcccgttggatcatattgcccaggagagcaagttcaacagctctcaatccatgtggattgagtaggattgggtaagtttaaatctcaagcaagtcaaacttcttaattttttccaatctcatccaatacataggtaacgggattaaccgaacaagacctcagtgtggcacgacgacgaccccggcctccttcgccattgtgcagatctggctggctgctcaatccgacaatgaggaggcccgaagggtagccgaggaggtcgatggagccgtggagaagatctgatctgcatgttcgactcgacaatatggactcatcaactagctagctcgggggggctcaacattggcccatgatagtttttgttttcccctaattaactgtatcccatgattaacaccggcgaaatgatagagatagctagtcaatattgtcgtcgcctgttaatgatagatcgaggcagacatgctgcagactgttgccagattctgcggtccaaaaatcaaaacccataaatgacgacactccatcagaccaaaccttggaacaaagttaccaaaaaatatatataaccaaatgacactaaatttgtttgaataggctcatcagtcaatcgcatttagcattcccgtacgtgtgagatccaagtcatgcgatatgatacgccgtcgcgagtcagcaacagcggccggcgttcgtcccatgtcaaagctagagttcggcgcgcggctgctgacgacgacgacgatcaccggtcttcggatccatcgcgcgcttcggcagcaacggcgtcctcgactcgcgcccttccgttgaaaagaagcaggaaacagttgtaattag

SEQ ID NO: 39069 - DNA, 3192 bp, Zea Mays
ttcctgttctgttcgcaccgcctccgcctccctccctccctctccccttccggactctctgctctcctctgctgctagtccatccattaatctcctctcctcgccatcgccgcactcacgctacgcttccctcctcaagcccgagggcttctccgggaaggaatcgccgcgccgggttcctgcaacgccccgccctttgcgcacccggagcaactgagtcgtggctatcgaggatgatgccgcgtttcagataacagagactgtgagagtgcacgacacacttgacatgcagagatgaagatcagtgcgcttctcacctccgcgggcatcaacattggcctctgtgttctcttcctgtcactctactccgttctcagaaagcagccggccaatgtcagggtctacttcggccgcaggatcgctgaggaacacgatcggctccgaggggcatttatcttggagaggtttgtcccatccactggatggatagtcaaagccctgcagtgtactgaggaagagatcctggctgctgctgggttggatgctgttgttttcaatagaattctagtattcagcatacgcatcttctcccttgccgcagttttgtgtgttttcgggattcttccactcaattattttggacaggatatacaccatgttcgaattccttcagaatcactagatatatttacaattggcaatgtagaagtgaaatcaagatggtaagccaagcaacgtcttttttaatctattatcatgtgctgccatcaactgctgaaatgttgtgcttttgtatattatatatatggcacgttagttgctggcattttgaaaatgtcatttgcctttgccggtaatctaccgtgcgtcttcacccaacgagcactgtacaatagaacaaagtgtatgttttgatgttcactttttattctgggtcccttgtaggctctgggtccattgtgtaaccctgtacataatttctgcagtagcttgcattcttctatacattgagtacaagcacattgccaggttgaagctccttcatcttacaagcgcaacaccaaaaccaaaccattttacagttcttgttcgtggaataccaaaggcagataaagaatcatgcagtgatgttgttgataatttcttcacaaagtatcactcatctagttatctcttccatcaagtagtttacaaagtcgggaaagttcagaagataatgactggcgcaaagaaggcatataagaagttcaaacatttcacagatgaaactgtcgatcaaggttgcaggacagttacctaccgctgttgtctgtgtggagcttcttcaaattctttcaagttgttgaacactgagtgtgagcagaacaaggggaaagcggacaataaatccatcttggacttagacgatgaggaatgcacaactgcttttgtatttttcaaaactcggtatgcagcacttattgcgtcagaaatacttcaaacatctaaccctatgaaatgggttgctaatcttgctccagaaccagaagacgtgtattggtccaatctttggctaccctataagcaactttgggctcgccgtattgctacactcctaggctctatctttttcatgttcatatttctgataccggtgacatttatacaaggactatctcagctagagcagttgcagcagaggcttcctttcctaagaggaatattgaagaagaaatactacatgactcagctagtaactgggtaccttcccagtgtcatactgcaaatcttcctgtacattgttgctccaattatgatgctgttttctacattggagggccctacatctcacagtgaaaggaagagaagtgcttgctgtaaagtgctgtactttacagtttggaacatattctttgctaatgtattatctggtactgtcattagtcaattgaatgtgttatcaagcccaaaggacatacctgtccagcttgctaaagctgtacctggacaggccactttcttcatcacctatgtcctgacctcaggatgggctagtttgtcatctgaagttatgcaactctttggtctgatatggaactttataatcaaatacgttctgagaatgagagaagatacagaattcgttccctcgtttccttaccacacagaagtaccaaaagttctgttgtttggactattgggcttcacattttctgtgctggctcctctgatcttaccttttctgctggtgtacttttgtcttggttatgttgtataccgcaatcagttgctcaatgtgtatcgaacaaggtatgacacaggtggtttgtattggccaattgcatacaacacagtcatattctcacttgtgctcacccagatcatctgccttggtgtatttggccttaaagaatcgccggtagctgcaggcttcactgtacctcttatcatccttactcttttgtttaaccagtactgcagaaaccggcttcttccattattcaagacttttccagcacaggatttaatcgacatggacagggaagatgaacgatcaggaagaatggatgaaattcaccacggacttcattctgcttattgccagttcgctgacactgtagatgtgcccttggataaaattgaaatcgttggtggggatgaggagcaaggctctagctcgggtcagtccagtgttaaagaaacgtgcgaggatcccaagaagcacctggctcaccctacactaaaaggactccctgttaaccgcctccggcatgccgtgaggtcggttactttcctgatcagattgcagagaagaggtttatcagaacagaaaatcggataattagttagccgccaaccccctttgcttgttggctatataaatgtacagaggcatacatgcatatacgatcgttcccttagaagagagaagggctaatgtagaagtctgtgggagaacatcatcatgagtgttgaggtgcaattttgttttgtcgcatggatgagtttgttggttctgcgggttatctggcagattcagctacccaaaccttagccttgcacgttgatgaaattaatgctcatggttttgttgtaagagattaatgtggccaaagtgatctagatgtataatgtcctcctctccattggtttgtgtttgagcctcgcaactttagcaggtctgttagtcttcatgcgccaatcatattgagg

SEQ ID NO: 39070 - DNA, 2361 bp, Zea Mays
cagcgctcccgctccttgctcgcctccacccgcggccaccaccgccctgcggcccccgccgcttgctagcctccaccgcgccgcgagtcacgccgttcatgcaccggctggtcctggagcacgggaggacgagcatgtcctggttcggccccagccccaaggtgaccatcgtcgacccggacctggccaaggacgtgctgtccaacaagttcggccacttcgagaagctcaaggtcccggcgctgtccaagatgctgggctccggcgtggccagccacgagggcgagaagtgggtcaagcaccggaggatcctcaaccatgcgttccatcttgagaagctcaaggtactactaactactacatataattaattgcatataattaattgatccttggaattatctggcaatgtgcagcgcatgctgccggcgttttctacgtgctgcgaggagctggtgagcaggtgggcggcggagtcccttggctccgacggctcgtgcgagctggacgtctggccggagctgcagaacctgacgggagacatcatttctcgcaccgtgttcagcagcagctacagcgaagggagaaggatcttccagctacaggtcgagcaagcttcgcttgtcatgaccaacattcggaagatcatgatccccggctacatgtacttgcctaccgcgaacaacaggaagatgcgcaggaacaacagggaggtggagtcaatcctgcgagagataatcgggaagaggatccaggcgatggaacaaggcgagggcaccaaagacgacctggtgggtctactgctggagacaaacatgagagacgacatggggatgacgatcgaagacgtgatcgaggagtgcaaggtgttctacttcgtcgggatggagaccacgttggtgctgctcatgtggacgatggtggtgctcagcatgcacccggagtggcaggaccgcgcgagggaggaggtgacggctctgttcggcagggacgacaagcccgagtatgacggcctaagccgcctcaaagtcattgcaaaaacgggactgctaagcaagctaagatttcaatggcatattccttcatacataggccattgagcgacgaggcacgccgcgtcagcactcccttggtggtcacttgcaatgaccagagacgggaggtctccgttgcccagaacatcgctaacaaggaaattgaccgcaccgttgcattcgacaaggtgctaggtccaaagtctcaacagcaggacgtcttcaaccatgctgttgtgccacttgtcagcgaggttttggacggttataattgcacaatatttgcatatggccagactggaactggcaaaacatacataatggaaggaggagggggcaaagcactgaatgctgacctcccgactgatgctagtgtcattccaagtgctgttaagcgcatatttgacatcctcgaggcacagagtgcagagtacagcatgaaggtttcttttcttgagctgtacaatgtggagctcactgatcttctagctctacaatgagattgcaagaacgggactgctaagcaagctaagatttcaatggcctattccttcatacataggccattgaaccggaagattttgtcggtattcggtaactataggatcatgtggttgttggtcgagttggaccaattatgctggctcatttgttggatgttttgacaagtcgattctagcttccttatgatctatgttagatttggtaatgcataccagttagtaaagcatttatgatgtacattgttatacatagagctttacatcacaaaaattatcagtttccctcagttacgatatgcatttagtatttatcgtattttgaaaattaataacctattatactatgataggcttgacttcatgtttatctaaataacttagtgcgatgatgcttgaaaacttatcttccattttgccagatcaatgaataaaaggattattcatatcaatgtccatgcaccttctcagaaaatccttttgtgatgttggtgttggtttcctggacctgtactggtacatatgctaagtcatccacaaatctgacccagaattgtaccgttctttttatagccatgtttggtacttgtttgagtgctccatagttcgcaagtttttttgttatgatgtattttgacatttgaatctcagacatgcttaggaactactgatttgaatttatgggctaacagttccagtatttcaaatagaaagtatgctatatcaaataagttgatgatacttttggtactggagaatgaagctagactgcatttgatattagaagtctgtttgtctgattgcagttgattataaagaagctagag

SEQ ID NO: 39071 - DNA, 1500 bp, Zea Mays
tatcaactcgattcaatatttgcgagaacgacgacagtcttcgattgaagtcctcgatcaaatagctaacgagtatagaacggagcttcactttctcttccatccataattcttgtaatctctccatgttaactagaactccacataaacggcgatgattcttgttctggcctttcgccgagcacttggggcatcgaccaggggcttgtttctctatatctttttgggattcttttatcggcgcaaatataagtcagagatgtcatggagggactagcatcgagataagacgacggaacaacgacgaactaacgagctgaaccacggcgagtgatgtcttgacgcggatgagcaatggcaacttgcggacttggaacaacggagtgaggcgcacggccaactagcaaagatgagtgtgtgcagcacgaatatgtttggcgccaactaagacgtgcgcgcagatgcctaggactcgacgagcaacgacgcaaggagtaaagcgaggtcgcggtcgggcgaactctacggcgcggactgcttcgggccagaatggctgccgcgacacacacgacgttgctacgccacaacaccaccacggccaggaatagaggcgcgagcagcttgcaggggaggtcgaacactagaaacgacggtcgggtcgctcatgagctcggcatgggcaagctggtttccacggtgagcgacggcgacacgaacagtgctaggtgcggcttggctggagaaggcacaagtcgccagcgagcagagaggcacggtccgggcatagggtgatggggcacgctggagatggccgagaaggagaagtccaagcgccgtccatggaagaaacctcggctgggcgcgcgctgggcgtacaggaagctcggatgaggacataaccgagctgggatcgacgccggggcagggcgcgacgagcagagcttaggggaaggatccaggggaggaaaccgcagcgcgcaggaacgctcggccggacgcggcaagcagagagagggacatgcgctggcgagggagatccgagccggggaaacgccaagccgaggctggagcagggactgagctcgatgcagggagttccatggcgcgcgacgagctcgatgctgggaccagggtcgcgcgtcgaggctggagcgggagcacaccggtgagctcgcgtggccaaggagcagaataggagggagctccggcgcggcactgaaggagctgaggagaagctccgcgcgagaaacagtgcgcgcagagagagacgcgtgcggcgcagcggccatggccgagctggagcaggcacgcagggagcaccgcggctggactggaaatgaagaggagagaggaggaagcggctgcgcgcggcgaggaggctccaggggcgcgcagtcaggcgagctgggagtggaagggagcatgcgcagaggaggaggaaggagcgcgggggagaagaagaccgcgcacagaggataagaagcctgcgcttggaaaaat

SEQ ID NO: 39072 - DNA, 2543 bp, Zea Mays
gcgacccattttgccaaatccctcgggaagagaaatttgtcaaaatgggtcgccctcctcgcgacgcagtgcgaccacgccgccaccttcgcctgggaaccgcgaccgctccatgaagaggggatcagatttgctcatcgcgacctaccttgggggttcattttgtgttgttgggttggatggggagaagtgtcgagcacatggtgcttgcagtttggtttgttcgtgttgacaatttctctgtggggcgttgcagggaagatgggggtcgaggagaggcaggcgcagaagagctcctaggaggagcatcccaagaacctcatcgtcgatgccatgatgctggactcccgcgctgtcaatctcgacaaggggccacctgtcgctctggacaagggggctgccctaagatgaaggaacatctatcctagagcttggtgctggaataggttgtttcactggagaactcgctaaaacagttaggaacgtttttgcgctagattttattgaaagtgcgattaaaaagaatgaaagcattaaggtatgcagttggatattgcattcagagaggctcaagcgatagctgcaagtagttctaccttgtgcccagttttcttgttcttttaggtccatgaaagttcccatttttgtggtgttgcttagatggttggccctgttgactaccaaaatgacttggacttttggtgcatggataaatggactgcaagctttcttataacgtggcacatcataagaaacatacataactccaatttccgaaatatcttagtgcagaacaatgaatataagcctgtaacctctagcagagatacacaagagaagctctctttggcatttcactgaatttcctttagttggaagaatgtcgtatcactgtttatggttggcttctttaattaaaggagaacatctttctagtttctactcagttctttggttctatatagaccttaaatattgattccacatataatgggccatgtaaatctgaggtactaccttactagcaagttgtgtttctttgaatgaagtttgcatagcaacagctgataggttttagttatgctctgactcttgagtctgaactattgattggattggtgaagaatttttaccttaccttatgtaatttggaatttgggatgaagtgtgtggcaattgccaaccaaatcattccatttactgttatcttcaggaaagtagtacttagaaattattccttagtgatgatccatttttctatgtttacactgcatgtctgttttttcctactgggctcttaatgctcaagtagcacctttttacgacgtgaattccatttttgaagttattagatacatctaacgccatgttggcctcaatgcacaagtgcccaaccctatgtagaaaatatgtggttcagttccttgttttgagaatagcagaaaatatttgcttcagttatctgttttcataatagcaaaaaatacggatttggttctctgttttgagactagcagaaaacgtgtgcttctgttttggtttttgtacccattacaaggacttggagctttgctgttgttctgctcgtgccctacatgaccatccactccaccaatggcagtgttgtcattgataactgtaatgtttattggacgataggaataatacttgttcatattgtttactcttagtttgcttgcggtgtgaaagatgtaatattggaattatattttttccttctcatgggtgaattggtgagccacaaatatggatgacattttctcgtgcctcagtctttagtgccattaatttgttagcatctaccttatttctggatatttgtatgcgtcagcagcatttcgttcaaagaatatcttatcattttaccttattattcaagttacatagagtctatgttgatttgtatttctattgttttgatagaaaattcttctgctacctatacctgaatgttactgatagcttacactaatggaagtcaaaatatcgtgggacatccagctgagcgagaagatagtgttgcatcaagttcagttttttttgtcatcaagttgtaggctgtgtggtacatccagctgagtgagaagacaatactgcaccaagcgagaagatagtcctgcaacaactcgtgccatcggcttcctcgacggcgaacgctcgtgaccgtaggaaccatattgtagaaacatttgcgtggttgaacaatagatttcaaagtgttttatgaaaattatagagagctattggagcattgtcttttttggatttattatttttaaagagatcccaatacccttgttttggaagctataactttgtgagttgatggagatgcttttactaattctgaattccgatgctgtaacaacatatctgaagagaattgttttggttagaactaggatctctattattcattgttgtgttgttgtaataagacttgccttgcctagctatatgcttgaatggaaggttttgttgggacaacatgtaagtttgttctctatccattacataaggaa

SEQ ID NO: 39073 - DNA, 1363 bp, Zea Mays
gtcttcctaggcgggacaggaattaggtgtcccttggttggccttcgattcgatatggtggaattcatgaagaatcttgctaggatggacgtggatatgagtgctgaagaaaggcatttgttctcagttggtttcaagaacactattggagcaaagagagcatcatggagaatcatttgttcacatgagcaaaaggtcgcagctgatcgtcagactggtgtgatgatagatgcctataagaagaaagtagaagaggaactaaggaaggtttgcaatgaagtattgtcagtcattgctattcactgccttcccttggccagtacgggtgaaaatatcgtattcttttataagatgaaaggtgactactaccgttacttggctgaatttagcactggaactgaaaagaaagctgcctctgatcagtcacttatggcctatcagcatgccatggttgtcgcctccagtgagctctcacctgctcaccaaatccggcttggccttgccctcaatttgtcggtcttcttttatgagataatgaactctcatgagagagcttgccaagtggcaaaacaagcatttgatgaggctcttactgagataaattctggtgagggagtttacaaggatagcacacttatgatgcagcttctgaaggacaacttagcattgtggacatcagaactaactgggggtgaagcatccaagggtaacggcgatgtcgacatggagggttgatacattctccatgttttaaggaaacacagaacgcacgcaaaaatatccaggctgtgatgctagcgaacctgggtcctcaagttttttctgcatcggaactaagaagagccttgtgtatttttctgaagtttctgtccgtctcggggttttttttttgaggtctgtttgttcctctcttttggccatcgtttggtcctggagtcagtcactcactaccaagtgtttcagaggtctgaactggtgagcatccagatctgttgttgcttttttttccttctgtgcttcagaggcatctttgtacaccgatggaaaactgtttctcttatcaacgcatagactgtcagtgctgttactgatcatgttcggtgactgaagcgtctctgtagtgttgagatcgagcataaacttctccacgaaattatgtacctgcaaagtgtcggtatgatcttacacgccgatgcagcagttgcttccacgccgccggaaaaaatattggccgtccagcaccgtcgtaaaaataacttggccgtacgtgtattggctgctgcttctttcactttaccgtgagtccgtgagtccgtgacccgcagcttcagcttctgagtaaaagataaaaaaaaaggtgacg

SEQ ID NO: 39074 - DNA, 661 bp, Zea Mays
cttggacatgaagacttggtcactgccctacacgtagcaatccagtgaactgattggatgataaaagacagctagtataggctaagtgcttgaactaggatagaaagaactctagatgtaggttactttacttaacctgacaagtaaaaatggatttttaaggatccactcatagtaagtttttctgcaaacagagtccttgattcttgataagcctcaccttgaatccttttaaaattcgcatacccttgagagtcttttatttagtcgggtaagtcttgctgagtacttgcgtacttagggttttatttccactgttgctgcaggttacgagtcactttgattgtgattggtgttaagcgccggtgggcacgaccttcttataagtctaagtaactcttatatacttcttattgaggatggtcacttaagctagcatatatttcaaaactataaataatttataacagttcaaagttatttctttgaatcacttttgtgatcactccgaccttgtacattgtaaacttgatgtaacttaaaaaatttggtaataagatttccactgcaaattgttggtgtgtgatttatgtttagttaatcctgcagtcctggtagtaagtggtttatccggggtccttggggcactcagacagatcct

SEQ ID NO: 39075 - DNA, 2215 bp, Zea Mays
cggcaactcgtgtgcactaaagtctgaaccggtcgactagtctgactgagccgctcttgcccgtccgtgctgcgctgaggtcgtctcactcggaggcgccagcgcgcgcgcgcgcgtcgtgtataaatacgtgcccgcgtctcactgttgcctcgctcgcacggtgtcctcctcccgctaccggcaggccacccccatacgcctcgttcgtctcctcctcaaccgcaggtcagcagcgcccgagctctgcgtgcgatggactactcgggcaccaaggagtcgcctccctccggggcttggtggtcgagggagacggtggccgtggtgaccggcgcgaaccgcggcatcggccacgcgctcgccgcgcgcctggccgagcacggcctcaccgtggtgctcaccgcgcgggacggcgagcgcggggaggccgccgcggccccgctcctcgcgcgcgggctcgccgtcgtcttccgcaggctcgacgtctccgacgccgcctccgtcgccgagttcgccgcctggctccgcgacgccgtcgggggcctcgacatcctggtgaacaacgccgccgtgtcgttcaacgagatcgacaccaactcggtggagcacgccgagactgtcctcaggaccaacttctacggggccaagatgctcaccgaagcgctcctgccgctgttccggcagtcgtcggcgaccagcaggatcctcaacatcagctcgcagctgggccttctcaacgtaagtctcttcactgtctgcagtgtttcttcagatgaggtagcaaccctctcatactactaatttggttcgaaaatagatactgtaattagcttagttgatgacttgatgtgatagagggattcattgcatgtagctatgtgtgctttgtcgtgcctcactaggtaaaactaattggagatagagacacgaacacattttcgtactctgtccttatcccgagctaacgtttttatatgttcatgcgctctccgatttgatgaatgtttcttgactcttttgttgctactggactggactgaattgtctgtatttattttatcgaacaccgcatatgaatacaaatgagaaaataacagcagactcagctagttaaaaacaagggacgatgatcttgatgtgtgaatccacgagacaaccttggagcatgtcacatcggaatgcattatcctgccagtagctactctttacattgttcacactccatactcaagatgatgcgacgtgtgccatttcaatttcagaaaaaaaccagagccgctatctttttgttactgcagccgttctaaactacaagttgttttattttattgaaatagagcacaaggtgacgaacagagtacaataggtcacaaaaattgttactagggtctgggggacaacatataatgcaccgtgaaaatttggcggagccttttggtttcacggatttatgtgaatgaatccatatgcagaaggtgggcgacccgtcgctgaaggcactgctcctggacgaggagcggctgacggaggcggggatagaggcgatggtgtcgcggttcctggcgcaggtgaaggacgggacgtggggcgagcaggggtggcccaaggtgtggacggactactccgtctccaagctggccctgaacgcctactcccggctgctggcgcggcggctggaggcgcgcggcgtgagcgtgaactgcttctgccccgggttcacgcgcacggacatgaccaggggctgggggaagcgcaccgccggcgaggcggccgacgtcggggcgcggctcgcgctgctgccgcccaccgagctccccacggggaccttcttcaagtggcgcacgccgcagctatactctaagctgtgactggctctgggctctggctggctggctagctgagctgtcgtccgtcggccggggcgtacagcatttcggtccggcggtgtaggcgtgtagccgctcctcctattcctcctgctgaatagtactagcaagtatcaacaacgtgtgcagagaagtcggtaaccggagtgtcgatctgccaaggtgctttggttgaacactggctcagcccgtttgtgactctcagctatgtgtacaatgtgcgcttatatctgtcttaagatttaggccaacttctgagcactggttgaatggctgttccttacagttctgtccgttcacaagtatgttccttgtccaaaagtagagat

SEQ ID NO: 39076 - DNA, 2515 bp, Zea Mays
aagcgtgggcctaccaaccacacatgtcaattctcggaatttctcagaagattggagacgggcgttctcttttcatttggagttttggactagtcgaactgacgaactggcagagcgttcaggatagacatggctgccacctttgccttcatccctctcctgctactggtctgcgtccagagcgcggctcctgttctcggcttcacaaggagcgagttccctgaagatttcgtcttcggatccgctacctcggcttatcagtatgagggtgctgttggtgaggatggtaggagcccaagcatctgggacaccttcactcacgcagggagaatgccggacaaaagcaatggtgatgtagccgccgacgggtacaacaagtacaaggtgaaataaattagctgcgaatcagtttttctgctggtatcgaggacgatgttaagctcataattgacaataacctggaggcatataggttctctatctcctggtccagacttataccaagtataaccattttttgtgccaaaactctatcatgtaccaagcaataaatttctagggtcgtcgattaaactttcttaattaaatacacagatggaagaggtgctattaatccaaaagggatagagtactataacaatctcatagacgagctagttacacatggtgtccaagtccatgttatgatttaccagctggatctccctcagatcctggaagacgagtatggtggatggttaagtccaatggttgtgtaagatccagtaactttagatgttagggatattttcccaaaatgaacatatcttgatcatccatgctaccacaaaacgcagggaggatttcacggcatatgcagatgtgtgcttcagggagttcggtgacagggtttcacactggaccactctggatgaagtcaatgtggctgcaattgggtcctatgataatggacaaattgcaccgggaagatgttctgatccatttggaacaaaaaaatgtacagtggggaactcaagtgtggagccatatatagcagctcataacatgctactggcacatgcatcagctaccagactgtacagagaaaaataccaagctgtgcaaaaaggagttgttggtataaatatatatacaatgtggtcatacccactaacaaactccactgccgatttagaagcaactcaaagatttctggacttctattccggctggatactagaaccattggtgtttggagattatccaagcgtaatgaagaagaatgttggttctcgccttccgtcattcagtaaagttcaatctgaagccattcgtggcactctagatttcattggaataaaccactattattctttctatgtgaacgaccgccctttagaaaaaggcatccgtgacttctcactggacattgctgctgactatagaggtaaaacagtttgtcactcgatacatgattatccttttattgcttgcaattctttagatacattccctgggacttctgattcatttatctagagtcacacacacaatggcctacagaagttcaaaacggtgtcacatggaccaaataatttgatgatacttctgaaacatattcgcaattttatgaaacctacaagctaaatgctgtatataacaaaacaattatctgaaacaggttcgagaactgatccgccaataggtcaggtaaggtttttcatcaacaatcttcagaaattcgacatgatagatacatcccttttattttactgcagcatgccccaacatctattcccgctgatcccagaggattgcaacttttggtagagtacctgagtgaagcctatgggaaccttcccatctatatccaagagacaggttatgcaaccacaaacggcagcctccatgatactgacagggttgattacatgaagacccacataagcagcacattggctgctctaaggaatggggctaatgtgaaaggctacttcgcgtggtgcttcctggacgtcttcgagtacctgtcagggttcatgtcgcaatacggcctgtaccgtgttgatttcgaggacgaggcgctaccaaggcaagcaaggctatctgctcgctggtattctaaattcctagagaacaaggggatccatgtagaggacgagcttgatgatgcgggatcacacgttgagcaataagttttctacagcgacacattgatctgtacatcctctagcgagactattgaatactactgtgcgttgcaataagaacacttatattaaaaaaacaaattccatcaaaacctctgtccaggactccaggtaaacaccaccacaatattagggacacggtcctgccagaacaagggaccgtttgtacaactcaagcccatatctgctagagtgtgaggagaaatttcattatttgggtcttaattcggcttcctgtgatctttagggcctgttcgtttttcacggattcaagccctggaatagttcctagccggattacttctctaatttatataaattttgat

SEQ ID NO: 39077 - DNA, 1451 bp, Zea Mays
gaggatggcgggatccgaaatctgtgaccctccgcgtcatctgaaccctagggccacggcccgccaccagtagctcgctcggctccagatcccgcgccacaccacatagcatggcagaagatacagcgtagcaaggtccggacgttcaccagagggcagtggggatggggatggggccggcccgcgtgcgctctccgtgcgggaggcctcggcggcggtgccgctcccgcacccatcggcggcggctgcgctcgaccttaggcggcggggcggccaggctggcgctgtgacctgaaacggtggcgggatggggaggaggaaggagcacctagagagagtccgagtggaggcgtactgctgggacgtgttcaagccagtggagatggtggagatcgacagcatggagaagcttgacgacgcgttcaggatggcaagttggtgtcagaaatgcatctacctaatgcccagaatggagaagatagcaggacaatatcctgggttactcagaccttactcctgcccctctctcctgtttattctattatctggctccatttgtgcagcacaaaacttagcactttgtttcattttggaatattcttgcttttagtttctgatttaattgtagcttcttgctaagtgattgacattatctggttcttattcatttcaagttgttctttcaaaaaaattggaataaaagtcattttggaatcgtgtggttctattgctgctagcttagtaaggtaaaatagcctgacctcgtcaacaattagttctttttaggagaaaaagatgcaacaaatgaggattgatgcttcccgcaagagtacatgatgtacaatatatatctttagatggtttcattgttgtagctgatactaagaatgtagcttttttctttattcaaggtggtcgcagcgatctgtgattgtttatgcccaaagcgtagggttacccgtcttgttagcgctaccttagtgccgcttttttgaaccctagacatctcagaagaggggaagcactcggagatgaagctgaagcagagcaaacgtgagacgcaccgtgggcattctctatccaaggggaagatatcttgttctccccacaattttatgttctacatgagtggagagatcatatagctcatgagaaagatgagggtactggttagtggttgtatactgccaaataaagcttgaatcgagataggtgttgttgtttttttctttatatcctgttataatggtgcaaaattggatctacaactttgctagctcccccccccccccccccaaaaaaataaagcagatacctacagatgttggacattgtaaaagaattgtaaaatcaaaatatccatatgttgagaacaatgttgtcgtaatcgcttaccttacactgttcgtactgcaattgattattcttatgcctttaaagaagtagctgaa

SEQ ID NO: 39078 - DNA, 1442 bp, Zea Mays
gggtattggtagattcccagtcgcgggtaggatcgtgcggcagctgcatatagctgaaaccgccgcagtccaacgccaagcaagcgtgcctcccgtgaaccgagagcggtccacccgccgtgtccgtcaagtgaaaccatggacgtgccgctcccgctgctgctgggctccctggccgtttccgtcatggtatggtgccttgtgctccgccgcggcggggacgggaaggggaagcggccgctgccgcccgggccccggggctggccggtgctgggcaacctgccgcaggtcggcgccaagccgcaccacaccatgtgcgcgctggcgcgggagtacggcccgctgttccggctccggttcggcagcgccgaggtggtggtggccgcgtcggcgcgggtggcggcgcagttcctgcgcgcccacgacgccaacttcagcaaccgcccgcccaactccggagccgagcacgtggcgtacaactaccgggacctggtgttcgcgccctacggctcccggtggcgcgcgctgcggaagctgtgcgcgctccacctcttctccgccaaggcgctggacgacctgcgcggcgtcagggagggcgaggtggcgctgatggtgagggagctcgcccggccgcggcggggagagggagggcgggccgccgccgtggcgctcggccaggtggccaacgtgtgcgcgaccaacacgctggcccgggcgacggtgggccggcgcgtgttcgcggtcgacggaggggagggcgcccgggagttcaaggagatggtggttgagctgatgcagctcgccggggtcttcaacgtcggggacttcgtgccggcgctcgcctggctcgacccgcagggcgtggtcggcaggatgaagcggctgcaccgcaggtacgaccacatgatgaacgggatcatcagggagcggaaggccgccgaggaaggcaaggacctgctcagcgtgctgctggccaggatgcgggaccagcagcagcagccgctcgcggagggcgaggacaacaggatcaacgagactgacgtcaaagcgctcctcctccccctgcccaccgcgcccacccccgcgctgcaactcccgccgcgccgaatgctccccaacgccctgtacaatccgggggagaggtcaaggaaggcgagcgacgctcggcaggaagggcatcccgcgaggccgcgacagtggcggcactccgctcccaccaacccacaacactgatcccctcctcgccgagccgccgccggggataagcgtgggggagtgagaagccaaaatctaagacaccgatccccgggcgtgagtcgcgaaggtagcggcggagaaaagggtggagccacaacgcggtcgtgagcccgcagccaccggttccgtgcggctagacggagagagaggaggagggagccgccattgccgtagatctccaggag

SEQ ID NO: 39079 - DNA, 460 bp, Zea Mays
cggcgaaccaggcgagcatgatagagtggactcaccgatggattgcgtagtgcttttctctgtcttcgttgcacggcggagatccggcggagcgatacgacggcgaggaattggagcaaaaccggcagttgatcacgagtagcgcggccccacacgtccttcccagaacttgaggaaagtccccgagcacttcacggggcagacgactgcgcggcaggggatttcccccccacggcggagcacaacccctctcctctcggttccctcccatgacgccggtggcagtggccaagtagttctcgtgattgagggctaaaggtcagcgatctgcgcagggatttattccccctcgggcggaagccggttatccagctccgagcaggtcaggcgcccgaggattccgtgcgcgcgcaggagaaatcgctatttctgttgaggaagatggagacgagctcaacgc

SEQ ID NO: 39080 - DNA, 962 bp, Zea Mays
tcatggggctcccgtagcgtcgactgcttcgagaagctcgagcagatcggcgagggcacttacgggcaagtgtacatggcgaaggagacgggcaccaacgagatcgtcgcgctcaagaagatccgcatggacaacgagcgggaaggggcccagagcgggacgagcaagggaggtcaattgacgacaacaagtacaaggggagcatttacatggttttcgagtatatggatcatgacctcactgggcttgctgatagaccaggaatgcggttcattgtgccacagattaagtgttacatgaagcagctgcttacaggcctacactattgtcacgtcaaccaagtcctgcatcgagacatcaagggatctaacctcttgatagataacgagggtaacttaaagcttgctgattttggccttgcaagatcattctccagcgatcacaatggaaaccttaccaaccgtgtgatcactttgtgttgttatcgcaaggttcttattgtcttcctggattgtagttgcagacctccagagttgctacttggaagcacaaagtataatctagccgttgacatgtggtcagtgggctgtatttttgcagaactgctcaatgggaagccaatattgcctggaaagaatgagccagagcagctgactaagatcttcgagctttgtggtacccctgacgacacaatctggcctggtgtcacaaaaatgccatggtacaacaacttcaagcctcaccggccattaaagatacgagttaaagacttctttaaacattttgatcggcatgcactggatctgttagagaagatgttgactttagatccatcacaaaggatatcagcaaaagatgcacttgatgcagaatatttctggacttcacgagcgatgagcgcggccgtgaacaccatgaggatacgggcccccagatggcgtcggctgtgcaggcggccatga

SEQ ID NO: 39081 - DNA, 1318 bp, Zea Mays
actttgaatttgaattgtttattacgggcattacgcattaccctggagtgtggactttaatttgttcataagatcatcccggctcctgagagattcgttctatctgattttccttggaattttcgtgatcttggtttcacttgctcctagagtttgatgaggccaagcgcagttgtagaaagaggcttgacgggcacaaccggcgccgcaggaagccgcagccagataccatgaactctgggagctttatgacaagtcaacaaggcttgttttcgagtgcagggacaaggttctcgtcgttcccggctccaaggccggagccaagctggtctggagtcatcaaatccgaggacagctcatactacacacaccacccggtgctcagcaacaggccgcacgtcgccggcacctccacgtcgccggcctactccaaggaaggccggcgcttcccgttcctccaggacggcgaccaagtcagcttcagcgcatcaggcgccgggacgctcgaggtctccacggtgtgccagcccctcctcaagacgaccgccgccgtggccccgccgccgcccgagagcagcaagatgctcgcccccgtgctggactcggattgtgctctctctcttctgtcatcccccgccaactcttccagcgtcgacgtgagccggatggtccagcccgcggagcgcatccccatggcgcagcccctcgtccccggcctccagcaccaccagttcggcggctccccggtgccggactggttcgccggctccggcgccgtccctgccgcgggcaccggcgggttcgcctgcccccacagcgtggagagcgagcagttcaacacagtcctagtgccgagctccgacggcggccacgagatgaactaccacggcatattccacgtcggcggcgagggctcctccgacgggacgtccccttcgctcccgttctcgtggcagtagcttaccgttgaagcgggcagtgttatgatcggtcagctgtatagcggtggtcatcacaccagttccctcttctttccgtgtttatttattctctgctccctcacgcactcccccgtgtcacttgctagtttcttagttttgcatgcctgatgcatgtagcctgaaaaaactctatcaaattagtgccagatttcctagttcccgtttgtttcattttattttgagaattggaatcttactaatgatttcctagttcccgtttgtttcattttattttgagaattggaatcttattaatgtaataggctattttttagaatgtgacattccaccactttacaaagttattgtataagcct

SEQ ID NO: 39082 - DNA, 2012 bp, Zea Mays
ccagaagcagccagcaagctcatgcccttcaaaagcctccggcagcccagcgccccagccagctagtggtgatctctcatctcagcagcgcgcctgaacgtgtgctccctgctaagctctgcgcctcgataggcaaaggaaaatcaaaccgatcgtcgtcagattaaatggccggtagcagcgcggagcagctcctctccaggatcgccgccggcgacggccacggcgagaactcgtcctacttcgacgggtggaaggcctacgacatgaaccctttcgacctgcgccacaaccgcgacggcgtcatccagatgggcctcgccgagaaccaactgtcgttggacctgatcgagcaatggagcgtggaccacccggaggcgtccatctgcacggcgcagggcgcgccgcagttccggaggatagccaacttccaggactaccacggcctgccggagttcagagaggcgatggccaagttcatggggcaggtgaggggcggcaaggtgacgttcgaccccgaccgcgtcgtcatgtgcggaggagccaccggcgcgcaggacactctcgccttctgcctcgctgacccgggcgacgcctacctcgtgccgacgccttattacccagcgagtgaagctgctgcccatcgaatgccacagctcgaacaacttcaccctcaccagggaggcgctcgtgtcggcctacgacggcgcgcggaggcagggcgtccgcgtcaggggcatcctcatcaccaacccctccaacccgctgggcaccaccatggaccgcggcacgctggcgatgctcgccgcgttcgccacagagcgccgcgtccacctcatctgcgacgagatctacgcgggctccgtcttcgccaagccgggcttcgtgagcatcgccgaggtcatcgagcgcggcgacgccccgggctgcaacagggacctcgtccacatcgcgtacagcctctccaaggacttcggcctcccgggcttccgcgtcggcatcgtctactcctacaacgacgacgtggtggcctgcgcgcgcaagatgtccagcttcggcctcgtctcgtcgcagacgcagcacttcctggcgatgatgctcgccgacgcggagttcatggcacgcttcctcgcggagagcgcgcggcggctggcggcgcgccacgaccgcttcgtcgcgggcctccgcgaggtcggcatcgcgtgcctgccgggcaacgcgggcctcttctcgtggatggacctgcggggcatgctccgggagaagacgcacgacgcggagctcgagctgtggcgggtcatcgtacacagggtgaagctcaacgtgtcgcccggcacgtcgttccactgcaacgagcccggctggttccgcgtctgctacgccaacatggacgacgacaccatggaggtcgcgctcgaccggatccgccgcttcgtgcgccagcaccagcacagcaaggccaaggccgagcgctgggcggccacgcggccccttcgcctcagcttgccgcgccggggagcaaccaccgcttcgcatctcgccatctccagccccttggcgttgctgtcgccgcagtccccgatggtccacgccagctaggtagtcaccgagcgttcggtaagactggctgtaggttgtgccctcacatgactgcaaacaagtggacaaaaaaaaagacaagactaataaagggcgtacgtagctagcttgacattacacagagtgacagagacgttgcacaggcgtcagcaggcgtcggcggtaagcagctagtcaagtaggacgcatttgtcctcgattttttcgtgttttttttttgacgaaggggcgaagccccctatttcattaagaaataggaaagtatgaaacaaccgcacccacgcggtaggacctccaaaaagaacagccacggccagaaagttatctagactctaaacactatcgctagatcagtgaagagactatgataacagggaaagttttggcctacgaagagctacataagactttct

SEQ ID NO: 39083 - DNA, 440 bp, Zea Mays
gtggaggccactaaggccctaggcgctgagcgcgagcacctggcggctgtcgtggggtcattcggtcgatcgtcaacgtcaggatcccaggcgatgttgccaccatagtggccgccaccgctacaggtggatcctgtttcccaccaagtcaaggtttgtgaattcgggagtgctagaatcttgatcttccacaagagaatgcctccagaagcaatggatacgcttctagaaaaagataaagtgccaaatccatgctatagagtatagactgaggattcaacactggcatgattctaattgaacttctgaggatccagagcagagcattttgataataccaaaaatgtcatggtgtaccaaaggagggcatgccaatggctgtgaaagctaaccataggagacctcatgccttgtcttgggaggtctgttttctcactagg

SEQ ID NO: 39084 - DNA, 368 bp, Zea Mays
aaaaaccagctgtaaatcttcgatgaagttttcctaattctctgttttaatcaccacgtcatctacgtaagcctccacacgcttgccccagtgatcggctaagcatgtttgaatggctctctgataagtcgctccagcgtttttgaggccgaacggcatggaggtataacaaaaagcaccaaacggggtgatgaacgccattttttcctcgtcttcctttgccaaactaatctgatgatacccggaatagcaatctaagaaagacagcacagaacatccagcggtggaatccaccacttgatctatcctcgggagcccgaagggatccttcagacagtgtttgttgagatcagtatagtcgacgcaca

SEQ ID NO: 39085 - DNA, 2598 bp, Zea Mays
ttcggcttctttctgctcttcccgagcgtgaaaggaaaccgagaccaccatacccccccgctccgctgctccggaaccctcgccgtgaggtcaccgccgatggccggggactcgtccccttccccggcctccgcacctgtccaggtgcgctgcgctggttgccgtagcatcctcgctgtcggcctcggtgtaactgaattcatctgccccaagtgccgcatggcgcagcgcctcccgccacagctcatggccaagtccacctcgccctcgtcgcctctgcccaaagccccctcgaagccttctctgcctcctacgcagccccggatgggtgcgccgtcggctcagggggtggaccccacgaagatccagctcccctgtgcgggctgccaggccgtcctcaacgtgccccacggtctcgcccgcttccgctgtccgcagtgtggcgtcgaccttgccgtggaccacgccaagctacaaaacttcctcgccgcctccaacagcgccacgtcatcaggccatgccccgacctcggtgaggacgcagccgcctctggcgacattcctctccgtgttgccgctgcagctagtgcctggtgcaacaatttccatggtgctgcctgccgctgaaccacatgaggagatcaatgaggttgccattgatgttgagcgtgatgaagatgaaggtggcactgttggagaaacttttactgactataggccttccaagctatcacttggtctatctcatccagatccagttgtagaaacttcttctctgtcagctgtacaacctcctgaaccaacttactgcttgaatatcatggacgaattagatgagacaaatgcattgtcttgtttgcaaattgaaacaatagtttatgcttgtcaggttttttcattggtgatggggctggcgttggtaagggccgaacaattgctgggttaatctgggaaaattggcagcagggaaggcataaagcagtgtgggtatctgttggttctgacttaaagtatgatgctcgaagagatttggatgatgttggtgctaagtgtgtccaagtgcaccctttaaataagttaccttattctaagctagattcgaaggccattggaattaagaatggagtaatttttgtaacttatagtagcctaatagcatcgtctgagagaggccgctcccgtttgcagcaattggttcaatggtgtgggcaagagtttgatggtcttcttgtatttgatgagtgccacaaggccaaaaatctgattcctgatgccggaagccagcccactcgcactggtaaaacagttcttgagatccaggaaaagttgcacgaggctcgggttgtttactgttcagcaactggtgcatcagaaccacgaaatttgggctatatggttcgtcttggactttggggtgaaggaacatcatttcaaacttttccacaatttttaggtgctcttgagaaaggtggtgtgggagcacttgaacttgttgccatggacatgaaagctaggggtatgtatgtatgccgtacattaagttacaaaggggctgatttttatatagtggaggctccacttgaggaaagaatgatgaacatgtacagaagagcagctgaattctgggctgaactgcgccttgaacttttatcagcaagtgaattatttgctgatggcaattcaaatcaaatatggcgattgtattgggccagccatcagcgtttcttcaggcacatgtgcatgtctgcaaaggtacctgctgttgtgaggttagctaaagaggccttggcagagaacaaatgtgtggtgattggccttcagagcactggagaagctagaactgaagaagctgtcacaaaatatggagttgaaatggaagactttgtttctggccctcgggagcttcttcttaagttggtagaagaaaactaccctttacctccaaaacctgattcttttcagcaaggtgaagaaacagtcacagagattcagcgtaaacgtgcactggatgtatcatttaaagggcgagttaggaaagtagcgaaagtggtagatgtgagcgatgacgacaccgatgattattctccatctgagtcagatcatgaatcaacagaatctgatgaggagttccacatgtgtcaaatttgcaacacagaggaggagcagagcctgttgcttcattgttctggttgttctcggcatgttcaccctcattgtctaacaccaccatggactgggacgattacggatgattgggcatgctacacgtgcaagatagtagaagacgaggaaaagaagcaagatgcccatgtagctgattgtttaaagagaatttcactcctcatgtctatgaagagaataccatgctctggtggaaaagatgtagtgatcagttgcatggaattgccagaaaaggactaaactcgcttatcagtctcagcctctggatattgtggaaacactgaaacgtctgtgtttttgacggccttgctccctgccttaatgaagccatcaagagaactgacgaggaaagggacctgtgggtgttaggaggggctacaaacttagatctcttaacagccccatcccaggtcttagg

SEQ ID NO: 39086 - DNA, 260 bp, Zea Mays
ggcgagtgtttagtttaggagaacaaatacgcatggtgcaggctggggtggattcttaaccgaagattcctcgtgcgtccttgtgcctcctgacttgggtgtttccgcagggacattctcgacgtctccgtggaaccgtggattagctttaatacattgctgtctcgcataatccatcatataccaacgccggcgatggcagcaacaagtggcaagcaatgctccaatgaaatgtcgcgctctcgagcactgtttcagtg

SEQ ID NO: 39087 - DNA, 2236 bp, Zea Mays
ccgctcccgctccttcccgttgtctcgtaagctgcgaggaatccccagctcgtcttgccccggttgttttgtatctcctcgtcggacccagcgttccagtcgagcatggcttcgattccgcctccgtcttcctccgtcgctgccctcacccgccaaccggcccagttcttgaaatggtgcagtgtatccaaggagacaaaggcatcggtctgcagtttcttggctacaaattcaaacagcactagggtgaaatcagtgggcttgagagtagcattatccttcaaaaatgatggtggttatccagctgacggtttctctgggaatggcaacacgctattgccaaaaagcacatccgttcgtggcgaggaccatccggttgctgatcctgtactcccaatggattcaatgatgacgccagaaatcctctctgctaatttggcacttgttatggacaagttctcagatgatgacacagatactgaacttgatttggatagcccgacagagggcttcgcgtcgattccagatgccattgaggacgtacggcaaggaaaacgggctatcaccgcccactctgcaacgggtcagccagtgggtggcacgcgggacgtaacctaggagcgggcaggatacaacgaggcgatttttttaaccaagtcagaaattcgtcccagatgggatcgaacacgggatctaaacgtgctactccttgtgattgttgttgatgacgaatcaagggaaaatgaaggagatctgataatggctgcctccttggttaccccagaggcgatggcttttatagtaaggcatggaacaggaattgtttgtgtcagcatgaaagaagatgatctggaaagactgagccttcctttgatggttaccacaaaagaaaacgaggagaagctatgcactgcttttactgttacagtggatgcaaaagagggcacaactactggagtatctgccaaagacagggcaaaaacagttatgactcttgcatctcctgactctaggcctgaggacttcaaccgccctggtcatattttccctttgaaatacagagaagggggtgttctgaaacgagctggacacacagaggcatcggttgaccttgccatgctggctggattacctcctgttgctgtcctttgtgagattgtggatgatgcagatggttccatggctcgcctgccaaagttgcgtgtctttgctgaaagggaaaatttgaagattatatctattgctgacttgattaggtataggaggaaaagagacaggctagttgaacgtgcttctgttgcacgcttgccttcgcaatggggcaatggccatggatattgctacagatctgctattgatggcatcgagcatcttgccatggtgaaaggtgatattggtgacggccaagacattttggtgagggtgcactctgagtgcctcacaggcgacatttttagatccgcaagatgcgattgcggtgaccagcttgcaatggcaattgagatgattgagaaggccggaagaggcgtaatagtttatctccgtggacacgaaggacggggtatcggtctgggccacaagcttcgtgcttataacttgcaggatgatgggcgtgatactgtggaagctaatgaagaacttggtcttcctgtggactcacgagaatatgggattggcgcacagatactacgggacctaggagtccgttcgatgaagctgatgactaatagccctgcgaaatatagtggtctgaaaggttatggactgagcattgcgggcagggtgcccttggttacgccaattaccagcgagaacccccaaatactgtgtcccatccgtgaacatggaagagccaccgaagacggagaggaacttgtcaagcaaggatacatacccgacttgggcattttggtcttcagttgcggtcgttgcacgagctgctagaggtgtttgtcatcgttgtaacatcagcgtggtccaacatcttccgtatgttcgcaaacattcctccaagccatgaagaggtgctttgttgatcaatctagatgaggaggacgaggtcaactttgtgaaggtacaaatggagaatgtaacacccctggtgttatgtgaactaaaacattggcatgccatcatatgtactggcattatattgctcgtgttacacttagaatgcatccactagactaaaatttcaaaaaaatatgtgatgtgatacttggttgggtatagggta

SEQ ID NO: 39088 - DNA, 1786 bp, Zea Mays
aaatttttcactggtttgaaaacttaaattcccttcgatcttgatcttggttggggaaaaaaaccccggcctgccaccctacttcatcctcgagtcgacttgtgcgccgccattctccgtcgccgcggtctcgcgggcccgccgccgtcctagccgccctgtccccgccctctccgtctcgcgccccacgcggcccttgtccatcttttccgtcgccggctcgtgcggtccgacgcctgccaccggttcctcctctcgagaaaggcggcggcgcccgagagagcttctttgagggaggataaggcggcgcggagcgtctctgagcggctcaggcccctccggcgctgagctttcctccggcgttgtgtgtgcctgagttgttgactcccaattgaagcgtggtcaaattacctcggctccggtatgggttggagctctttatgggttgctaaagcgtttagagtgtggctctaggcgtggattttcaccaatggcaatcgagtgcctcgtgctaggggcggggcaggaggtgggtaagagctgcgtggtggtgaccatcggcgggaagcgcgtcatgttcgactgcggcatgcacatgggctaccacgacgaccgccactacccggactttgcgcgcgcgctcgctgcctggggggcgcccgacttcaccaccgctatctcctgcgtggtcatcacgcatttccacatggatcatatcggggcactgccctacttcaccgaggtttgcggctaccacggccccatctacatgacgtatccaacaaaggctttagctccatttatgctcgaggattatcggaaagtaacgatgggtcagagaggtgaggaaaagcaatatagctacgaagatattcttaggtgtatgaagaaagtcacaccaatggacttgaagcagactgttcaagtagataaagaccttgtgatccgtgcctattatgctggacatgttataggggctgccatgatttatgcaaaagttggggatgctgctatggtatacactggggattacaatatgacaccagatagacatcttggggccgcacagattgatcgtctgaagttggatgtattgataacagagtccacatatgctaaatctatacgtgactcaaagcctgcccgagagagggagtttttaaaagcggtacataaatgtgtttctggtggaggtaaagttctaattccaacgtttgctctgggaagagctcaggaactatgtatgttactggatgactattgggagaggatgggcttgaaagttcctatttatttttcagctggtttaaccattcaagctaatgtgtactacaaaatgttgattgggtggactagtcaaaagatcaaggacagccatacagtgcataatccatttgacttcaagcatgtttgccactttgaacgttccttcattaacaaccctggtccctgtgtactttttgcaacacctggtatgattactgggggattttcccttgaggcgtttaaaaaatgggcaccatcagagaagaatctggttacacttccaggatattgtgtttctggaaccattggtcataagttgatgtgtgggaaacctacaagggttgattacgaggacactcatattgatgtcagatgtcaggcaatcagtattgactggtcggagtcagtactgactatctatagtgcacggtcgatacccagtggcgaagacaccagaggggccggggtgggcctggcacccccaacgacccaactaaggtataccactaatgtattctag

SEQ ID NO: 39089 - DNA, 1963 bp, Zea Mays
taaaccacatttctgaactggcatcagactcacatcactagtaacgcccccggcccccgctcgctcgcactcgcaggtcgcaccacactccgtccccctccataactcccacccgcgcgcatgggcgatccgcgggcccgcacgtccgccgtggccgccggcgagctgcggccaccggagccggcgctcgacccgctcgagttcctctcccgctcctggagcgcctccgggcgcgcgctcgcgcccacgccgccgccgccgccggccgcattcgcggccagccccatcgcggaggacgccgcgtgcgagctggacgacgggggcgtcgtcgccgccgcgtccgggagctccttctccttcgcgtccgcggccacgtcgcagctcatcatggaacggatcctcgcgcagtcccaggaagtggcgccgctcacctccggccggctctcgcacagcagcgggcccctcaacggcggcggctccctctccgacagcccgccggtctcgccggagatcgatgacgccaaggctacgggttttacactaacattgtgcaagtattggctgatgagctgcacctgcacctttcttcaatcatccactacttaaaaaccctttactgcagagcggccagcacgccgaaggcgcaggcataccgggcgggcaacaagacggtggggcggtggctcaaggaccggagggagaagaggaaagaggagacgcgggcgcacaacgcgcaggtccacgcggcggtgtccgtggcggcagtggcggcggcggtggccgccgtggccgcggccacggccacggcctcggcgtccggtggcaaggacgagcgcgccgcgcgcacggacatggccgtggcgtcggccgcgacgctggtggccgcgcagtgcgtggaggcggccgaggccatgggcgccgagcgggagcacctggaggccgccgtcgggtcggccgtgagcgtccggacgccgggggacatcgtcaccgtcaccgccgccgccgccaccgcgttgagaggcgccgcgacgctgaaggcgagggctctcaaggaggtgtggaacatcgcggcggtgatcccggtggagaagggcccgggcccggtcggcggaggaggaggaggccaccaccaccaacaccaccagaagcacggcgcgcccaagcagcagctgcaccgcaagatggatagcgacggcagcagcgtcagcgacctctcgctggaggaggagaacagcttccttggcatctgcagccaggagctgcttgctcgcggcaccgaactcctcaaacgcacccggaaaggcgctctgcactggaaggtcgtgtcggtgtacatcaaccggatgggcctggtgatgctgaagacgaagagccggcacgtggcagggacgatcacgaagaagaagaaaagtgtggtggtcgaggtgtgcagggacgtgccggcgtggcccgggcggcacctgctggaggacggcgggcaccggcggtacttcggcctgcgcacggcggagcggcgggtggtcgagttcgagtgccgcagccagcgggagtacgagatgtggaccaagggcgtggcgcggctcctgagcgtggccgccgagcggaagcgcctggcgtgacagattgcgtgcaggtgcagccccgtgccgcacaggaattatgtaggtaggtatgctagggcacgaccgcacgaggttggattggatttgtggcggtgtggttttttgtacgggctgggatgcgacgccggcgcgtggaacgccatgccatgcccttgtgggtgtgagaaggcgcttgctacgctgagctgagctctgaccttgttctggctctctctctttctctttcttgtaagttttgcgtctactctctctctctctctcgttgggccatactacactgtagctggcgaaagataaatgctttgttctggtggtagtagtaactctgtctttgaccggac

SEQ ID NO: 39090 - DNA, 3853 bp, Zea Mays
atgagctcggggaccgtcgcggcctcggaccctgggggtggcgagacgaagctggtggcgggagatgacgtcacaatatcggaagctgcgggcgatatgcctgcgttcgccgccgatttgaaagtggaggagaaggctacgttgacgatggatgtggctcatgaaaggggagatatggcggtgagcgacccactctacgcgactgagtcggctgggatggttggtaccgaagggcacggagatgagcccgtggaggacgtggatgcggtgaacggagaggacggtggcgaggaggggacgcaagaagcaggagctggtggtctgctgactgagacggagaggaagccggttctagtggtagatgtgcctgctgctgctggttctgccgctcctgaacatgctgaagccggagagcagtttcctgacagtggaaatagcccagacagcaacttagaggctgctagtctggggaatgttgatcagggtgctagataccgcctcccacctcttgataaaggcaggtttcaagttgctgatcttgtctggggtaaagtgaaaagtcatccttggtggcctggtgaaatttttgatccaacagatgcatctgaattggcgctgaagcatcggaaaaagggcagccacttggtagcttattttggtgacagtacttttgcatggtgcgatgaatcccagttgaagccttttgtaacaaattattcacaaatggagaagcagagcagttcagatggctttgttgggtcagttaataatgcacttgaagaactgtcaaggcgggtactgtcaggtttgagctgctcttgtttggcagaagagcttgctgataatggtatgtcatatacggttgataatgctgggctcaaggatggagttacttgttctgcagttaatcggcctgagatcttgaactgtttcagtccagaaaaccttcttaattatattaaggagttagctctatttcctggccagggaggtgatctattggagttagtgatagcgtgttctcaacttacatctttctatcgatctaagggatgtcctgaacttgcatcatttcaaactagtgatgcgtgggttgaggatgatctggatggtatagacactttgtccacccagaatgtaatggtggaggaacctgtgattaacgaagtgcagcctactcaagataagcccaaaaggggcagggggagacctcggaaacaaaaggctggtcatgaccaggtggtgatggagaaaaggagcacatctaatcaggtcaatgatactagctacaatgagaagaaaagaaacctcaaatcatttgaagattcagagaagtcatcagctccaactggtggtggttctttcaagattggtgagtgtattcggcgagctgcaagccagctgacaggatcttcatctattatgaaggctcagaatgaaccaacagtctataataacgctgctgaaggagagaatggggaatttgatgtctctagtgatgatgctggtgatgaacttactgtggagaaacgagcaaaaaggaggcgtctgcacataaatcacgctgcagatcccagggaattactgtcacaactatgcttggttgcaacagagccaatgaatggatatagtttctcagcaatgataatcggttacttcaacgattacagaaactatattgtttctactactactgaagcaaacattgttgataaaggtacatctagaagagggaggaagagaaaagaagttataccttctcctgaggtagagacaacggatcatatgcaggactcgtattggtccggattgagcttgtataatcacccagttcatgacctaaaaagagagagtccgactacaaggccaagacggaaacggagatcctcaagacatgcatatatacctttgtcggaacttggggagccggttcctaaaaaacagatacaagtgatggaaagatctatcatccatgtcgatgagaagatggttgatgagttgaagcccactgcacttgttttgacctttggcaggtcagcgtctattccttcagaactggatcttgttaagatgttcagtctctatggtccactgaaagaaagggggacaaaagtacatagggaaacaaatactgttaaggttgtcttcaagaaacgtgtcgatgctgaaagggcttttagtgctgcaggcaagtatagcacttttggaccttcgcttcgaagttaccgtcttgtcagtatgccactttctccagagacacaatcagcaaataatcctgaaaatcatggcttggagattccaggtttgaatatgtccgaagctcctaaggattccatggaagttgacctggtgcagaaaacagataaagtaaaagttacaggagaactgtcatctgaagaagttgagactgtaaggcaaacatgtctagtggaagctgcagacagtacatttgtcagtgaagttgacaggcttgagaaagcaggaaatattgatgctgagctaattgtccatgtgaatcagattggggaaggtgcagaagctgcatctgtatctgaagagtcatctcagcaagtgggtgacattgagcaagcttacactcaaaaggcagcgtcagtcagtgatctacccacagagatagaaaccttacattctgatgctataataaaagagttgcctcagaaggctccagataatatgcaaactgatatagccacggccccaaaacagagtcacaatccaggagataatgctgtatttgaagctgtcactgaagtgccaagtactgcacaagatcatagtgaggatgatgttggggatgaagttccagaagagcacactgtatttcctgtgttacaaagtcaaacccctggtgagaagctagtggggcaatctgaaactgaacaaaaagtgggacctgaagatccaaagtcacaagctgaaaatttgactgttgaacctgtcgtacaaggtgcagtcgagcaagtagaaattgaactggaatccaaaactactgttgaagtgtcatgcgaacaaggctatagtattgagcagactgttaacatggaagctgtaattgaagcatcaggtggacaacttgaggtgggaagacgaatttcagaagatgaatctatggctgatgcaaatattgagcactctatggtcatggttgatgaaactgtggaggcaaaagtagtaccactcgaggagagtacagagaataatgctgctaccataggagtagttgaggagacagctgaaggtgaaactaaggaggaagcaccagacgagaaggggaaaatagaaaataatgaagatgctgacaaattagctggagagaccagggcaggtgaaattacagttgaggcaccagatgagaaaacagaaattaaagcagatgctgacacaccagctggtgagaccaaagaatgtgaaattacagtagaggcaccagatgagaaaatagcaaacaaaggtattgttgaaccaataatcagggagataactgaagatcaaactgcagctggagaaccagatgaagaagctacaacaactgaggaaacggtagaggatgttaaggtgctagatgataagtctacagcagatgggaaacctgtagagaatgccacagtcgcgacaaatgaggattcaacaacagttgagaatactctgaaggatgcaatggttgcgccaccaggtacaaataccaccaacgccgaagaaactgctctgggtgccacagttaaagcactagatgaggatgctctagcagtggagaagactatagaggatacctcggttgaggcatcagatgtacaagcaggcaggtgcaattccgtctatcataatgttttca

SEQ ID NO: 39091 - DNA, 2584 bp, Zea Mays
cgtcctgcggtggggcgccccttcttccgcgagcgtagggcgacggtcccaccgcggagtagaagaacaatttaggtcgcgacatacacacatatacacacgcgcacaggcacagccggactcggtttcgactttcgagctacagagaattcgtcccggaaaagaaaaaaaaatcacccttccatccgccagagagagagagagaggagtgggaggaccggaggaggagttcaggagggagaggtcggcggcggcgcggcagatcgggtagcaccgtgcagctcgggccttaggcgcaccagcggtggggggatccgcgcgcccatgcgccggtgaggtggtggggcccgcttggcgctcgagttggaatggcggcgtcggcgtcggctgggaggtggtgggcggtggtccttgcggtcgcggtgctgctcgggccgggacgggtcgtcgccaacaccgagggtgatgccctgtacagcctgcgtcagagcttgaaagatgctaacaatgtcttgcagagttgggatcccactcttgttaatccatgtacatggttccatgttacgtgtaacaacgataacagtgttatcagagttgaccttggaaatgcacaattatctggcgttctagtgccacaacttggccagctgaaaaatctccaatatttggagctttacagcaacaacataagtgggacaataccccctgaactggggaacctgactaacctggtcagtttggatctgtatatgaacaacttctctggcaatatccctgacagcctggggaatctagtgaagctgcgtttcctgatagacgtcttaacaacaatagcttggttggtccgattcccgtatccttgaccaatatctccactctccaagtactggatctctcgaacaacaacctctcaggacaagtcccatcgactggctccttttcactcttcacccctataagttttgccaacaatccaaatctttgtggccctggtacttcgaagccctgccctggggctcctcccttttccccacctcctccattcaatcctccatctcccccaactcaatctactggtgcttctagcactggagcaatagctggaggtgttgctgctggtgcagcattggtgtttgctgttcctgcaattgcatttgcaatgtggcgccgtcgtaaacctgaagagcatttcttcgatgttcctgccgaggaggatccagaagtccatcttggtcagctcaaaaagttttcattgcgggagcttcaagttgcaactgataatttcagtaacaagaacattttaggaagaggcggttttggaaaagtgtacaaaggaaggcttgctgatggctcattggtagcagtgaaaagactaaaagaggagcgtacacctggtggtgagcttcagttccaaacagaggttgagatgattagcatggcggtgcacaagaaccttctccgacttcgtggtttctgcatgacacctactgaaaggttgttagtctacccatacatggctaacgggagtgtggcatcacgtttacgagagcggcagccatctgagccacctcttagctgggaaccaagaagacggattgcactgggatctgcaagaggactttcttacttgcatgatcactgcgatcccaaaatcatccatcgggatgtcaaagctgcaaatattcttttggatgaggacttcgaggcagttgtgggtgatttcgggcttgccaagcttatggactacaaggatacccatgtcacaacagctgttcgtggaacaattgggcacattgctcccgagtacctatctaccggcaagtcttctgagaagactgatgtttttggctatgggatcatgcttctggagcttattactggccagagggcatttgatctagctcgtcttgcaaatgatgacgatgttatgcttcttgactgggtgaaaggactgttgaaggagaagaaggtggagatgctggtggacccagatctgcagaaagcctacgaggaggtcgaggtggagagccttattcaggtggcactcctctgcacgcagggctcccccctggaccgtccaaagatgtcggaggtggtgaggatgctcgaaggtgacgggctggcagagcgttgggacgaatggcagaaagtagaggtggtgaggcaggaggctgagtcggcaccgctccgcaatgactggatcgtcgattccacgtacaaccttcgtgccgtggagctgtccggcccaaggtagccactccacgactccgatgaaagaaaacactgaattggccaagattcagtctaattgctgcttgtgtatatgaaaggtagcttttggaattgttagcgacaatttgaaaggatcgatcttttttttttggattcctcgctagctcagatgttggttacgctgaggttgtgttaaggtgaaaattcgtatatctaagggtgaatttctaaagcattcttgcaatagtccagcagcgaatgtagcagctattgtactacgtggtatgcagaaccgtgttacgttttgccatagcttagttctggttcagctttctaagccacggtcaaaagt

SEQ ID NO: 39092 - DNA, 2255 bp, Zea Mays
gcgctaggtcccccgcctctcatttcccccctcctcccgctccccttggctccccaagcctcgacgcccggctagggttttgcctccttcccgccgccgctgtttcagcgagcgagaccgagtggtagagaaagagcggtgcttagccacccatgtcgctgcgtccgagcgagcgggtcgaggtacggcggaaccgctacaaggtggcggttgacgcggaggaggggcggcggcggcgcgaggacaatatggtggagatccgcaagagccgccgtgaggagagcctcctcaagaggcgccgtgaggggctccaggcccaggtccctgcccctccctccggggttgagaagaagcttgaaagcctcccagctatggttagtggggtttattcggatgataataaccttcagcttgaggccaccacacagttccgcaaattgctctctatagagaggagtctcccccatcgaagaagttatcaaaacaggtgtagttccaagatttgtgcagtctctcaccagagaggatttcccccagctgcagaaaatacaaaggctgttattgaccatggggctgttcctatatttgtgaagcttcttgggtctggtagtgatgatgttcgtgagcaggctgtgtgggctttgggtaatgttgctggcgattctccgaagtgccgcgaccttgttctcgccaatggtgcgttgatgcctctgctagcccagttgaatgagcatgttaagctctccatgctgcggaatgccacctggactttgtctaacttctgcaggggaaaaccacagccatcatttgatcagactaagcctgctctgccagcacttgcacgacttatccattccaacgacgaggaagttctcactgatgcatgctgggccctgtcatacttatctgacggcactaatgataagatccaggctgtgattgaagctggtgtttgcccccggctcgtggagcttctcctccatccatcaccatcggtgcttatacctgctctacgaactgttgggaatattgtcactggagatgatttgcaaactcagtgtattattgatcatcaagctcttccccgcctcctgaatctgttgacgcagaaccacaagaaaagcattaagaaagaggcatgctggactatttcaaatattactgctggaaacaaagatcagatacaggctgtcataagtgccggtatcatcgctcctttgttgcaactgcttcaaacagcagagtttgatatcaagaaggaggctgcttgggccatctcaaatgctacctctggtggttctcatgagcaaatcaagtacttggtgtctgagggctgcatcaagccattgtgtgaccttcttgtctgccctgatccgagaattgtaacagtttgtctggagggtctggagaatattcttaaagtagggcagcatgacaagaccatgggtgcaacaggtgacactaatgtcttagctcagatgatcgatgaagcggaaggcctggaaaagatcgagaacctacagagccacgataacaatgaaatctatgaaaaggctgtgaagcttcttgagacatactggatggaggaggaagatgacgcaatggctactgccggggaagctgctcctgctgtttttgactttaaccaaggtggcaaccctcctgctgctggtggtctgaacttcaactgatacagtctttgatcgaaagggtgttaattccctcagtgatgggcttggcattggcttgtcgtgacaaatgtagtctggtcgactccacgtgggatataatggtttgtggtgagtccaataaactcaagatttcgaagggagatgggctgagcattatattcccaagtgaaccatggctatcaatatcgcagggtctgtaacaaggattatataatcgtcgaacattagagcgtgggttcttgagaacgctactctaggttgtgcgtcgtttaattatatctggctactgtaaggcattcctgattggtttggttttttaagttcctcgggaatggtctgcgttgcaggttgtccggagtgggtaaacctgagtgggaacatttgagcatattgctcggccttgttttactacggtcgaggctaaattgatttctaaaagctgtttgcttctgcattgttggcgggaaaataaggcgaatgttttgatgccaaattcaatttcgagttaagaggcagatacaaggcccttcacaacgcaaatcttaccaatttcttctcaacagt

SEQ ID NO: 39093 - DNA, 2169 bp, Zea Mays
cccgcggtacgtgccctccttctcgcgctcctaaacaatcgcccgacatcctccccttccattctaggctccgtgtctcgctgtccccactacgtctcctccggctccatctcatcccgctgccgctccttctcatcgtcgtcgtcccagtcccggagtcgctcccctcctctggctaagcgcaggtcaagctacattccgtgctattcaaaggccccaaggatgacggtaagatttgcaactccctgtctgtctgggtctgtgagctaacggacttgtgccaaattgttagtttatatgttcaaagtagatagaagtactactttcctatgagttagtttcagcaacaaggatgtggaagtaaaccaactgctgctctaacggttacatgcagaattgcagaccatgagttcaaccccatcttttcacatggcactcatcagactctttatggaatagttaacattagtgttattaagaacaaaagttagattcataattaagtgagtctataattttgatgtccatataaaggagcactcatgtactagcgttgaatagatatttagctgaaatgcatatttatgtaataaatgtcagcaatggcaatgactatctaccaatggacatcgtggagctatcttccgatcatttgatagagaataaacctttgctgctaaaggatgtcaagttctaaaacgtacacgggcttaccagtgcttatggacctttgtttgttcgggacactacctttgctaatggggaacaggtaagcggtaggctatatatcttgtttctcttttgaaataatgcaaaatactcttacatctttacataagctttaatgttgattgttgcagatttttttggtccagggttaattatattttattttgttaatataattagaaatgatcacaataagggagctacatttgagttatttgagttgtagggtgcgttcaggagactatagggtcgtgggtgtaagatatggtttagagaatgtgtctactggaacatcctttgtaccaattccctgtatacatctatctatcgttaaaacaccttctattggaacatattttcactatacatacacttatgagtaaggtatttagctcaaatttatctatacaatatccttttgtattcctaaatagcctgccgaaagaagaagatagccacaattatgcatgaaagctccgtttctacgattgtataccgtcacaacgtacgggtattggactagtttgtatagaaaagagagaagggaaaatctgaattttcttgcctctacatgtccatctccaacaaagcaacaactacaacccaaaaataatgtattatatatatatatttaaaactgctacttttagctacctctacagatctgctaaaaatgcttgaatgaaggcattattagtctataattttttagatagccaacatctgctaaatcctatgtattcgacattgtgtgtcctaatctccccttataaaaaataactgcatgactgcattctcaatgtaacactttttttttacagataaatttcaattactatacttatagaaaataaacaaggtccaacgttgtttgctttccatttcccttctactttgatattatgtgatttggtttattcatattactgtccatagcatatttgttgtggacacagttataaattcgttttctcgacactgcacaggcaaggggaaaatcttcttatagatctgttccgtcactgtgacaatcatttgggagagaaacaaaaaactccatctggaagtgcacgacagccactacagttgactaacgatgtaaccaagatgatgcaaaagcatcagctagaaacgccacagttccatcagacccgattttccgttttacagaatatgtcatttccatccttaagacaaacaagaactacaggctgcttccgtcttcacccaatcagggatgaggatgccaagttcaagctctgcaacaggaggtctgttcagtttgacgtcggcaacatggtcatggtgaccggcgggaggaacactgggcgtgtaggagtgatcaagaactgggagaagcacaagggcatcttcgaggaaaacatagaatggaattcaaatttggtggtcgtaaaagtgtggagacttgaattcaaataa

SEQ ID NO: 39094 - DNA, 3677 bp, Zea Mays
tatcctccgcctgtttcgctctctgcgctccaactcaacgcggcccccacccccaccgccgcggcgccgcttgcgccagtgccccctcctcgctttccgctttcatccgggccccactcgccgcttcggtctgagctcggccaaccatcggccatcgccagtgccgctgccgtatccgtcgagtaatgcagcctcccggcccgcctctggcgacgccgcagccgctgccgccggcggtggcggcggagctcgcgcagcttgagtcgaggctgggccaggtcgccggagagcccgcgcgccacgagctcgcggagctaggcgaagtcgccgcggttcgcgtgctacgtaggatcgcgaggtctcaagagcaggtccggacgctcactggctacatcgtctcggctgcggtgcaggagacgttcgcgctcaatgcgcaggccgtccccaccgccgagagccgcgcctgcaactcctccgctccttccctaagtgatggatctgtacaagggccgcagtgcgccagtgaacttcgaatggaagaagtaactgcgggcctctcaaactatcgcatggcaatatgcgagggtcaaggtcaggaggatcatgcagtgatgatggcaattgacaacccacctgactgcatccccccctggggttgggaccaagattgcattgaagttgataaccttgtgccaggaattgcttctcaggcaaaccagatgcctatgcagtatggcgaccgcgaccgtatccaagaactagtttctattgtaccacatggtgttcgtatgctggctgaaagtcttgaaaatggcagagcatctgagttgcagaactatgtacaaaatggcattcccgaacagtggatggttccagcagatcaaagaatggaatccacctcgagccgcctgcaacatgttttaaaatgtcttcagggagttggaccctttggacaccatctcggtccggaatgtgcaataatgataccaaagcctgagccaaatgttgttgtcgaaaatttgttcagggagatagcaagccctcatatcacagacaacaaattgaggaatacagcgagccctcagatgtgtgcgttggaggatttagagttcagcaagagatttttgatactctcttatctttgtcggaataacctggaagatgaagttgtactgactgtggactatattaaatcgttgaagtttctgtccatggttcattttgagtcccaaatttggaggaaatttggtcagaagaattttcaggcatccaatagagctgcaacagatagggcaaagaatttcgattcagacccaactacaacaaaattataccattgcaatatcgagataagaggggagtccatattctttgttttgaaggggccatatatggagaataagaggacttatctacaaaaagttcttggtgatgataatgttcttctagtaaagtttatggtttcttcagacaagagcactgatttctaccgccaacattaccatagggttgttgaagatggtattgttttgggtctgcgacgatataattttttcggatttttctttggaagttttggaggatgcatgagaaatggtcctcttgtcagggatctgaaacattggagttgcatgcaaatattaagttattggggattcctaacaggctgataaaagcagcagacttcttaatttatctgcattttgctgtgctgcagcagttcttggacttctagttttcagattgattccattggtcttcttccacagtttacaaggatccaggaaaagagacgaaaaagaaagacagtgaacagggggatatcaagaaatgcacttcgcctgtttcatttgatactttccaaaactctaacactggatgttgatttatcgacaattgacgttatactgattgatgatgaaccttgtcgggacgagcatgggaacattgttatgctagatgggaagcgtttgatccatactgatgggactggcttcatatctgaaaatttggctaagaaatgccctagcagaataatcaaaggaaagaagtcaaaagtttatatgcatcaaggtgaaacaacgcctcttctcatgcaggtccgtcttttttataatggatatgctgtaaagggaactctgctagttgacaaaaggattagtaataatactattgtgatccgaccatcaatggtaaaagtaaaagctgacccaaagttgtgccggatgaagtctctgagttctttggaaatagtttccacaagttgcatatggatatgctaatatggaggattcaatgttagaacgcatgattcattctggaattccactagaagaaccatacttgctatctaggctgagttttatggccaaacaggaaatgaaagtattcagagaaggaaagctaccaattgatgaatgctattatttgatgggtacaacagatcctacaggaacgctgaaaccaaatgaagtttgtgtgatacttgacagcggacaatactctggagatgttcttgtgtttaaacatcctgggctacattttggcgatatacatatcttaactgcaaggcaaattgatggactagagaagaattttattggatattcaaaaaatgcaatactttttcctacttctggacaaagatcattggctgatgagatggccaatagtgattttgatggtgacgagttctgggtctcaagaaacaatatgttacacaaaaggtttagcgcctgactgttggttagcacatatggaccgattattaacagaaggagtcgatcaagatgagaagaagtcaatcgtggaaaacatgattaaattagttgacctttattatgcggctctggatgggcacaaggtagatgttgatcgccatctgagagtaaaagcatatccacacttcatggagaagaaaggatttgaatcctaccattcttcatctattttgggcagaatctacgatgagactgaggaaataatagcgcagcaatgtgacgaacagatccagataacgacactgccgtgcttcagtgaggtggaggcaaccccggaatgcacctccctatgggaacaccggtaccaggagtacttgacaaagagcaggggccttttcgatctgggcaaggaagaaaagaacgacgagttccagaaactctaccaacactacaaacatctgctatacgacgccgacgaactggaggagacctcgcgggacctctcagacgtgttcatggaggcctgcgcgatatacaggatcgtgtacgagcgagcatggtgtaccaggagcgtcagcaggtgccgtttcgtgtggaacgtggctggagcggcgctgtgccacctccacgcgaccaagtacgcggcgcagcgcggggagaaaaccgcgctctgcccgctctcagttatccgccagctttacatctgatatatatattttttttttggtaaagcagctgatttctgcctgtaaaatgaaacgggtgagctgatgcgtcttaagagaagtatatactggggctctcgatcaacttagtcaagagcttcacagttgctttgatttgatgaggttaatatagaattgctttcttgtacgtcaccagccttcaatcttaaagactcgttcgcatcttttgatacacagaagttgtgtaggtttgccgattttttttatctaa

SEQ ID NO: 39095 - DNA, 847 bp, Zea Mays
gcagtaataataattattagtctaattcccttgtcgttgcacagctttacctgctggcagaagttcaacattgccattgaccaatgacctctaagctgtgcaagacagggatcacaaattcttgacaaaagcagtggaagaagcatatcgaggagtcgattgcggtgacggaggtccattcggagcagttgtcgtctgtaatgacgaagtagtagtcagctgccataacatggttctgaagcacactgaccctactgcgcatgctgaagtaactgcaattagagaggcttgcaaaaagcttgggaaaattgagctctcagactgcgaaatttacgcgtcctgcgagccatgcccaatgtgctttggtgcagttcatctctcccgaatcaagaggctggtttatggggccaaggcagaggctgccatcgccattggatttgatgacttcattgcagatgctctgagaggcactgggttctaccagaaggccaacttggagatcaagaaagctgacggcaatggtgcattgatcgctgagcaagtctttgaaaagactaaagagaagttccagatgtactgatgctgagcagaagagagatctcagatttgtacaatgcttactcataaggacaagaaataatacagtgcccaaatgtccattgtttcgggaaaaaaatctcaattccactgttcaacattttgatgatgcctgaatttcttgttaacagacacaagattgttatttgctgtaaaatgtgcagttgatggaatatactttctccctgtctgatggtgccatttagcacattaaattcgagtatgaggtccctttcctgacgttttatgt

SEQ ID NO: 39096 - DNA, 1914 bp, Zea Mays
ctgtaaagtaaaaaaagatggaggttaatttcccgttgagagaaagctccagaggacaagcagtgatcaaaagcgcaggattcagaagactgaacatgctcttaaagctgctgaggaggagctgatgaaggctcagttggaaacaacaacaaaagtaaaacagcttagagaggttcatggagcctggttgccaccatggttagcgacacatgcagcccgctctatggaggtgatgtcaaatcactggaatgaacatgggaaacctgcctttgacagcttcttgcagaaggcatctgaaaaaacagtgcagacaaagaaatgggctgagcctcatctggaaactgctaagacaaaatggatgcctgttgctaaagaaaaatgggttaccttgaagaaacatgcaaagccctatgtccaaatggtctcagagaaatcattggaggcttatcaaacatcaagtgactttgtcaggcctcatcttgtaaatgcacatcaagttgttgatccctatttccaggaagccaagaaattatccaagccatatgttgatcaaattgctacagctactaaaccacatgtcgagaaagttagaactgctctcaagccttatactgaaagagcacgacatgtatatggacagtttcttgagacagctactacatatcatcagcagtaccaagaagaagaagaaaacacctcggagcagtaataccaaccatggtcataggagacataagcgccggcatgctgacaagtaaaacattgatcaaccatggtcattactttttttataacgatcttggaagcttgaccatttacctttcactgtaaatggtatagacactatcatccgtcatcgccgaaccttgttgtgtatccacgaactagaatacacacaagaaatgtgtttctgccccccatcgtgttgggagagttgtgtttttcatcagagtagggaccgcgagcttaaatctgtgggtgtcatttcataggttatttgttgtagcattgtgcttgagcttgtgtaattcatgattattttgtctcgcgtttgtggatcacttcagccactacattattctacagcttccactcggtgtaaaagttttatcttccacgctgggatgctgtggtttggagaaattctagtaccaagaaaaaccttagttttatatacaagagacatggaaaaggaggtctagactctgttccatcgtaactgcgctgcgtaagcccctaatctaccgcgaatccgcttgatgtttctaaggggaaatccaaatcgaagcaatcggcatgtcccgggcgcttgtcggagaaatttttggcaccattcgtccatcacgtaaccacatatagctcaaaattcaaaggtcgggtttgaagaaaacatacacgtttatcagaaactatcacacggacgagtacaccccatactcttatctagatccctgtatgagctcgatcagtaccaagcctgtttttgttgcacatgacatgcatgctgtcaacctatgctgctccgatctctacaagccaagagcccccaacaaaaaactgaaaaaaaagagaggataatttccagctactgatacaaacaacggactaaattgacacatcaaatcctaccgacctacatgatccatacaccaacattacgtcgttgttacgtttgtcggctgcatgcatgccattgccaagccacgccactactccgatccacagctactagctagacttggtacccgccggcaggccagtacctctccaccagctgctccacgtccaagccctggtaccgggccccggccgccgagtccgcgccgaaccctccgtccgcgccgggcacgatcacgcagccgccgagccccgccgcagccgccgtcgccatctgcttctgctggtggtgttcac

SEQ ID NO: 39097 - DNA, 1382 bp, Zea Mays
gatccagctttgctttgtagttgtagcgctagcagcttaactggtctgagctgaggctagctagtcgtgcaggaagaggaaggaatataatggctgagcgggaggtcgtcgaaggcgggacgacgacgggaggcgggctgtggcggaggtatgcgccgcacgtccagatggtgctggcgcagctgtgctacacgctcatgtacttcatcaccgaggccgccttcaaccagggtctcaacccctacgtctacatcacctaccgccatctgctcgtcgccgtcctcatctggcccttcgcatactacctggagaaggggctgaggcctaaaatgacgctcatgctgttcgtggagatattcgtgctctcccttctcgggatggagatcgtggacgtgaagagcctacgcggggtcgccaaggtcgcagggaccgtggtgtcgttcgccggggtgaccaccatgactctgtacaaaggagcggccatcacgagcctctggaagtcgcctgttcagatcgccggcagcggcagcggcggcggaggcgtcgcccacgacagctgggtgaaagggtcagtcctcgcagtggccagctgcgtgtgctggtccatctggtacatcatgcaggcgtcgtctctgaagaggtaccccgcccagctctcgctgacggcgtggatgtgcacggtcgggggcatccagtcgaccgtgttcacgctgttcatgcagcacgagccggaggaatggcgcatcggcttcggcgtcaagttctggagcatcgtctactctggcctcgcctgcaacggcttcacggtgttcgtgcagctctggtgcaccgagaagaaaggccccgtcttcgtcaccatgttcaaccccctctccaccatcatggtcgccatcctggcctacttcatcttcggcgaaaacctatacgtcgggagcatcgtcggaggcggggttgtgattctgggcctctacatgctgctgtgggggaaggagaaagaccaggagcggggcacgggcaaagagcgggaacagctcgagacggactgcgagaagcaggcgaagaaggtcagcgactgtgtctacgaagcgcccaagacgacgaagtgactgccgccggccatgagcggcagacggctcaatcaagcgccatgccgtgctccagttcggttctatatttgtgatgtacagagtcaccgatccggtctcgcctcatcagctatgtatatatatgcatatgcaatgcggcaacagacagacgtctggctcagtctgtgaaaccgtgaacctgccctgaagctggagttttttggaaccgtaatatcaccaacactgggcttctgaaaatcggtatcccgaacaacgcaattggaattttagtattat

SEQ ID NO: 39098 - DNA, 974 bp, Zea Mays
attgaactcaattcaatttcatgccttccaatatcgacatccaaacggagcataagggaaattctagtatcatgagctggttatgaggagactagagaaaacagcaagtcttctggtcatttggttacatccgtctctctgaaaggcttagaaaaacatccaaagaacctgctaaggctcctccacgtgctgatgttgttaagagccttaaaaatggcatcgtggttaatattcttgggatgggcgctgctgttctcggcatgcaagctactgttggtgctttggtagcaaaagctctcacaacctctgcagtaccctattatcaggctgctggccaaagccctgtcttggctttagatgttttcctagttcagtgccattggtatgatctctactccttaggttgtatgagtggtggggggtagagcgcaggctggaagaacgggggcgagaggacgccgtgctgtcgcacggctgggcacaatgagaggcttcagcgaacaccatcctgtcgcatttccttggggtggcgagctccctggagctgctgcgctcggtgtcactgcctccagcagaagccgccgtcccggccccggcccctgcacgggcctgagccatggcccgttgggcaggtcaagaaaaaccttcaatccttggctttggctctagacagttgctatttcttgattgcatgtacaacttgcatcaagaatacatacacatcgatgccttccagttcacctggacgcaacatgttcgcgtaattcccgccgagtgtgagctcttgcatgagcactcgcgaaccacatgtggcgcttgtttgctgtgcaagtgcaagtgagtgcagtgaccggctctcgctcgttcttaatcattgtacccgtttcgctggtctcaactctcacagcacagcggtcagcactagcacggcccgaacagttttcctggcgggcctgctggaggatgatgaccac

SEQ ID NO: 39099 - DNA, 291 bp, Zea Mays
tatagttttgtgctgctgatgatggtgttaagtgccggtgggctcagccttcttataagtctaagtaacccttctatacttcttattgaggatggtcccttaagctagcatatatttgaaaactaccaataatctataacaattcaaagtaacttctttgaatcactttttgtaatcactctgatcatgtgtaaaacttgatgtaacttgtaaaatttggtaataagatttctgctgcaaaatgttggtatgtgatttgtgtttactttatcctgcggtcctggttgtaag

SEQ ID NO: 39100 - DNA, 244 bp, Zea Mays
aactgtaacagcctaccctagattggtgttgttgttgacagcagttgctgttgaacttcgattggctgttctcccagtaggattagaaaggaaccacacattctcattggagcataattcagtctgtcagttaaacatgataaagagacacaatcttcataggttctacacttctgatttcatgacatgctagagtaaaagtgacagatgatacaatcttcatgggtagcagctctaaggtcaa

SEQ ID NO: 39101 - DNA, 2920 bp, Zea Mays
ttccgatgcgtccgtccatcgtcgtcgatggggttctgctccttccgcggcctcgcctcccctttcgtcggatatcacctgtcgcgcgccctactagaatactaatccggaccccgatgctgcagtgtcccccctcgcccgcctcctaacactcgctgaaccgagttcgttccataatctcgacgcaccagtgtgcagctcatggtgaagaaacggaggttggggtcgattacgtggcgttgctccgcaacggatgaatcaatcagtggggagacaggtgcttgctcccggttcctggtagcggcggaactcggaggttcgcccggtgggcgtctacagaaagctaggtgatctcttgaatcgattcaggaaatatggagttttcttttctgctgatacaatgctgaaggaaggagccgcagatgttcccgccaagatctgggaatgtggcacacccagacagaggattcaccttgcccctggaatcgatgctgacggggtacttgagcaggtggcccttcatctcggtcacatggctggagatgaatttctcccagttctgctgtccgatgtgacgcacctgcctcgtgcactctaggctctccggtctggtgaagctctcctcaatggctccaatgtgctctgcccatagagacatcctgtacccgaaaatctgcagaaaatatgatatacaaaacaaggtagcaatgtgacagtactgcaataccaagttaccaacttatcagaactgaggcatattacctgtccacgaggagcagaaagcatatttgcccatgtatgctggggttggtatgcagccattgcaatctctgtatctctagttccttccatggatctctggttgatgttagcggatccaattatcacatattcatcatccacaatcatgcctttcgagtgcacatacaccatgaatctcctattcttccgagcttggtcctgattggatatccaagttgcagcataattgtattttttggggaaatcagtacgtccttcagttttgggcatttctaaagtgtaccggaatcagcagcagaaaacagaacaatagtctgcagtctaacctgtgggttactggctgagaatggtccactagatgtgcaagtagtgtcctcagcttcacggttaccaaggcagaagaaattcagtgagttatggagccctttggtagacttacctgcacgtcccatctctctggatcatcgtcgtttgaatagatttcgtcgtcaatagcgataatatcaggacatcgtatgctgctggaccgtcgatcttggaatgcaagtcatgccatggctctcttgggccgcgagcatcttcaacctgagagtaaattatcggcacatgaggatctaacaaaatcgcgacaagcttcctgtctcctaataaaggaaaaacaaaatggaacgaagttccagaacaacaaggatggaattctttttgtggccattgcataaggttcttagtaaattcagtttgatacggtaaatgtggaaaaactactctcaccgcaaaatttgggttgtagtagtcttccttgtgaaatgtctgaagagttcgaaatagagtgtgctttggtgtatcatatcggcctccacatagatcaagtcctcccacaaaagcaacaatcttccttctatgattcccagcatcagcatccaagatcactgtcttctggtgatgagtaaagatagtgcctgtttcctggaaacgatggttattaccatcagtgcagattccagatggcagtgtgcttatgtggttgtcagatatcacaatagtttaagctgaagtataagacctgttgcttcacccagctgtgcctcttccctgcagatcgtgggcaaagcagtatctggaccgaagagtgcttgaaaaatctccgggtctcctcatcccttgtgcccatgtaaccttcctacaggcaagaatccaataagcaaacagtgttgtacaacagcatgggtactacggcgtgtaccatcttgatgccaaggagtctccgggacgtgggatcgtcccacacgagcagcagcacccgcacgccctcctgcgacttcctcctgagcaggtcgccgagcgccatgtcgtcgtggccgtcgcgcaccaggtggatggtgtggaacacggaccacccggtgatgtagatgagcctccgggcctggcatatggcgtcgtagacgtcgcgccagcactggccgtgccggtagcagtcgccgttgccgagccttacctccggcagcgttccgtcgggcacgtgcgcgtcctggtacagcgtgaccttcccgccccggcgcagcgggaagtaggtcctgggcacgccggcgaagtccgggcccggggtgacgccgtggtggtacatggtgagcctcgccacgggcacgtactgcacggacagccggagcacggcccccggcgcgcactccttgccgttgcgctccaggaccgggtacgcgccctcgaccatgtccccggcctgcagctggtcggcgcggacggcgacgacgccgatgagctccgcgcccacgacgtcgctgtccttgacgacgaagttgacggtggcggcctcgtgcgcgacgggcaccaggaactgctgcgcccacacggggttctcgtcgtcggggatgacgaaggtgcgcgccaccaccgcggaggcgacctgcaccgtcacgtacgggtcgctggtcatgccctccgacggcttgcacagcaggtcccgcatcctcttggacaggatgtccttgttgggaaggttcctcgcctcgtggatccagatgtccaggctgccgtgcagcagcaccgccggcgcgtccccggcggagccatgcaccaaccaagagacgctctcgtcgtcgtcctgcacgggcatcgtctgcctcgatccgatggcacgggg

SEQ ID NO: 39102 - DNA, 3931 bp, Zea Mays
catctccggatctatcgccctcgccatcggcaatcggcatcgccaccggtagtgggagggagcaagggggggacccaggccaacgccgcgcacctttgccctcttatcatcatcaacatcaccacgggcgggggagacggccctcgaagcgtacccgtccccatcctccttttccgaaccaccggagcgcggcggcgcggcgcgagacccttcccggcttctactcctccgatcctccgcaccggctgacgagtagcccactcactgggggacgtgggatcgatcggcggctgatgggaggctagattccgcaatcccacagactagacacatccccttcgcggttgactttggcgaatcgaccttgatctgaaaatggggctgttccgggcggcgtccggcctggcccgtttggctctgcgaaggaacctcttgcgcgccgcggcaagcccctttgccgccggcggtggcgccgtcccaggtgccgcgccggcgcgctacttccactccacctgcccgcgccggttcgctgcgcccacgccccgtgctgtgccgctctcgcgcctcaccgacagcttccttgatgggaccagcagcgtctacctcgaggagctgcagcgggcctgggaggccgaccccagctctgtcgatgagtcctgggacaactttttccgcaacttcgtcggccaggctgccaccacctcacccggcctctctgggcagaccatccaggagagcatgaggctgctgctgctcgtcagggcataccaggtgagcggccacctgaaagccaagctcgacccgctcgggcttgaggagcgtccggtcccggatgtgttggacccggcgttctatgggttctctgaggcggacttagaccgcgagttctttcttggggtgtggatgatggctgggttcttgtctgaaaaccggccagtgcagacgctgcgctcggtgctggagcggctcgagcaggcctattgcggtaccattgggtatgagtacatgcacatacctgacagggagaagtgcaactggctcagggataggattgagacagttaacccaatggattacacttatgaccgtcgtcaggtcatgcttgataggcttatctggagcacacagtttgagagtttcttggcgaccaagtggacaactgcaaaacggttcggtcttgaaggtgctgagactctgatccctggcatgaaggagatgtttgacagggcagctcatcttggtgtagagagtattgtcattgggatgccacacagaggcaggttaaatgtcttgggaaatgttgtgaggaagcccttgcgacagatatttagcgagttcagtggtggcaccaagcctgtcaatgaaggcgaggggttgtatacagggactggtgatgtcaagtaccatcttggaacttcatatgataggcctaccaggggtgggaaacatatccatctgtcactggttgcaaacccgagtcatttggaagcagttgatcctgttgttgctgggaaaacaagagcgaagcagtactattctaatgaccgtgacaggaccaagaatttgggagtgttgctgcatggtgatggtagtttctcagggcagggcgttgtgtatgagacgctgcatctcagtgcccttgaaaactacaccactggtgggacaatacatatcgtggtcaataatcaggttgctttcactactgatccaaggtcagggagatcctcacaatattgcacagatgtagcaaaagcattggatgctcctattttccatgttaacggtgatgatttggaggctgttgttcatgtctgtgagctcgccgcagaatggcgtcagacatttcattcagatgtagtggtggacattgtatgctaccggcgatttggccataatgaaattgatgagccgtccttcacccaacctaagatgtacaaggtgattaggaaccatccaagtgcgctagagatttatcaaaggaagttgttagagtctgggaagatctcaaaggaagatattgataggttaaacaaaaaggtcagcactatacttaatgaggaatttcagaacagcaaagactatgttcccaacaagagggactggctttcagcttactggactgggttcaagtcaccagagcagatttcgcgtatccgaaacaccggtgtcaagccagagattctaaaacgtgttggagaagccatgactactctgccagaaaatttcaagcctcacagggctgtgaagaagatttttgatctacggcgtcagatgatcgagactggagaaggcattgattgggcagttggtgaagcacttgcttttgctactcttataattgaggggaaccatgtcaggttaagtggtcaggatgttgagaggggtacatttagccatcgacactctgtcatccatgaccaagaaactggagagcagtactgcccgctggatcatcttgttatgaaccaagatgcggagctttttactgtgagcaacagttccctgtcagaatttgctgttttgggctttgaattgggttactccatggagaacccaaactcattggtcttatgggaagctcagtttggtgatttttcaaatggagctcaagtgatatttgatcagttcctgagtagtggggagtcaaaatggctccgccagactggccttgtcgtttgccttcctcatggatatgatggtcaggggcctgaacattctagtgcaagattggaacgctttcttcagatgagtgatgacaacccttatgttatacccgagatggatccaacactgcggaagcaaatccagcagtgcaattggcaggtcgttaatgtaacaactcctgcaaattatttccatgttctgcgtcgccagctgccctttatttctagatacaccgggacttcaggaagcctttgattgtgatgtccccaaagaacctccttcgccacaaggactgcaagtcgaacctatctgaatttgatgatcttgcgggccaccctggattcgacaaacaggggacacgcttcaagcgtctcattaaggaccagaataatcacaaggacctcgaggagggaatcaaccgcctagttctttgctctggaaaggtgtactatgaactggatgaagaaagaaggaagtcggagcgcactgatgttgctatatgtagagttgagcagctctgcccgttcccctatgacctcatccagcgcgagttgaagagatatccaaatgccgagatcgtgtggtgccaagaggagccgatgaacatgggagcatacagctacatcaacccgcggttgctgacggcgatgaaggttctgggccggggtggcatcgaggacatcaagtacgtcggcagggccccgtcggctgctaccgcgacgggcttctactcggtgcacgtgcaggagcagacggagctggtgcagaaggcgctgcagcgcgaccccctcaactaccctttctgaaagaaacgaggcccctgtagattcttggaattggggaccttttgaatttgatataataccaatatagagagaacatgccttaaattttatctgtgcagccatttggtgaaataattgtttcgactctgcagtaccgcatgaaacaaaccgttgtaagtttggaaaaactccatctcgcagcgttgattttgtgttcctaaatgctggaaagtttgtatggctgaaagcctgaaacaccgcctgccgcaattttcttgcgttgaattgcaaagtctataaaagcaatgaactgatatgtcattcatcttgcatgttgaaggttgtgctttggtatcgatctcttgaaagatattcgcttggtcctaaaatatatgtactaatcaaagaaattaagtagggaacctatcatgtgcaattgatgcatctgtacgattcaagctataagaataaaggtgaaagac

SEQ ID NO: 39103 - DNA, 1613 bp, Zea Mays
ggtttagtcccttttagcacatatgtgaaggactaaagactaaatcattttagtccatattttagtcctagtgtttgacaaaaaagagactaaataagactaaaaactagagactaatctttagtccctctaaccaaacaccccttgagaaacagggtcgaaaatctctgctcatttcacatcgaacgctccgcctacaatcctgtactgcacgcgctccccatccgcacaacttcccgcctcccatggcggcgccggcgccgggggccacccgcctccaccccccgttcctcctgcttccttccccgccgcgaccccatcctccactccggctccgcttcctcctgccgtccccgccgcctctccgcctccgccgccgcttcccgctgctcgctgccgccgccgtctccgccggcggcggcggtggaggggaggaagccgccggcaggaaggccgataaggccaggcagctgcagaagcgggtcctcgtgggcgtcgccatcggggtgggcgcaggcggcatcgtggtcgccggcggctgggtgttcgcagccgccgtcgcagctgctgtccttgccggctcccgggagtacttcgagctcgtccgcagcactgccagcggaggcgggaccccgccgccgcgatacgtgtcccgcgcgtgctccgccatctgcgctctcatgcccatccttacgctctccggtcaggattagctgcccctgccttaaatacaagtatagcataccgttggccaattcttctcggtggacaagctcactggacagttggacttgtagcaaccttgatggctattagtagcatcattgctgctgatacatctgctttcctttgtggaagggcatttggtcgtacccctttgactaacataagccctaagaaaaccttggagggtgctttagctggcctagctggctgtgtgctgaccactgtgctgctgtcaactgccttacgctggccaagatcactgttgagtgccacagcttatggaatcctgatctttctgggttcattgtttggggatcttgtcgagtctctgatcaagcgtgacgctggtgtcaaggactctggatcactcattcctggtcacggtgggattctcgaccgagttgacagctacgtgttcacaggggcactctgttactcttttgtcagagtagctctaccctcgtatggggtctgaataaagcacctggatgtttgctggtttgtctctcctgccatcagcaatgcggtaaccgtattttaacataatgttgagtattgcttagaatgccctagacagacaatgtgatcctcctatccaagcaaattgggcgtccgagtttctgactgttgaagatagaaccgaagatcaacgtcgacagtgttacggacttggggcttgagatggcctttccagctcaaccagtctgttgcagacttgtagctttgggtgtacatagtttatcttttttttcatagggtagaaaggaaagcgtaattatccgtcgcaaaagctgttaactgtgtattgaggcagcttatgtcaatatgtactatacctgttggtatcgattgttttaatgatccaatgcatttgattggtaactaag

SEQ ID NO: 39104 - DNA, 1000 bp, Zea Mays
gttttgacaaaattgtacagagtagattttgtagttcatttcaatcaaactgtgaacttgtgaagcataagctaaagcatacattctcatctttggcattgaaagaactgaaccatagaaaaaataaagacaggagcacttctccagattcaatgccaatgaaaaaacttatagctgttgcacaagctagaaggttttctcgatcaacttcctttccagataacttcctaaatgccaagagtccgtttgataatattcagcagaagaaattagcagcgcatggagccaatgcagcgagaaggtctttcaaagatttcctcagtacattaacaagaaccaaagaaagtatatcgcgcgcgacacgtgttgctatggaatgtgctaaatttggcattgctggtgaggtgatgtatgatgcctttggtgttaggctacatgcaggaaagcaagcaaaggtcttgaaccagattgtgtatgagcttccattagaacatccactggctgaaacaagaccgctgcgagagctactagggcacacacctccacaggtatttgctggcggagtgcttggatttgcagtagccacatttatagcgatgatcgctgggcttggtagttgactccgcatttgaagaaatggtcaacattcacattgaagttctggaattcaaattggacacatgtttcctagccagcttatgatagataatgtgttgtgtataggtgtatttaatatgcaaattgttgtcaatttgttgaagagaaacttgcgtcattcttttgtagttaatcgacgagtgaactatatgttgtattcgttcctgtccaaagtatttggactgattgaaagtacctcttgataaagcattcatgagatttccgcacagccattgcgattgatttccaaacctcatgttcaagtgcaacatcatcaatatgtgagatattgaggatccatatttttgccgagtgtcgaattggattttcatggaaagcaagg

SEQ ID NO: 39105 - DNA, 2001 bp, Zea Mays
ctgctttagttttttctccccgctgcacgttaacattctctctcttataccctcgaaagctcgaaagatcccgcggcgcagcagccacccttctctcctctccgctcccaatctttgtcgtcgcctccctcgaagtcgccgctgccttcattccaccatggcgcttcacgccccggtcctcgtgatgaaggactcgctgaagcgggagtctggcgcgaaggttcacaaagccaacatccaggcggccaaggctgttgctgacatcattcgcactacattgggtcccagatccatgctgaaaatgcttctggacgctggacgctgatggccttttatttaataaatttgtaaattatatccaaccagttcatcagatcgtggccttttatttagatctaagaacaccaacacgcttaggcatttagttggatataattcatatgttgtacccaagaaagcagcacttaccgatgaactatatcttatcagtcgtgtaaacggaatgaaatataacaaaattgtttttattatctgcacattcccattatattttgtagcatataaccacaaggtcacaaccaatttgtatgatttaattggcgtatgaatccgagatgagtgtttcatatgattttttttacagactatgtacacaagcatttcatgaagaaattatttacttgactcgataagttccaggttcctgcttttgacatttattttcttggtcatcaacatgcgaagctttacatgtcttcatgtcagtggtcatcaaattttctccagtactgccttgagtagctgcagtggtgaccacacaagtgaacgagatgcaaagaaggcaggtaagctactgcaaatttatacaataatttattgtcaagaaacggacgctagattactgtgccggatagatcttagcaggtaaacagtaggagaactgatgtaaatgagaagacaaagttcttcacgtgaggtaaaatgttgtccagttttttttcttaaaatgaaatatctatgtctttgctgatttatttgtccagttttttgttcttcaggtgagaagacaaagttcttcagataaacagtaggagtataaccagggagtgtggattttcttaatctaaatggaaaagaggggatatggtactttagaatttggttttcggtgaaactataaattccattggcatgcttgatttaatgttcacttaaattgcctagatccttatccacttgtcctcatggaagcctctcaaccctcaaatgtttgtctttgctgatttatttgtttaggcagccctcatttagctgcaccttttcctattaaggaaaaaaagaagctttgcgttcaatttctcctagaatctttctgtgataccagctgatttttttattctcttatttggaacgttatgacaacaagaagccactagaaagaataaaggaacagaatgcagtgacaccaccgctccatcattgttcttcaaactattcagcaactaaactgttcaaacatgttactgaagattggcagctgaaacaaatgatcaccggctgaacatggtaggcgtgaaaaataagatcaccgactgaacagtttatgatcaccagctgaaacacaagatctgggaggcgttgaacatggtagctgaactcttcaaacatgttaggcaacagcaggcaacaacagtgaaacacaatcaccgactgaaaagctgtccggcacctgaactgatcaaatttggttgcctggtggagggaggtctaacggctgacgctgctattcaattattttttactttagtttgtatcctccttacagatgttggatgaaagcaaaccttcattttttttgtttagcaggcctactaaaacaagcttagtgaacctgggtgaacaaaatgcactgattcaaaattttatttgcatttattgcatttagcttgccttgatgaccctgtcattctaatcacagtcttgggcattttatttgtgtcg

SEQ ID NO: 39106 - DNA, 2258 bp, Zea Mays
taaagattctccgctccccggccgcaaatcccccactggccagtggccaccaccaccgcctcgattcgccacgtttggttctgctgaggtcgggatttggtgtgccgagctattccttgctcaattggatctcctccgcgcgattcgattcgattcgattcggttcggttcgttccaatcggggttttgctacttccgctgccaccggtgtgctccgagctgctcaagctgcgcgccggatacctggctgctcgatctgattcggtctccaacaccagccccctccgcggccgccgctccccgctgaccccggcgccatttcgacccgcgcggccgatccttggatggttccgatcaatcgggaccaagagacccaaggcttcatcagctcacccggcccccggcggcggtcgatccatggccggggagaaagcgccgcgcgcgttccccatcgaggagcttccaggccacctcatcggggaggtcctgacctcgggcgggctcgcggccgccgacctcgccaggctcgaggccacctgccgcgcgctcaggccgctcgccgaatacgccgcgtccaagctctgcgccgcgcgggcggcgttcgcggctatggggcccgccgcgcgtggggggctgctagagaggtgcgggggaagctggaagaaggtgctcaggttcctgcagtccgtcgagcagtcgtcaggcacggtcgagaccacatcgggcagcatgcaagtagccacaggaagatatcacacacttttggtccatgactcttctgtctattcttgtgggtccagcttgtgtggtgtgctaggtcatggcccagatactacacagtgtgcggcattcagtcgggtttccttcccatcactttcttgtgttataaacatctctgcttcacacaaccatgctgcttttgttttggaatctggggaggttttcacctgtggtgataactcatcattatgctgtggtcatggcgaagtgggaagaactatatttcgaccaatgcaagtagaagcgcttaaagggattccctgcaagcaggttgctactggtctaagttttactgtgattcttactagggatggacaagtatatacttgtggaagtaatacgcatggccaacttggtcatggtgacaccatagacagggccactccaaagcttattgaattgtttgaaggctccactccggtggtgcagattgcagccggtgcaagctacacgtttgctgtaacagatgatggaacagttcattcctttgggtcttgtactaatttctgccttggacatggggatcagcatgatgaacttcttccacgtgcaatccaatcatttaagtggagaaacattcatgtagtccgtgtttctgctggagatgagcatgccgtggctcttgatgcactaggataggtttatacatggggcaaaggatactgtggagccttaggccatggtgatgagaatgataaaactagcccagaattgatcagcagcttgaagggccaagttgctgtgcaggtatgtgcaaggaagagaaagacatttgttctcacggacaagggctcagttgttgcatttggatggatgggctttgggagcttagggtttcccgaccgaggaccgttggacaaagtaatgaggccccgcgctcttgagagcctgcaggatcactacgtctcccaaataagcaccggactgtaccacactgttgcagtgacaagtaagggcattgtgttcgggtttggggacaatgagagagcccaacttgggcaggagtacattcgtgggtgcttaaaacctactgagataatgttccaaaagagcatggaagacataccgattgcggcgcctagtggttgacttgaatgccatcattttggacactgttgcctacatgtgttgtatttatatcggaattcttgtcggcaagtgtattttatacttcgtgctttgtgagtaatctgggtgaacgggggaaagacggaagtggttggaattggaggacagtgttgtgtagccaaagaagcatatagtttagtaacgtgtaatgtatcgaataattcaacccaccatttttcttctgtacaaaatttattggtgtgtttgtatttttttctctcttgtccccttcatgttttcttggttctgtgctagcaactgttgagtaaatagcgtttgctcccctggaacttgttatattagtgcctaatcttgctagtttctatcgccttcaacaatgtcaattcgtc

SEQ ID NO: 39107 - DNA, 3799 bp, Zea Mays
atgaccattagggcaaggggcacggaaaaccgagcaaaatataataaccgagcatctgatattacaggcgcaaacgcaacaggttacaccactagctggcgttctccgaacccctcgcggaaacccttccggctcccgccgctctcccgccgccatcactcgccgctctcccgctgccaaccgttgccttcaggctccagccgccggcacggctctgcgtacggggggattcacttccatccgacaccatctggccttctcttccatctcgtgtttgttcgtgcgcgtggattgttttgtccgtgtctggtgcccgtgcaagagcccctaagctggtgcgtccgccatgtttccccccaaagggcccaaccactacgggcagccgccgccttacggcgggcagcagccgtacagccaaatccctagtagcactggatttgcagccccgacagcagcaggtggcactgatggtggtcggtttggtgggcgtggaggacaaggggctgctgcacagtatggagggccttatgcatcagtgtatggcacccaacaggttggtggacttggtggcaaaggtccagcttcttcaagtcttcctagcttgccaaatcgtccaacttctctcactgagtcatccaagttcacatctgcacctgtggggtctggcctggcaagaccaaatgatgactatatggctgtgcgaggttatgcacagaagcaagaccaatatggcacagattatccactagagagacgtatgtatggtgaacactcggccaatcttggtagaagggatggtctcagtgatttggatagaagatacactgatcagatagctgctggtcatcagagttcatcaatgcgccatcagcagctcttgaaaggtcagctgcagcctggatctgatacgaggtgtttccatttcgcttcgtggatgatgagagggattatctgtccttgacaaaacggtatcccagacttgcaattactccagaattttctaagattgtcttgaactgggctaaagaaaacttaaatcttcctctggatacaccagtgagtttggagcacgatatccatgattcagatgatggtgctgatgaaggagcaattatctctactgagaaaacatcaagcttcaatactccggccaccatttggaatgcaaaggtactattgatgagtggcatgagcaaaggtgcctttgctaacataacttcattgagaagtactgaggaacgagttgtgcacttgaacaatatcttaaaatttgctgtattcaagaaggatcgttctctttttgcaattggaggcccttggaatgcagatatagatggtggtgacccatcagctgactgttcttgcttgattcgaactgccatcagatgcgttaaggaaacggttcacgttgatctatctagttgcacccactggaaccggtttgtcgaggtacattacaatagaataggcaaagatggactgttcagtcataaagaaattactgttctgtttgtgccaaacttgttggaatgcttgccttcagtggatatatggaagaataactggattctgtacaaaaaatcaaaggcagaaagggagcagctcactgttaaaaagagccctggtgatccaaaagagcagatgcaaggggagctgaacgatggtaaaaatttagatgctgatcaattaaaagaggctgatgttggttgcagtgatatgaaaaatgagaaagacgatgttgatatcaaacagcaaggcaatgatggagagggtacgggtaaagttgaggaacctgttcagaagatgggtggggatgttgaaggaaaaagtacgggtgactcctctattgaccatgcaacaactggggataaaaagcccacaaaaaagaaaataataaaaaaggttgtgaaagttgttcgaaaaaaaataactggaccttcagttgataaatcttctgaggacaagattgttgtagcagaatctgcaaacaaaactgcagaaggggggcaaagtcaacaaaagaatgatgatgctggaaaacaacaggagggagctggtataagtcaacaaccagaagcaaagaaaactgtgaagaagaaaataattcgaaggattgttaaaaggaaagtttctggttcaggttctcagttgaatacccctactacacctgctgaaactagtaggcaagaagcagaagttcagccagaaaaaaatgttgagagttcggccgacgttggaaactctcagactaagctacaagaagggtccaaaattccatctgaagatatctcaaatcagaagaaagaggagaaaccagcggaaaaggaacacccattgactgatctcagtttaaatgcagataagggcaatcacaaggaagcttttgaacaaaaagacatgaaaaacgatggaaagaaggataaaacaaaggatgataaagagaagaatagagacctcaagatggatttaaagcaaaagctacctcttgacacacaagaaaaaaagaggtctgatgaaccaccaaagtatccaggattcattctccaggcgaaaagaaatacagaatccaaactccgcttaacatccctttcattgcatggcctcctagactatactgccaaggatatagaggagtcagtatttgagctttctttgtttgctgagtcattcagtgaaatgcttcaacacagaatgggttgtgttatcctgtcttttcttgagaaattgcacaggcgatatgttgtgaagaggaatcagcgtaagcgccaaagagaggaagatctaaagaaagaagagaaatcttcagagaagcggtctaagactactcatgagactactaaaactgaaagtgttgataatccaggaggcagctttaaaatgacaaaagagggtgaagaaaagatgagcacagatcaatctgcaaatgtccatgctgaactgtcaaaagagggtcagataaaacttggcaccgatcatccaattgctaaccatggagaaccagcaaaagggggtgatgaaaatatggaggaagatcctgaatacgaggaagatcctgaagaagtagaagtatatgaagatgacgaggacatggatgatgctcacgctgaagaacagattgcagaacagaatgagaacacaaacgacagagagattaagccaaaagaagtagcgacaacagatggtggaaataacaaaagtacaagacagcctgaagtagaaaatgttactaatatccatgaaagagctgcttcaatggaagaaaagcagtccgtgccagagataggagatttggtgggaggtggagaaaaggtagttagtaaagagattaagccagcaaaagatgaggtgatcgacaaggacctattgcaggccttcaggtactttgacataaatggagcaggatatctcaaggttgatgatttaaaatgtattcttcacaacatggggaagtttttatcaagcagggacgtgaaggacttggttcaaattgctcttgttgagagcaattctgcaagggacaatcgcataatctatcctaagcttgtgaagattgttgacctgtaatctggcactgcttggcccgcgtcagtccccttgaagttaaccatgctatgatcgttgagaagtcagttatgagaaactattttgtttacttattaatgggttcactgccatttttgtggctacctgtttctacgattatgctacaaggagctgcatttcgtttctgttgaattttttttacggaaattatcaagtcgtgaacgtagcagccgaaaaagataaacgaacattgtat

SEQ ID NO: 39108 - DNA, 1129 bp, Zea Mays
gtcaaaggttccctttagatcaaggctgccggcgtgaagcactggccaccgggtgctgcacgtcaacggccaacagggggcaccgtgcaggtgggcagaagcagccagcgacaacagtagggcacagggatgtatatggaccttccaaatacactagacttttgcaagcaaccaaagatactctcagataagaaggttgggagtactctactgatgggaaatgtgaaaaaatgccatcaacaaatatgctcaacgtgcacatccagtcattgccatgctttgagcaggaaggaatggtctggatttggcctagggatgacccaccaaaggctacaatcccttctcttctgcctccttcaggatttacatgctcactgttgatgcagggggtgcatggcctagggggaggatggcgactaggttcatcgatggcggcaagcagctcgtgttcgaccacgcgacacagttcttcactgcgagcatccgcaccgctgcaggtgctgcatatcatcggcagagaggatcgagttcagatcgatgatgcaaggcggctgcatcgtcgagctgtaacacctgcagcgatgatgcctccttatgggacaccaccaccatatgcagcaatgtatgcacaaggtacaccataacagcaggcaccaatgccaccgggttcacacccatacagttcttatcctatgcagtcaccaaacggacagttcaaactccaataagaatctcttggctgctcacctgtcgcatcttccccgattcaaaatcgtcctggtcgcatcttccccgattcaaaatcgcccaattttggagatatgtgacaaacgccatgccctgtgcattagagaagatacagaatcgccatgccctgtacaagacagtgagccaaattcttgttcattttgcactatgatacatattgattcattaggccctaggttggaggttgtgactgatgagttgggaagggattacttgattggtggtgtacaattcttggactggatacatgttccagtttttggtccattagttcaggaattgtttcatttacatgtatattcagtacactcgtataatggaaacaggcaaatctctatctcattctttggttattgtgtta

SEQ ID NO: 39109 - DNA, 1345 bp, Zea Mays
ttatcaacttatttttatttgcgttactgtatcaacaataacaaattataaatgtaccttcggctcgaaggaaagtaagggtacaagcgtgatgcaaaagcgaatgccaagtcagcgtgaacagtacaggaatactattcaactatttataggcacgggttgcagcccatgcaaaattacatccaggccctttgcttttgacaataactctatagtaatctatctgggtctagatagtcttttcctctttaagtcggtttcctcttttctgccatcatgccgaagctcccttgcgcacagctttggctctgttccatccttcgtattgtttccgtgcttcttcataccgtgggctcttgctcgaaggtacctgtttacacattatactccaaagacattgttaaatcatgtttttgaggaccttcggaagccgaaggcccccaacaccttctctttgtcgttgaccaccattccctttcccttaggatccatctcttcgggcgattagtcccttagatgaagagaacggctccgataccaattgagagcacctagaggggggggggggggtaaataggtgatcctgtaaaaatcaaatactaatagccacaaaacttagttattaatgttagaacggctaagtggcttgaaacgatctcttgtgtgacagaacctcccaagttattgggcccacatgcacctgtccttgtcctgaagacctcagacggccatgcatgtgcaccagataacttaacaggatccgtccgattgccccaaggacatcggataaaccacttacaaccagaaccgcgggattaagtaacacaaatcacacacaccaatattgttgcagcggaaatcttactaccaaattttacaggttacaaaaattttacattagtttatcggagtgatcacaaaagtataagtttgaaatatatatgctagctcaagggatcatcctcaataagaagtatagaagggttacttagacttataagaaggccgagcccaccggcacttaacaccatcagcagcagcacaaaactaggacctgaaaaacaacagggaataaaaccctgagtatggaattactcagcaagtcttacccgactaaggaaaagactctcaagggtatgctggataaataggagtcaaggagaggctttagcaaaaatcaacttatatttttgtagaagtagcttactaacgtgagtccttactttcaatcttttaacgccatattaagtattaatagactccatttgcatctagtctaatttccatctcatcaatacaacatcatttttatccatagtgttcacatcctgactttaggttgcag

SEQ ID NO: 39110 - DNA, 3471 bp, Zea Mays
cccggtgacccagaaatcgtggcggccaaggttggacggacttgcttccgttggcgagatctgcgggggaagaagcgcccagacgtgggtcccacctgtcggcgcgggcgtgactttgagctggggcgcgcggtggaggttggaaagtgggccaaaacacgctgattccagcccaacagtcccatttccttttctttttcttttacattttctgttctgttttccctttttatttttgaattccaaatttcaaattcgaatttttgtggcaagtttgttctcagatcaaatatgaaattttgaatattctagtatgggatgaatccattgtttataaatttatttgttttcatcgtttagtattttttccttcctttatactatttccaattttctaagatttgaattaggttttaatccctaattcccattcttaaagtaaccctattaatattatcattattattaaatgcacaaacaattaactccagcatgatgcatgatttattttataggtggttggctaatcaatcattttaaagatggttgttcacatgttttaagaaatagaaacatatcacataagaggattaattccttttatatgatttacaaacttgggtattacacgctttgtcatccggttcctcttcatttttatgtacctgatgataagctctctccagtcattggggtctaactctggttgactcaaggtgttgcactcttctgtccgatctgagagaatactcgggtgtgatacttcttggacgaagatcctggatgggacctgggcctgactggatcccagcttcaacaacgcgtccgctaccgcgttgcgatctctttccacgtgatggaattccaagccttcaaatttgtcctctaattttcggacggctgcacagtacttgcccatagaatcagtcgagcaatcccagtccttatttatctggcttatgaccactagtgaatctccatataccatcagcttcttaatgctcaatgacacagcaatgttcaacccatggatcagtgcttcatattctaccgcattatttgatgctggaaataataactggactgcatacttgagttgttcacctccaagaacaatgaagaggatccctgcaccctgctccctgcagcttcagcgagccatcaaaagtacattcgccatacttcggtagcctccgggttgtctgggacctgatgttcagtccactctgatatgaagtcaaccagtgtttgagtcctttattgaagtgcgaggtcgaaactctatgtcgtgagctcccagctcacatgcccacttggctacccttccgacaacttctttgttgtggagaatgtctccaattggaaatcctgtgactactatgactttgtggtcatcaaagtagtgacggagcttgcgagcggttagaagtaccgcgtgtagcagtttctgaacttggggatacttcatttttgaggtcccgagaacttcgctcatgaagtagacaggatgctgcactggatatgtatgtccttccttcgcccgctcgactactaacgcgatgcttaccatgtgagtcgtgcaggagatgtataacaacatatcttctgctggttgattcagcgtggctcggtgtggtggcttgagtactagtggtgtagttagaaacttttttagtgcctcaagagcttcctgtgcctctgtggtccagtgaaacttgtccacctttttgagcagtttgtagaatggcatgactttctcgcctagccttgatatgaacctgctcagggctgtcatgcatccagtaagcctctgtacctttttctgtgatcgcgacgcttccattctcatgatggcctcgattttttctagattggcttcaattcctaggtggctgacaatgaattcgagtaactttcctgctggtactccgaagacacatttctctggattgagcttctactagtatcgcctcaagatattgaagaccagctgcaaatctttgatgaagtttactgagttttctatttttatcaccacatcatcgacataggcttccacccgtttgccctagtgatcggctaagcatgtttgaatggctctctagtaagtcgctcccacgttcttgaggccgaatgacatggaggtatagcagaaagcttcaaacagggtaataaatgcaattttctcctcatcttcttttgccaagctgatctgatggtatccagaatagcagtcttggaaggacaacatagaacatccgacagttgaatcaaccacttgatctattttagggagtctgaagggatccttcggatattgtttgttgagatcggtatagtcgacgcacatgtgccaatccactttattctttttgagtacaagaacaggatttgctagccactcaggatgcagtacttctctaatgaaccctgctgccactaagcgagctaactcggcgtgaatagcttctctcttgtcaggcgtgaatcgacgcaatttttgtcgaatcagccgtgcttgaggatagacctccagtttgtgctcggccagttctctcgggactcccgacatatccgcaggttgccatgcgaatatgtctcagttatcttgcaggaaccggacgagcgcgctttcctatttgtcatcgaggctggagctgatgatggtggtcttgcgttcatcagcgaaacctaggttgatcctctttatctcctcaatcggccgcatagaggtcacgacttgagcttcatttgcgggtattgcgaggtcttcctcaggctttgtgttcgcctgtgcggaggaagtctgtggcagaacctcccaagttatcgggcccacatgcacatgtccttgtctcaaagacctcagactgctatgcaggtgcaccagataactcaacaggatctttccgactgccccaaggacctcggataaaccacttacaaccagaaccgcgggattaagtaacacaaatcacacacacacaacatttttgcagcagaaatcttattaccaaattttataggttacaaaaattttacattattttatcggagtgattacaaaagtataagtttgaaatatatgctagctcaagtgaccatcctcaataagaagtatagaagaagtacttagacttataagaaggccgagcccaccggcacttaacaccatcaacagcagcacaaaattaaaacctgaaaaacaacagggaataaaaccctgagtatggaattactcagcaagtcttacccgactaaagaaaagactctcaagggtatgctggatttgggaatcaaggagaggctttagcaaaaatcaacttagatacttttgcagaaatagcttactaaagtgagtccttactttcaatattttaaggccaaattaaatattaatagagcctgtttgcatatggtctactttcaccatctcatcaatacaacatcatttttattcatgagattcac

SEQ ID NO: 39111 - DNA, 1646 bp, Zea Mays
gaaagaacaagcgaaagagcaagatggattctgtaccggggggaacattcaaacgctcactgctagtgacttagacaaatacaaggcacatgcatggcttctttctcctccatgccagccatacacacgacaaggacttcagaagcattcagctgatgctcgtgcattttcgttcatcaagattcttaacctcatgcaagacatgagctatcctccacaaatgttatttgtggaaaacgtagttggatttgaggtgtctgatacacatgaccagttgctggaggtcctttcaagtctcaattttaacacgcaagaattcatcctaagccccttacagtttggtgtcccatattctagacctcgctacttctgtttggcgaaacgtgaacctgtgcggtttcgacatgcattcgtcaacaataagttgctccagacacctatgtgcctgagcctgacactgagcagtacatcacagggtagcgaccaccagactgaagaagagctagagccagtttgtaagccaataaaagatttccttgtcaaggaggctgatggaggcactccagatgagacagttttgcaggattatatggtcccagtaaacttgattgagcggtggggcaatgctatggatattgtataccctgaatttaagcggtgctgctgtttcactaaaagctactatcgttatgtgaaggggacaggctctttgttggctacatctaaaaacctcaatgttcctgaagagaagctccaaatttcttccctgaaggagttgggcctacgatttttcacccctcgtgaggttgccaatttccattccttcccttcaaatttctgcttcccggatcacataagccttaggcaacagtgagtttaagttccattatacacttctggttatctttagtaagcgacaagggcatttgaattgcagtacatataagaaacatgagagatgaggctatgctgggtaactatctgaatagtgtttatagttataggttaccatatatcttttgaaaccctcttgttgcaggtatgctatgctgggtaacagtctgagtatagcagttgtgggtcctttgctgcattatctctttgctgaggcctgagtcatagagaagtccagtcagccctggtgacattagcatggcacaaacactgtggctgcgatctgccaaaatttcttcatacgtgatttaagcaaggttttggggactacagtttggccatttgatgagcacaccgtgtaggcacaacctcacaatgtatcaacaaaagtgtaccatacagtagagaagctgtttctgcgcatacttcctccccctcatgcctatgctgtcatggtgaatgaattttggaattgtgatccgttgatgtgtgcatggatgaggctgtcgtaacgattgttgatctgagctttaagtaacttggaacctacttactccgagcaattccaattctattcttagctaacccatttaaagtttgacaatatttatgatgtaaaatatgtatagcaagtataaaatatactcaatgaagaatctatatcataaatattgacactttttttatataaacatcgtgaaactcaagattctttgacttggtattatgtttgaattgtattttgttttcgg

SEQ ID NO: 39112 - DNA, 1043 bp, Zea Mays
tagaaaggaaaaaaaaaaacacgacacctcccccctctgcgccgccctcacccaccgccgtcgccacctctctcaccgcggaacaagacgctgaggaagaagagccggtacggagacggcaagaagacgcggagcagtacgtacgtctccgatctgataatgagttcctgggaggcgaaagctagacagtttctgttagaggaggaaaaagaggatgatgaactcttcttagtaattgtccctgctgttctcttggccatgcaagaagagaaaaggtcagtccgtaccagaagtacgtcagcacatggaagcgcgaaaaagcggaagaaaaatcatgttgcaagtgttctggaagactatttggagcacaggaagaagcaaacggagaagactgtagaggcgttacttgagatgaagagtcgtgaagaggagtactctattgagaggtgtcttgacatagttgatgcattggaggagttgacggatgaggagaaggccgctgcagcagaggtgttcaagaatgaagtgaatcgggagatgtttgtgattgcgaagcaaaaaattccaaatgtggggttgatttggcttcggaggaagataagtaggattgcatctacctgagatggataaggtgcgactgatggagtgatggctcattgagttgcttgctgtgtgcgtgcgcatttgttttctatgcccgacgatgagtagcttgttgtggtgcctgatccaagagctcacaccagtttattcagttcagttcagagcttgcatgctccatataagcagaccgctgcatgctatgtgttgttaagcagactgctacattctatacggagtttgcatgctccatgtactgttgcatgccacttgttgctgatcgaaaattttagtttgcgaactacatgttgaggacagatattttgtaaactgctactagcactgatgcatgcttgcactgcagtttagcatctgtgtctgtgcgctttgcgcgtgcgtgtgtgtgctttgcaaactgcaatttagatagtgtttggttcggt

SEQ ID NO: 39113 - DNA, 885 bp, Zea Mays
cgccggccgcagccatcgtgaccgcgtgctcgcaggccacacggaggtcagattatgacaggcagccttgacaagaagctaaagctttgggattcaaaaacaagaaatttgagagaaatgtttatctttatgacatgaggaatctaacaagaccagttgatgaaaaagactgtcctctggattatcaaattcgatgccttcatacttctctagagtggaatgcttatgttgctggctctgtggatggagttgttgcattgaagtatcttgatcgtggaacagatagagatttgggatatgcatttcgttgtcatccaaattccagaaacggaaaatggaatctggtccctgtaaattgcatctcagttcatccctgcaacagaactttcgttacgggagatgataaaggatgcactattgtttgggatgctcaattgaaaaagaagctgattgagcttccaatgtatttgggcagtgtggcgtcagtggcatacaaccataatggccaacttctggcggttgcctcaaactattttttagaagtggataaagaggagcaacaccaccaggtattcattgaaactgtggagaacttcaaaggcaagtcccgtgtgggatagagccttctaacaaaacatgttctgttcatctgttgtattgtattttgtctaccatacatgttaaaggtcaccaagatgtgacagcatgttgtattatgttgtatgactaagcattttttttaggaaacgacataatatggctaagcaatacttgtatatattggttacatctagtctgagacagctgtggtgtgttgtaactcttttgagcttttgcaaccagtattgctgttctggacttctggtaaccgcagctatccctgct

SEQ ID NO: 39114 - DNA, 1849 bp, Zea Mays
catcctcctagtttttttcttttctatttttcagctaaccttatcttcttcccgcgtcctttccagcctcccgtcccgtgtggcgtctggcgtgtgcgcacgcacctccccaggccccagtgccaccttccctcctcggctcgacccgcccggcgctccgccgcagctggctcatcccaatcccctcgtacagtcgtgctccgcgcccgcttcaccgcctgaacaaagatggaggccttcctagccggcctcttcagggcgcctccacgggccgtccccgcccctcggggcacgcctctccccagccttcctctcttctacggcaggcgccgcaggaggccgtcctcctccgtggtctgcatggcggagccctatctgattgccaagctggactctgcggagaaggcctggaaagaaatgtcggttaggttggcagatcctgacattgtctcggatccaagcgaataccaaaaaatcgcgcagtctgtttctgaactggatcaggcaattcaaggattgtgagaggcaacttgaagcgacaaaagctctggaaaaagagaacgaaggtgaccccgatatgttagagatgatagcttctgagttggaggctctatctaaccagctcgcagagcttgaagaaaaaatgaagtttctactgcttcccagcgatcctctagattcacgcaacatcttacttgaagtaagagcaggtgctggtggtgatgaagctgggatttgggctggtgaccttgttcgcatgtaccagagatactgtgagcgcaacaattggaagtttaagccagtttcttgctcagaagcagaaatgggtgggtacaagacatacgtgatggaggtcaaggggaaacaagtctatagtaaactgaagtttgagtcaggtgtacaccgtgttcagcgtgttcccttgacagaggctatgggtcgtgttcatacgtcaacagcaactgtagctattatgccagaggctgatgaagttgatgtggttattgatccgaaagatattgagcttaaaacagcaagatctggtggagctggagggcagaatgttaacaaggtggagacggctgttgatcttattcacaagccgacaggaatacggatattctgtacggaagagagatcacagctacagaacagagagcgggcatttcaattgttgagagcaaaactttacgagataaaattaagggagcaacaagaatcattaagaaaccagaggaaattgcaggttggtactggtgcccgatccgagaagataaggacgtacaactacaaggataacagagtgacagaccatcgcttaaagatgaactttgagctgacaagcttccttttaggagacatcgaatcggctattcagtcttgtgctacgatggagcagcaggagctgttggaggaaatggccagttccgtgggcgcagtaaacgtatgattcaggcaaattcggcgttgaggccaggccatcaaactgaaccgcgaaactcatgacgtgctcggactcggtgaagatgattgatagctgtacatgaagaaaactgacaagatgaactccccccataggaactttttccccccctgtagtccgcagggtacaacacacacccacccatgcatctcagcttccttgacggcagcagagttactagtagaaaatatacatggtttgtgcagttcaacgcttcaactgctccagtattcacagtttaatgcattttaggtatgttgctccagtttctcaacaattcactgcttgcaattaaatctacagagcaaagttctcagctagctacatttgaaccaatcaatcaaccacttttctttttgaaacgag

SEQ ID NO: 39115 - DNA, 3759 bp, Zea Mays
ccctatccgcgtaccgccccccgggcgatcgatcgaacgcggctagcctcgccgccgacccgtcgaggcagccatggcggagatcgccgaacgggccgtcgcgggcgaggtgccggaggagccgcggccgccgcacggggaggaggacgacgaaggggaggaggagggggacgtgtgccggatctgccgtaaccatggcgacgaggatcacccactgcggtacccgtgcgcctgcagcggcagcatcaagttcgtgcaccaggactgcctcctccagtggctcgaccatagcaactcgcgccagtgcgaggtctgtaaacatgcattctccttctcacccgtgtacgctgataatgctccgacaagacttcctttccaggaactgatggttggtgttggaatgaaagcatgccatgtgtttcagttcatccttcggcttgcctttgttctctcagtttggctcatgattatcccattcataacctattggatatggcggttaacatttgtgagaagtctcagtgaagctcaaaggctgttcctcagtcacatcagcgctcagttgatccttagtgattgccttcatgggttccttctctcagctatcattgtccttatatttcttggagccacctcattacgagactacataaggcatttgcgtgaacttggtggacacgatgctgagagggatgatggtgggcgtgaaaggcatggtgctcgggctgttaggaggctagctggtcctaataatagggttcctgcagatggaaatgttgatgaattagcagaagcccaaggaatcggtgctggtgaacttctgaggagaaatgctgaaaatgttgctgctcgattagaacgacttgaggctcaggttgagcagatgcttgatggtctagatgatgcagatggtgcagaggacgttccttttgatgaacttgttggttttggccagcaatgctatattcctcattgttgtgatctttgttccattctcattgggaaggattatcctgtactatctatcctggtttttctcttcggcttctactcctatgctggcaaaagtgatgcccttcacagaaacagctatttctatagctaatgatacattaaagagcgcacttaatgttgtgaagaatttttcttctgacagtaataatgaaggtgttatcgggcatgtgattgaggttgttactcaatccttgaagataaatgccactggacttagtgtaattcaaggcactgggaagaacagtctgatgaaaggaacaacaattgcctcatcttatctttcagatctgacaactcttgctgttggatacatgttcatcttctgtcttgtgtttttgtatattggatcactggctttacttcgatatgccaggggagaacgttttaccattggaagactctacggtatagctactatattagaggccatcccttctctatgcagacagttctttgctggaatgaagcaccttatgactatggtcaaagttgcattccttctggtcattgagcttggtgtatttcctcttatgtgtggttggtggcttgatgtttgcactctaaagatgctgggcacaacaattgcgcagagagttgaattctttacaatgtcacccttggcgagctcatctatccattggctagttggtattgtgtatatgcttcaaataagcatatttgtgagccttcttcgaggggtgctgcgcaatggagttctttattttctgcgggaccctgctgatccaaattacaatccatttagggatttgattgatgaccctgtgcataaacatgcccgacgagttcttttgtcagttgcagtgtatggaagtttgattgtgatgttagtcttcttacctgtaaaagtggccatgagagtagctccttcaatgtttcctctggacataaccatatttgacccattcactgagattccagttgatgttcttctgttccaaatatgcatcccattcgctattgaacatttcaagcctcgtgcaaccattaaagctcttttacatcattggttttctgtggttggttggggccttggcttaaccgatttcttactgccaaaatctgaagaaaacggtgggcaggaaaatttgaatgcaagggcagaaagaagagacagaggacatggtgggagggaaatggtcgccccacaggttgaacaactcatgatacaacatgttgccgcagaagataatggcaggggggattcaaatgaagccaatgatgtaactgaggactctgatgtagatgaccagggagactctgagtatggctttgtgcttcggatcgtgctcttgcttgtactggcatggatgacattactaatattcaatgctggaatgatagtttttcctatctcacttggccgtctggtttttgaggctgttccccgcctgccaatcacacatggcatcaagtgcaatgatctgttctcctttagcattgggtgctatattctctggagtgtggcagctgggaccagatatgcgattgattacatcacatcacgacagctggggtttttggtacaacagatctgcaagtggtgctcaattgttttgaagagctctgttctcttgtcgatatggatctttgttattcctgtgctgattggactcctttttgagctgctggtcatcgtacccatgagggtgcctattgatgagagccctgtcttcctattgtatcaggattgggctctggggttaatattcttgaaaatatggactagactggttatgttggatcagatggcacctttggttgatgaaagctggaggtcaaagtttgagagagttagagacgatggcttctcccgtttaaagggtctgtgggtcctccatgaaattataatgccgatcgtgaccaagctccttactgctctctgtgtcccatacgtccttgcaaggggcatcttcccgttgctgggttacccactcatcgtgaactcagcggtgtaccggtttgcctggcttggaagcctgatcttcagcgccctcttcttttggggcaagagatttcatgtctggttcaccaacctccacaactctatcagggatgaccgctatctgattgggcggaggctgcacaactttggcgaggactcacactcacctgagcggagtgaatctggagcaagtatagggtcagatgatcaggacagagatattgtactgcgagatcaggaagaggaagtggggttgaggatgaggcgcaataatatgcatgcaaaccaacaacctaggtttgctttataagtaggaagtagttttggacaaagagctcataaccatggtataagcttcggtctgcaggttctgcttgtgctttgtaatgggcgttgtagagtgagtttatgtgttagtgataggaaatagtctaaggactgttctacgataaagcctggagaaagctgaagtggctggtgattacaaaactggtggcaactcccattcctgtggtagtcctggctaactgtaaatatcgtttgacagagcattaccatgccaactcaatctgttgtgatcctcttgtaatgactagtgagttaaggtgaactgttgggtagatacgagatactagattattatcgcgttcactcttttttttttgggtcccatctttgtttttttagaaactgcaattgcattctgtttatatcatggagcatctagcggcttgaaatgaacaagaacaagatgcatgggcagtgggcagtattggttgtgg

SEQ ID NO: 39116 - DNA, 1144 bp, Zea Mays
ctccatcgtctggccaaccttctggccatgacatacacgcatggttaattagatctcgaacccttgtattcattcccatccgttcctgcttttggtcttgttcatccacagaccacagagagcccagccactacgtagatagatagatagatacatacatactcaacgaactggcggcgaggatctgaggagaattaggaaaaaagaagggtatggaacaacccttgaagctcaggagggatagcgcctaggaaaacacatagatcggagccggccgcgaggagaaagaaagagccaagagatatgtgtgatgaataatctacatggatcttggctagcttttgtgttctcctctggaggcgtggttctgtctatcaatctgaagcgctatctatcctgagctccacggcttgttcttaccacacgccggcggctggccggccggccggccgatcgatcgatcgatggagctccatcctcgctcccatatatgaataatgacctcttgccgtcgtctgcctcctgttcctgtacttgttgttcttgtgatatatgcagcatgcaggtgagcgtgcgtgagaggtcgtacgtagtctctcgtcaggtacacgcgcggacatgtcctcctagctagctttgcttgaggaagtacatacatgaacatccccagcactccagcagtacgtgggcattgctgcagtgtcctgctcctgcggccgaggcaggcgagcggcgcgcgggtttccagaggcaatgcaatgcaagagccctcgcgcgcccaccaccaccagctttccagtccggttgacgtgccttgatgactgccatttcaggacatgtaggtaggtaggtaggtaggtagggccccagagccgagccggatcttctacgccgccggacagccatacacccccgcgctgcccaagtgcccatgccgcccagttgctcacaatcgcaagctctcattgatggtggccagaaacaatacactgatctcgttcttctcgtgagagttttcaatgtctttctactagtactctaccacgtactgctgctagagcacaagtactgccgggtgatattaataagaatattactaatattaattgaaatccaatgtaccctgcccccaaaatcttcaatg

SEQ ID NO: 39117 - DNA, 2429 bp, Zea Mays
aaacaccgtcgagcggacctcggaagggaacggccggagtcgccggcacccgcgcttcgcagcccgtcggtcatgccgccgccgcagccactgcgtgccttatcttccttccctttacctcgccgccatcctacccatacccccgccactataaccggttgcgcctctacttccgaccgcctaccattcgcaatgccctccggcccggatgtaaggttcgtagtcggaaaccgtcggaaacccttggaccatttgccaccggcccaatgatatcgacctgccccggccgcggcaagatatcatccattgggagttcgaaactccatgtgacggtaaccagccaacctgtcggcatctccctcttgtcaattcaccgtgtcccgccgccgtgcgagtccggagttcctatctacttgatttctctgcatttccttctagtaggaagtaccattctagattggcgcgtcactagcacgatgacccatatgtcagtgttgttcttggtatgcaattctcctcagtagaccagttgcaatgctgaataatccacgattgtactaggctactagctgacaccttcgacatatgaggatgtttggtttctagggactattgtttagttctatcattttattctattttagtctataaattgtcaaatatagaaactaaaaagagttttagtttctatattcggtaattttgaaactaaaatggaataaaatgtagggactaaaaattagtcactagaaaccaaacaccccatgtatatatatttccagcgaggctctggtcatccaatcttccaacagctcatgccgatatcctaagtctccagagttagacatttcatgtatatatcccttcgtcctcagtttgcgcctgaattctcagcttcaccaaacaactgatgacccctgtagtctaattttttttgtccactaagctggattagtcctccaatctcattcaaatttctcaactgacaagaaccgcaaatcggagtactcgacccattccctaccccttcgagttcaaatatctgaggggtcatgggtcttagcgtgctatttccttgctgtctcctccacagcattataccaacttaccaacaaggtctaatcgccatggcttacctttatctgcctgttttgatcttccagttcatggtttgtttttgccaatccgttgacaggctaacacctgcaaagccgctcttgcatggtgatgttctcatatcaaatggtggtgtctttgctcttggcttcttctccctgaaaaactcaacttcgagctcatatgttggcatatggtacaacaacatccctgagcgcacatatgtgtggattgccaaccgtgacaacccaattaccaccaatgcgcccgggaagctagtttttaccaacagttctgaccttgtcttgttagactccacaggccacactatctggatgacaaaaaacaacatcactgcaggagaaggtggaactgctgccatcctgctcgactcggggaactttgttgtccaatcacaaaatggcactgacatatgggagagcttccattatccgactgacaccatggtccctgatgtaagtttttcattgagctcgtctgatgttgctaagcgccttgttgcctggaaggggcctgatgatccatccagcagcaacttctccatgggtggcgactcaagctcagatctccagattgttacttggaatgggacacggccatattggcggagagccgcatggggtggtgaagtgacattcggcacatttgagggcaacaccagcttcatggtgtacgaaacaatagttgacacaggggatggatactacatgaaactcactgtctctgaagggtcaccaagtatacgcttaactctggattacacgggcatgttaactttccgaagatggaacgtcaacacatcctcatgggcagttttcggacaattcccaagtacagcgtgtgcacattatgccttttgtggcccgtttgcctactgtgatggcactgagtctgttcctacttgcaagtgccttgatgggtttgaggcgatggtcttgatttttcccaaggatgtcggagaaaggaggagctgaaatgtggtggcggagataaattcttaaccttgccatctatgaagactcctgacaagttcttgtacatcaagaacagaagttttgaccaatgcactgcagagtgcagtaacaactgctcatgcacagcgtatgcttatgctaacctgcaaaatgttgacacaacgcatgacacgacaaggtgcttggtctggatgggggagcttatcgatgcagagaaacttagtaacacatttggtgagaacctatatttccgggtccccacctcaccaggcaagacctcaaaaccataaactgtgctcccttgctggagtgacaatt

SEQ ID NO: 39118 - DNA, 1508 bp, Zea Mays
aggtcttactgatgaagatgaaggcaatgggtttgaacgcttgaaggagatcgatcctgtggctgcgcagaggatccatccaaacgaccatagaaaaatcaaacgctacctcgagttgtatgcaaccacgggtgccctacccagcgatctgttccaaggagaggccgctaagatgctgatcttcaagtcctggacagttatgtcaacaaaagggtcgattgcatgatggatggtggcctgctggacgaagtatgcagcatatatgatgcggatgctgtctatacccaggggctgcggcaggctattggggttcgtgagtttgacgagtttttcagagcatatttacccagaaaagaatctggtgagggttcctgtgcaagcctgttaggtatgcatgacgatcagcttaagagcttgttggacgaagctgtttcccagctgaaggcaaacactcgtagactagttcgacgtcaaacttcttagcgtttctttttttttctccattaaataaaagagacggagattgcatcggctgagtaaagattttgggtggaacttgcatcgtgttgacgcaaccgaagcattcttctgtgccactgacgactcatggcaaaagaaagttgtcaaaccatgtgtggatgtcgtaagaaggtttttgtcggacaattccactgttttgccaagcacaagcgcaagtgacccctcttcaagagagctgtggacgcaatatgtgtgcgaggcctgcggcaaccgggtgctgcgaggtgcgcacgagtgggagcagcacaggcaagggcgaggccaccggaagcgagtgcagcgcctgaagcagaagagcctgaggccatggccatcgctgctgccccaagaccgcagctgatggtaactttttcacagcagaaccggcgagaagtgggacggggacgttgacgtggacatggtcgtctcgtcccacccaaaaaagcgtgccagcctgacagcgacatgctttcccaatcccgaattcctggcacgtcgacggggggactacctccatgccttttagcagcggaagaagcaggcaccaaagaactgcttatcaaaagtattgtaccacacgtacgacgggtctagaagccacagaaacgtagtgtggaagtggatagatacttgaacaatggtccatctttctatactgctaaagtttagcatatgctaaggaggtgtttaagattgctaaaatctctattttcaaaaccgaagtattgcaaatactgtagttattttaagctattctaaacttaggtctggaccttagtttgcaaaactgtattgaccacagtttgtaaaactgtattatttcaaactgtggtattgtaattactaaagtaaaaactgtattatttcaaactgtggtattgtaatgactaaagtatattatagtattttaaaaactgtggtttctaaaatgggcttaaactttggttaaactttagaacttgagacatgtttgatgcaagtgtttaaca

SEQ ID NO: 39119 - DNA, 2075 bp, Zea Mays
ttcacggttagttcctatcatcagttcgtcacccatttgaaccttgctggcaagtctatttgtcgtttaattggtcttggggcgattgctgcatcagccaaaaaactctttcccaacatcaccagcaagcatgtataaattagtttttgctcaatcacgcgtcagaaatgtataaaatagttagatgagggacgtttctgcgccattcttgcctacccttctcgctcagtgaagcacgagcgaggtcagtaatggaggcggcgctcctcgcggccgcaggcaccggtaggaaggatggtggtagtgaggagagcggtgtggtgtgcgaggtgaagaagcagttgtacctcgccgggccgctcgtggtcgggttcctcctgcagaacacggtccagatggtgtccgtcatgttcgtcggccaccttggggagctcgcgctggccagcgcctccctggccacctccttcgccggcgtcaccggcttcagcttgctgatacatttgtcaggcaggcatggcgtgcagcctggacacgctgtgcgggcaggccttcggtgcgcggcagcaccacctgctgggcgtccacaagcagcgggccatgctggtgcttgctctcgtgagcgtcccggtggcgctggtgtgggcctacaccggcgacatcctggcgtggtgcgggcaggacccggagatcgcggcgggggccggcagctacatccggtgcctgatcccggccatggtcgtgtacggggcgctgcagtgccacgtccggttcctgcagacgcagaacctggtggtgcctgtgatgctgagctccggcgccaccgcgctgtgccacccggccgtctgctggctgctggtgcgcgggctcgggctgggctgcaacggcgccgcgctggccaacgccgtctcctacctcgccaacctctccttcttggccgtctatgtcagggtggctccggcctgcaaggccacctggacgggcttctcggcggaggcgttccgcggcgtccccgatttcctcaggctcgccgtgccgtcggctgtcatggtgtgcatggagtggtggtccttcgagctcctggtgctactgtccggactgctccccaaccccaagctggagacggccgtgctgtccatctgcttgaacactagctcattggcgttcatggcccctcttggacttggtgctgccataagcacgcgtgtgtcgaacgagcttggagcagggcggcctcacgcagcccgactggcggcccgggtggtggtgcttctggcgctcatcgtgggcacgtcggaagctctggtcatagtgctggtacgcgacctgtgggggtacgcgtacagcagcgaggaggaagtggccaggtacaccgccaggatgatgccggtcctcgccgtgtccgtcatgctcgacggccagcagtgcgtgctctcaggtgtagtgaggggctgtggccgccagaaggccggcgctttcatcaaccttgccgcctactacctcgccggtatccctgccgcgctcgctttcgccttcgtgcgccgtctcgcgggaatgggcctctggttcgggatcttgtgcggcctggtggtgcagatgctctcgctgctctccgttaccttatgcaccgactggaacaaggaagcactgaaggcgaagaacagagtcttcagtgtggctcttcctgcagacatggaaacatgagattctgtctgggattgccagacacctgttcatgttgctgtgaatttctccagcaggctcaaccggattgatcattagttaattgataattgatcagtgactgtctgtctattccggaagaaggattaaacatagttggatgaaggataaaatttctgaacgagtctagtaccagtttggagtgcagatggatattttcatcgaatgtggcgtcgtaggacacataagcttcttctctcgatcatacatctaaattaagcacttgctatgccctttatatatatatagagtactataatatccgagacaatccattgttttaaacagaactgaagttcatgtgtgttatatggacgaagattagactaacagtg

SEQ ID NO: 39120 - DNA, 1024 bp, Zea Mays
ctgagctgatcacgagtctctcagcgagtgctggagagcccactatgtccgccgccggcggcgacctgccggagactgtggaggtgacgctgcgcgccgtcggcccgtcccgtccaaccaccctccgcctccctccgcttctctcggtcgccgagctgcgcggctgcatcgcgcgcgaacgccgtctagcaggcacggaagaagttcgactccgcttgatcctgcgggggaagacgctcccgcaccaagacgacagccatgtcactctccgcgatggggatactcttatagtcgccgtggcacctaagcctcctgttaatcatcttcttgatgatgacgttgaggacgaagaagaggatgaactgaataccacaaacgacaaccttgtggaagaggaaattttttatgtttcttcgagacaaattgagattgcctgatatcattttgatggcgctgttttctctcagtatgaaagcatggattatcattgcaatgtggttcctattggcaccgattgctcagaagtacgacattggacctttatatataattggtactggtttcttgatcatacttattaatctcggaagacgacagcaaggtgatgttagtgcatactccatattcaacgaagattttagggagctgccaggaacacttaatgcagatcgcattgatgcagacatccgggcaggtcaattttaagcccttactgggcattgcagagatagggaccatggtatgctgagatttgtacagaagcgtactgggcattgcatttgtttgtgcatggaaagcagtgtggagataaaggctgtgcccctctaaggttaaggtcaaataaatttctgacctgtaagtgaaaatgttgcctggttacaattggaaattaccgtgatactttgcagatctgtacttgtgaaaccaaaagagcagagtagcttaagactggcaacaaagtgattttattcctctcttgcaagttcttgtgtccgctatgagccacaaagtcctatatagcaac

SEQ ID NO: 39121 - DNA, 1308 bp, Zea Mays
acttcctcctgacctttttgagtctcttcttccacccggcggcagcgggcagcgcaggcgagcagaccaagtcgcctgcagagtgcagactgcagatacagtccgtgctctgacggagcaacaggagaagcagagcgagccgaggcggagtcgacaggcgagtggttccaccgaccgtctcccctgccgcaagcgaacgggtgagcggggcgccgtggatctgatgtccctttgagattctactctgcttctgttctccctacagcttggtgccttatcatggaggaagcggggaggggctgcggcttgctcaaggtggttgtgacgcacggccggaacctagccgtccgggatttcacgtccagcgacccctacgtcatcgtccacgttgccgacaaggtgagttcaattaaaagaagagcgaaatgaaggatttatgctgcctgcgcctgaatcgctagcaaagaaactagtatcaattatgctgacacagcaataatgttaatgtctgtcttggggtgctgattttggaaagtcagcttgatctactggtccaggtggttattcatacttaaataaattgtaccaaattaagtgtcttaattgtcatttcttctaggagtagtataatatataacacctgtctgtctcttccttcgctcctttcttttcttgtaccatgcagaccacaaaaacaaaagttatcaacagttgcctcaatccagtttggaatgaagagatgacattctccatgaaagaaccagtaggaataatcaaatttgaggtgttcgactgggaccggttcaagtacgacgacaagatgggccaggctttcctggacctgcagcctgtggcggcggcaaccaagctgcggagggcgctgcggctcacagctggcgagaccaacctgcggaaagtgaacccggacgccgacaactgtctgctctcagatagcttcgtgacgtacgccaacggggaggtcgcgatagatgctaggctgcggctgcgtgaggtcgagtccggcgagctgttcgtcactataaagtggattgaacctgacagcgccaacactggaaagcaagcggatcactagctagcgatgcattttgcttgcagcactgcaaatatgtaatatgacctgatgtgggctgatttatgaggattttttttaaatcgtatatttttattatcaattacaatgtagaaggtgttgtatgagaatttgagatgcatcatgtcggtcatccagtgcccgacgtgtcacctattagcagcggctatcctataacaacgcatgttttagacatt

SEQ ID NO: 39122 - DNA, 2441 bp, Zea Mays
atgtggcttgggcaaagccacgtgggggcatggtcgggcacgcgacgcgcgcgccagggtggttcgggtgatggaccgttgggtgtatactcatacatgggtgacgcggttatctctgccaaaaatggccagcaagcatgggcttatcttgaagataagggaaacaacatagatcttgttttgactgaggtttttatgcccggtgtatctgggatttctctgctgagtaggatcatgagacacaatattttcaagaatattccagtgattatccagtggtagtggaagtgaaagtggcattcagacccagaagtgtgccaaatcaaaaggtgtcaatgaatccggtaacaacagtggtagcaacgatgacgaagcaggcatgggacttaatgcaagggatgacagtgataatggcagtggcactcaagcacagaactcgtggactaagcttgctgtggagatcgacagtccacaagctacgtctctggatcagttagccgatccacccaatagtacctgtgcgcaagtaatccactcaaagtcagagatatgtagcaacagatggctaccagataagagcaacagaaactgcaagaagccaaaaaacactaatgatgactttaagggaaaggacctggagataggtggccctgaaaatttatatatgggtcaccaatcttccccaaatgggagatccatcaaagcagcagatcatgaaaacaattcaaaggaatcaatgatggaaaatttagaggagccaactgttcgagctgctgacctaattggttcaatggccaaaaacatggataccccacaggcagcaagagctgcagaagatacccctaatttctcttccaaagtgccagaagggaaaggtaagaataaccagaatgataagtatgttttgccatcacttgagctgagtttgaagaggtcgagatcatgtggagatggtgccaacaacaaaaatacagtcaaagacgacgaacaacggaattgtgtattaagacgatcaaatctgtcggcttttacaaggtaccacacatctgcggcttccaatcaaggtgggacaggattggtaggtagctgttcgccgcatgataacagctcggaggctgtgaaaacggattctacctacaacatgaagtcaaattcagatgctgccccgataaaacaaggctccaacggcagtagcaatgacaatgacatgggttccactacaaaggatgttgtgacaaaacccatgttgccctctgctattaaggctaatggatacacatcagcgttccatcctgtgcagcagtggatggttccagctaatgcaacagcagggaaaacgaaggctgatgaaaatacagccagaaatcactgcgtccattttgagaatggtgggtcaggagccctgcaatgtggttcctccaacgtatttgatcccccacttgaaggccaagctacaaataactatggtggtgtgaaagccgggagcaactcaggcagcaacaaggggcagaacaatgggagtacggctgctgcaaatgctggactggcagaaacggagatacaggccatggacaaaagtggagttggaggtggcaatggcaatggcaatgggagtggcagtggcagtggcaatgacacatatgtcagacggcttgctgcgaacatgacaccgcgacaagcacagctaaagaaatatagagagaaaaagaaagaccggaactttgggaagaaggtgcggtaccagagcagaaagaggctagccgaccagcggccacgggttcgtggacagttcgtcaagcaagctgtgcaaaatcaggacggagctagagagagatgaccgacacccccccccccctcccctgtggctgtgctgctctctggcttcagctccctactgactccgactccacctctgctggcatgcatggttgccgctttggactcaaaacacttgacagttagacgtgcggttgatgattcttccttctctcgtggtgtggactgatatggtcaacaacacagcctccttccttttcatcattggtttcttcacatctagaatctactgcctgaccgggaaagaataaacaaggaacttcttcttctatacatgtgtatgtatgtatgcattcctaagcatgtaatgtagaagaataagtgcgtggcttgactctagatggactttaattttagacagagtcttgctcgctctcctacatcatctagtgtaactaaagtgttgtcatgtatggtcttggatcactgtctatcaatatattatatcgtggcgttccttgataagtctgcaggcagaagcatgacaaaaattcagggagggccaagaaaccatatgacaaaatcaaccaacaccgtaaaataactattgtcatatagaattcaagttttatatcaatacatgatacaagttcaaagaagtaaat

SEQ ID NO: 39123 - DNA, 418 bp, Zea Mays
caacgaacagggtgggcgacaccttaccgacaatcacgtagtgaggatccccacccacggtgagcgcgcggtatgactgtgatgcatgaacggcaacgagcaattacagcgacgttgatcatatttgtgctaggcggcatccctgaacacggttactgtcatggggtgatcaccctgggtcaccaagcacgatccaattggccacgtggccgaggacccaaggtgacggcccgcagctccctctgcttggccgtgaggcggcaccaaatcctcccatctccatgtttgttccattgacggcacgccggacacatccactaggatagggctagacccccctggccgcgtgcttgatctcgaatgagggtgatccctagaatttgttctcagcggcttcctctgctctcctttctcggag

SEQ ID NO: 39124 - DNA, 556 bp, Zea Mays
aaaacaagtttcatcatttttagatttttataaataaaactatgtagagaagcaagttcgtttattctctaaacctctttttaagatttaatttgcacagacaaaaacgtctactaaaacaggtcatattataaatctaataggtagggcatttcatatggaagctaacgaaataagtcttactattttaggagctcccaaactcgagttatagattttagaagaaagtgcaagaatctgaaatttcagtacacaagttcttgacccggagctcacctacaccttgctgtcgtagaggagggggagacgccatgggagcgctgccaaggtgagggaggagcatgggagggttcggtcgccagctccatgggaggaggctgctgctgcatggggagctagagagagagagatagagagagagagaggaagggagtagggagagtggcatggggagagggagggagaggaaatggctggatggggaggtggcgtggggatttaaaggagaagaaaaggggctggtttgattgcttagaagtgaagcaaggggttgctt

SEQ ID NO: 39125 - DNA, 2356 bp, Zea Mays
catcatcaatcaggcaagcgacggtggcttcttcctcccccttcaccgtaccgagacccaaaccaagccgcctcgccagcacccagcagcccgcatcactcgtctccattaaaatcggttttctccttggaaatctgctgccaaatcgggctatagatcaaacgctgcactgtagggagcgtgaagccagcggcgaatggaatccctagccgccacctccgtgttcgcgccctcccgcgtcgccgtcccggcggcgcgggccctggttagggcggggacggtggtaccaaccaggcggacgagcagccggagcggaaccagcggggtgaaatgctctgctgccgtgacgccgcaggcgagcccagtgattagcaggagcgctgcggcggcgaaggcggcggaggaggacaagaggcggttcttcgaggcggcggcgcgggggagcgggaaggggaacctggtgcccatgtgggagtgcatcgtgtcggaccatctcacccccgtgctcgcctaccgctgcctcgtccccgaggacaacgtcgacgcccccagcttcctcttcgagtccgtcgagcaggggccccagggcaccaccaacgtcggccgctacagcatggtgggagcccacccagtgatggagattgtggccaaagaccacaaggttacgatcatggaccacgagaagagccaagtgacagagcaggtagtggacgacccgatgcagatcccgaggaccatgatggagggatggcacccacagcagatcgacgagctccctgaatccttctccggtggatgggttgggttcttttcctatgatacggttaggtatgttgagaagaagaagctaccgttctccagtgctcctcaggacgataggaaccttcctgatgtgcacttgggactctatgatgatgttctagtcttcgataatgttgagaagacagaaactacaccggttggtgcatttagaaagtatatgttatccattgggtcaatgtggaccggcatgcatctgttgaggaagcataccaagatggcaggtcccgactaaacatgttgctatctaaagtgcacaattccaatgtccccacactctctcctggatttgtgaagctgcacacacgcaagtttggtacacctttgaacaagtcgaccatgacaagtgatgagtataagaatgctgttctgcaggctaaggaacatattatggctggggatatcttccagattgttttaagccagaggttcgagagacgaacatatgccaacccatttgaggtttatcgagcattacggattgtgaatcctagcccatacatggcgtatgtacaggcaagaggctgtgtattggttgcgtctagtcctgaaattcttacacgagtcagtaaggggaagattattaatcgaccacttgctggaactgttcgaaggggcaagacagagaaggaagatcaaatgcaagagcaacaactgttaagtgatgaaaaacagtgtgccgagcacataatgcttgtggacttgggaaggaatgatgttggcaaggtatccaaaccaggatcagtgaaggtggagaagttgatgaacattgagagatactcccatgttatgcacatcagctcaacggttagtggacagttggatgatcatctccagagttgggatgccttgagagctgccttgcccgttggaacagtcagtggtgcaccaaaggtgaaggccatggagttgattgataagttggaagttacgaggcgaggaccatatagtggtggtctaggaggaatatcgtttgatggtgacatgcaaattgcactttctctccgcaccatcgtattctcaacagcgccgagccacaacacgatgtactcatacaaagacgcagataggcgtcgggagtgggtcgctcatcttcaggctggtgcaggcattgttgccgacagtagcccagatgacgaacaacgtgaatgcgagaataaggctgctgcactagctcgggccatcgatcttgcagagtcagcttttgtagacaaagaatagtgtgctatggttatcgtttagttcttgttcatgtttcttttacccactttccgttaaaaaaagatgtcattagtgggtggagaaaagcaataagactgttctctagagaaccgaagaaatatggaaattgaggttatggcttatgactgtcgtttgttcagtatgaaactagatttccaactgtgccttagaagtttgcaaatgtcttgttatataagggccggctcagtagactagtcatgtcttttaatacaactcatgtggtcctctttgttgcatattatattgcatagttatatgttagtgatactcctct

SEQ ID NO: 39126 - DNA, 3217 bp, Zea Mays
ccaagccccaaacagctagctcttccccacttcgcctgcggcggcgctccctcccgccggtttgctcgctgggccctggcgcgttcgtctcaacgaagcactcgcaccgccggccaccccgaagcaatcgccactgctatctcggtgtcctctccctccacccggactcggattgacttcctatctctcgtcgggggccaagcatgatggaggtgggtttgaacccgggggaggagctggacttcggggacaaccaggaggacgacgacgacgcgggggacatctcacccgccagcaaggagctggccgccatggtggcggcggcggcggcggcggagacagtcgagcttgacgacggcggcgccggtgtcgaggcggccgcctccgctgccgccgccgcgtcgtcgtcgtcagcggcggcgcggtacggggacgaccgcacgccgcgggacgggatggtgttcaagtcctacgaggaggtgctcaacttctacaagcgctatgccctgcgcacgggcttcggcgtctgcgtcaagaagtcctccttcaccaaggccggcctctgccgccgcctcgtcctcgtctgcaacaagtggggcaacggcaaggaggacgcctgctaccaggccaggcccacggccaagaccaactgccaggccaccgtcgtcgccagactcctgggggacgacttgctgcacctcacggatgtgaacctggagcacaaccacgcgctcaacccatccgccgcacgcttcctcaggtgctacaagacgctgcctagcgggttgagcaaagatctcgtggtgagggctgccagaggggaatgctcggtggcgggtgacatcgatgtcccgatatttgatgaatgggggcggcttaagaccgggcaagctgatgtcctggccatcaacgctttcttcacccagatgcaggcaaagcttccaaactccttctatgtcatggacttctatgtggagggccatctgaggagtgttctctgggctgattccagatccagggcagcgtatcagtatttcagcgacgctgtttggattgatacggcatgcttaaggaacaagtatcatgtcccgcttgtttcgtttctgggtgtcaatcatcatggtcagcttgtattgctaggctgtggattgctgtcagatgagagcacagagagcttcttgtggctgttcaagtcatggttaacttgtatgaagggacagcctccaaatgccatagttaccgatgaatgtgtggcgataaaagccgcagttcgagaagtgtttccgaagacacgccatagaataagtgattggcatgtagtgagaagtatttcagaaaaaataggtgacttgccagaatatgaagcgatgagaaccaatttggttactgtaatatatgattctttaaacgacaatgagtttgaggcaaggtggaagaactggattgatagatttagccttcaggataatgaatggatcacctttctgtatgagaatcggcacttgtgggcccctgccttccttagggacactttctcagctgggctctgtactgttagccagcgtgaaagtccaagtacattttttgaggatgcagtcagttcagagaccacattggtgacgttccttgccagctacatgacacttttggataacaaatacaaaatggagcaacaagatgattttgattcattaaatagcagcaggctcctgatatcaaagtaccaaatggaagaacagctatccagattgtacaccttgaatatgtttatgaagttccaggatgagctaaaggcaaccatgcattgtcaagttcagctggatgggtcagcatcttcttttatagttattgatttgactgaagcagggagtgaaatgctgaataaaaagtacgaggttgttcactgcatggcgacaaacaggatggagtgtaactgtggcctatttcagtttcatggtatcgtttgtcggcatgcattatctgtgcttaaatggcagcaagtatacgacatccccccttgctatgtacttaacagtttcttcgtctcgtcgagattgggatggtatccgacgagaagtataggcatgcagtaaggcttcttaaagacatgaaagagactcttcttgatgataatctgtgccgtgatttggagcagaagcttacaccagctgagcgtgcaattgtgaatggtgacaaccatacacaacctggttcatctgagggcggtgctgcaaaaaagcggcgaggccgtcctcctaaaaagaataaagagataaacatggattccatggaccctttactagtatcctcggatgtaactcagaaggacacttttcattctgcttcaactacctcaaaccttggcactcatgtccggacgcatggcattgttgatctcatggaagaagtcaatccaagcgagctgtcatttgatagccgttacggggtgcaatctggccactcgcaccattttggtaataaccaactaaatacaggaaacacactgcggtttggccaatctacatcagcagcagagcagtctagggttcagtgggtgtttcataatggcatgtatcaggatgaccaagtgacttacggcagacggacatcataacaattggacttgttaggctccagggtttgccgtttcaggaaatcgggtcaggggtcctcggtttttggactttggagcaccgatgacttaagtgatcctccattgtgcttcgaacgttgagccttgggagatgcatgctggaactggctgctggtgatggtggcggcggcggcatctgaaggcaggatacactgtagaaacagaagtttgccactaagccagccgaacgcttccataagccatcaatgttagccaactaactgacatgtgtatatacacacacatcatctcagaaagaagccgtcattccgtgggaagtgctgcgtaaactcctgataataggcgtggtcagcgtcggacaagaaattgagagcttcattttctttctttcacgtgggaaagatacaattttgttgcctcctgacgatcagctaaaagggggaggaaatatccatgctcttcatctgggaaagatgcaaaaaccatccagctttatcatctttgctccttcagtaccgtgcctggaatcctgctttaccaatttttagcacccaaaaaaagaaaaacaaaaaaaaactatctgtggcgccccttgacacaaac

SEQ ID NO: 39127 - DNA, 1793 bp, Zea Mays
aagatgaatgtttaactggaactagcgagtgtgataaaatgttccttatcggcggaaggggcagatatttttcggttctgtgacggctttccgagtttggtggattgtgtcgagagagtcagagagggacaccaaagccggctacggccagtccccagtcagcctagcttcgctcgctgttcgttcgtcctgatagcttgaaaccgccatggccatggggctccccggccaccgctgctgccgccttcccgctctcgggtcggtcactccactctgtcccgccctcgctcgcaggcccctcccgcggacctcggatctccgctactcctccctcgaagcccaagctggggacactattggggaggaggtcctgcgcatgttccttgaggagaggcaactgcacggcgatttcgtcaccaagatctctgacatggtctggaggaggaatggcggcaatgttgatgcggttgaggcgaccacagaccaaggcaatgctgtagatgttgctcagcctgaagacgtgcgggaagatgttgtggacgacggaatgttgagactagcggcaaccagaggttgggtgcccggtgacagcagccctcctttgagcaagaggctttcagctaaggattggcagaatgagagagacaaaaggaaggagctgaatcttttgaaatatgaagcactcaaggatgaattgctgctcttgaccacagggattggagcagcatgtagtttatactgtctcctggttttctctctcgagtgttctttggtaagtgatttattaatcatctcatcattaattggacatccagacacctagcgaagaccatcagactgctgtcagttatgctttgggggttggtttcagctgcttgtatcttcaacttctgtgtcaacatgctgataacctatcaaagcaagatattccacaagtttttctaaagaagaaagtgaagaaaattggcattacaagtgaagatttgaagaatacaatagagaagacattgggtggtggaagagtagctctttcatccccaaggcttgtgattcctgccgtgatttttggattgtcagctttatcagaccacttcaaaaatagttttttcagttttgaggttcttccagggatgatgggtttcctcgcatacaaggctgcagctttggttcaggtctacagagataacgaggatctccgcttgatacttcctgaggaagaggatgctgacagtgaaagcacttgatgcatacaaattagagattatgttaacctgttgataaaaacagaacggtctgatttactgagtcatgcttcagttctgaaaaaaaatctcttaaggatatcctaaaattcgtttgcttgaacagcctagtgccaggagtccaggacagctcactactattaaaatgagatgtaaaattacctgataatgtcataatttttcacaaaccaaacaacttcaactcgtcatagcaaggcttctgattgttaacccagacaagagagtttttttttactattatgatactcataagaagtggcttctctacaatagtatcaatagattggaattctctataatgatatttgtaagcgaggaacttctccaaaacggtatttcaccaatacttattgtattttcttattttcttttctaccatctaaaacgagcacaattcctatagttttattggtgcacactcaagataattgctcctgtatgcctcgcaaagatggaggtgcttattacaatagacgtgcttaggtcctgatgctagtggccaacggcgag

SEQ ID NO: 39128 - DNA, 6495 bp, Zea Mays
gtgagaaaacgcaggagactaacaaatggtttagcgtctcctcctcctgatcacacagcagacagaattgaggaacaaggatcttgaaaagcaagtaagatttttccagagcagtgtcgctcaagcgtttgctgaacgggacagttcattaatggagtgtgagaaagcaaaagagcgggaagaagcagtgtcaagaaagtttgctgattttgaggaaaggatgagagaatatcaatcagagattgatgaacagaaacacttaaatgatgacttgcagagagaactgacagaactgaaggcacatacagaattgtccttgaaaagactctggatgttcttcaagccttactattgaagagaagtgttcaatccttcttggtgattctgctgacaattggagttttagctctgatggcggaacctcaactttgaagacttatgcagttatgctttgttcccagtttctcattcaacatactgctcaatacatggatagaaaacatccgtattattgatggaagtcataaatttagtgctaatcttctcatttgtcctattcagtaagttatagttcagtatgattgtcatgttctatttgacctaattgtgtcatgtacttgagtaatacaacatgacttgcaggccctaatttgttttcaagaactgtttattgattttttttccagttgatttggtcctaaaccaaagtgctttgcatagttaaggcgagtgtttgacccccgccttaccttcgaagcggtaaagtgtaaggcgagacaacaccttaatcatatataaatataggaaaatatagaaaattagtcttgaatagaagtacgaaagtaccaaacagaagtctataagttcaatataagcaaacataataggctaaaagtccaacataagtaggttctgatactctcatctctcaagttctgatacatcatcaaactcatcaaaaatgggaggattactgtcttcttcgcgttctctcccaccggatatatcatcatcttcactcacattcaagtcatctttcgcatgattggttgccgcgtcctacccgcccagactcgcggcatgcgttggccgggcgcgagcgagtgtttggttgccgcacccacgccctccggactgcatgtgcgcatgcagtttagtgctttttttcgccgttctgcctgcaagcgtggagaagccggaaattaccttcgctgggggaccaggcccgcacgaggcaggcacgtgacagaccggcaaccaatcagcccccttgtggatctggctcaaagtcttcgtccatggcacctccctcttcttcttacggcctcattcttgcatgctttctctatgtaaggccagaactttgtctctgactagcttgccttggaaggttgtgccctcgaagcgactccgatgctctagtagcaacatcaacatgatccatcatgtgaggtcaacaatattatcattgtccctgctggggtgtaccactgatgagtatccactcgttgtcccaatcaaaatcctcaataattaatgggtcatagcttgtgccggctttctccctcatttgaaacctacttcgcatcttttgattgtatgaaacatagaccaagtcattcaaccttttatgcaacaacaagtttctcttctttgtatgtatagtaagtaacaaacccaacctaaataagtagcaagaaatagattgaagctagtaaacataagcgaagtagcaaaaaatggacttacaaattcaaatgtgcttcaattcctctcacaaccggatgaggaagcacaaagtctaaccagtaaccacacgcttggcaaacctttgaaattcatatgctcggccgccatatgaacgttatcaatcaactacgcagatgcaaacagcgacacggtcacacacataggtatacaacagcaggaaagaataaaaaaagatgtgctgaaattagcaatcagccaagcatatagtactttagagggctctttgcttgaatgttttcaagtgccaacttgtttgaaaaatagaccctctatgatcttcataatgcatggcatgctcattaatcttcgaccgtatttcttcattggactccattcttgctagcacataattgaaacaactcctcagctttacaacatatctatcatctccctttggatggcaaagaattttcccaggttcaaataaagtgcagcaccatacgatggatggtccatttgtttcatccaacgaccctcaataatgtccataattttttcagcaatgcttgcttgttttgtgtagggaagctaagccttttctcttttgcaacatccattagtgctgcaatttatgtcatgtatgttttttcatctccatcaactgccctaagcactataagaagtgccaaagctctgaggcaatcttcaactgaagaccaaaaagtcttagctagaataatattacaccccccttccagcctctgtctttgccaacttgttgcagttccatgcatctcacaaaaagtgctctcaaggcatcttgatgtttatgtagacttttcaaagtaaggaatgtggcaaaacgagtggctgctggtcttaaaggatccccctcctatcttctccctcattgcacttagaattcctccatgcctataaataaaagtggtgactcttttggcttgtgcaattagtctttcaaatatccaatatcctccaccatgaggtccaaacaatgtgcagtacaaggaccctagaacaatgttaaaatactatccattagaagcctacccactgccttatatttttttctcgaatacgcaggagagctgcgtatcaattcattaatagtagaggagaaatatatatacaagaaaaaggcccacacacttgcacacacccactaggaacagaactgcaagaacatttgcgcctgttacagcacagaaacgaccctacacaacaactaaaatcggtatgccgtagcctccagaagctgcagatccttggcccctgctgcactccaacacaaaatctcatcaccagccaagcacaaggcagcagccaatcgtggaggtttgcgaccaaagacattcatttctgtgtctccacaaggtccatgcccctaagattatgagagagttaaaacctttctgaatggagcttcgcatagagctggaagaactgctccaccaatccaaaaaggaggtcgcctcaggctgaggggcaagaagtgccaaacccattcggctaagaaaaaagaaccagaactgacacgaaaagagacaggagacaagaaggcgatatagcgtttcacgttcttggtcacacaacacacaagcttcagggtgtggcagattcgtcctttcaagtcgatcagatgtccaacacctattgtgggcagccaaccacatgaagaaggcacatttaggcggcacccacaatttccagatacgctcccatggttcaaagaacaacgagctctgcatgagagcatcatatgccgatcttgctgaatatgccctgacggagagaggctccaaaaatgtctatccggcatttccagcacccctggctgaagctgcaccacgtgtatagcctctcaaataccaagaaactcttgctaactctgccaagaaataactccatggatatcgtggacccatcttgaatctgttagagcatctaggaccatccttcgattagctattctggtgggaatcatactatgtataagtggtgctagttcctttaaccgctgcctcatcaaccatctatcctcccaaaacaaggtggtgctaccatcgcctagttcagtagtcacggccatgttgaaaattccttgcacctgtttatttgcttgtagcttgaaggcagcccatggtctctgtcagcctttggctttgtggaagcagcctccttagtggtttggtatgaacctgaagaccgcctatcatccacaacctattcagggattctctggagcatgcttgcgaccttcccaaccacttttggcatgttttgggcttagttgtagctggttgcctaaactgaaaggcggctctcctccgtttagcagctgtcccggaacttggctgcacaacggagcaatcagattcattctgtcctagcctctgcccctgcacctgcccatgtactggaccaatgttataaggaaaataggcctgttcctcttcttctccaagtaagctgtcatctcttttctaatctcagtggtggtgttgaaacacatgactgtcctcatatcccccggcaaggtgttctttataccttttaattccttctttgttaccatgttgcatcggatgcatgtcaccttatcctgattccctatttctgtccaataaccgtacttccagcctgggtcattgaattttgcctctggatcttgcatggggtgataaggatcaacatcaatgggagcagcagcagcggatgcggatcagacactctccatgacaatggcttactctgtacaggtggatagtaagaaaaaggcaaaggttcagctcactaattaacatcagagagtggggaacagagcagcacggaggcccattatcttgcaccggatttaaagcagagggctgctgctaggatgctggcctgcccgccctgtctggctgcgccagcgccacccctcctgcgtggccacaccccactcctccctgtctgcgcctgcatgccttgcttggcccgtgccgcccacctcgctgtgccgcccgtcctgcctggtcacgccactcctcacccctccttcgaacagaacaggcgcaccgcgcaactcagcctttgaacagagcagcctccgcccacaaccagccgccttttcattcccttattcccataatgcgacaccctagaaccgctttacggacgtctgaggtgccagagcgactagacggtaaggaagatgccttagtgtcaatcttaaggcgggtaaatcacctcattttttctgaccgccttaccgcctaagggacgccttaatagtttgcattagagattttcccttcaatgtatttgacattttttgtaggcatctttagaagaggagaaagagtcacttaaagctaaaatatcgaagctgcaaagcaacctaagaatgggccttgaaattgaacaacatttgcaaagaaatgcacgaatattagagaaaagacaggcactgtatgatggattcctgagaaatggattgtccgaacttcaaaagttctacacatgtcaaaaggctgaaattatgaaaatattggaagaagaatcgttgcggttgatgaaagttgttgcagagattcaggataaactaactgaaatttgtatcaacactgaagttagtgaccaccctgccgatgagattcaatgttgtgacagcagttgtaaagatgtgcatgttactaaagatatcagtcctagcacatgtcgtaagagtgattatcctgctgatcttaactccgtgtcgtttgatgaatctaaagcacttgcacaagccttacaggagaagatggaagcacttatgctcttctcacaggaacaagaaagatacctattagagaaacagagagacctgattgttatcgaggaactccagaagaacttatctcaagtagtacctctagaattcctacttgtcattatttttcaatcacaacgtactatatgacgagtgttctaaatagtacaagtatggtttgtcatgaagttgatacttcataccattactattttgtgcattttgctcctagctgttggaaaggtaaaactgaaccatatgattcttttcgaaagtatggattaaatgactagagttagttttgaagtttgaacttggatttttcttagggaagttcgtcaatatattatggacttgactattcacactgctaacactggtggtttgccagtagtgtcatccttgataagttgatatacagtaattagtcacatttacttctttagtatatgacctatttttaggtgtgagtttctgttgcacatcagcacactttagtgttggatgagtgtgtcgcttgactacttcatcttatgtgtacaggttaaagatgaaaaggtgaaggtcctgatggaattaacaaaactaaaagaacaatatttgctattgaagggctctgctgtcaaggaaggtcatgatactggtgattcatctaaactcattcctgggcatgaccaacaagggatgctgaagactatgctgaagaggacatctttaagacactggatgaggaaagaaagtaatactattggacatgggagctctgatggaaatgatcatacagtttgcaaagaacattcagtggatgttgcaagattaagagttgaaaatgctatgcttcttgaaggtgttggtactgttgagcatctcacttcttcagtgcatagactgcatattgtgcttttgaagacttgtgacgtggatgcaccaaatacatatagattattgagatggttggaatttggagatgcgag

SEQ ID NO: 39129 - DNA, 3538 bp, Zea Mays
ctcaggcccggcccactcggttttcttccacgccaatgttcgccaagcggctcttccacagggcactcgtgcatcatcatcagggagtaggaagaggaggaggaggaggagcctcagcaccagcggcatcaccagcggatgccatccaaatggacgcgcagatctcgactcactgcggggtgccatacacagcttcactactcgccttcgatcccgtccagcgcctcctcgctgtcgcaactctggatggtaggataaaaatatttggcggtgataacattgaaggcctccttatatcaccgaagagtgtgccgtacaagtttttgcagtttattacaaaccagggacttctggttgcaatttccaatgaaaatgaaatccaggtatggaatcttgagttcaggcaactattttattcgtcacagtgggatgtcaacattactgcttttgcagtcatagagaggacctttatgatgtatcttggagatgagaatggccttctttctgtattgaagtatgatgtagatgatgggaagcttcaaataatgccatacaatgttcatatccattctctaatcgaaagatctggtgtttcgttacaggatcctcaacctattgttggaatactgatccagcctgacacttttgggacaaggttgctaattgcatatgagagagggttgttggttctttgggatgtatctgaggaccgtgcagtttctgtcagaggctatggggatttacgcatgaagggtcaaatcaatggtgctcagggggattctggtgaagatcaactaaatactactattgatgacagtgaagaagaaagagaaatttgctctctttgttgggcttcaagagagggctcaactgttgcggtgggctatataacaggtgacatacttctatgggatatgactacaaaatcctccagacaagagaagcaaagtgatgtttcatctaatgttgttaagctacagctggcctcagggagtcgtaggcttcctgttattgtcttgcattggtctgctgggtcagcagtacattctaataaaggagggcatctttttgtttatggcggcgatgatatgggatctgaagaagttctcacggttcttagcctggaatcaactgctggattagaatcagtgagatgcatgtcacgaactgatctcaaacttgatggatcatttgctgatatgattcttattcctgatactggggttcctgataaaagcagaacttctgcactttttattttgacaaatcctggacagctgaatttttatgatggtggctctctattttctgtgcaaaactcaaaagagggaactcctcttcctgaagcacagaaatttccagtcgcaattcctacccttgatcccaacataacggtcactggtctttattcgctaaccgaaagtgaatttccaaatatttcactgaagaaattttgtgctaggaaaaatgctgggcatttcatatcagagaacatgaaatggcctttgactggtggggttccaaatgagatgtcactggacgaagatcatgctgttgaaagaatatacattgcaggctaccaagatggttctgtgagaatatgggatgcaacatttcctgttctaatgccaatgtttgtcttggatggaaatgttgctgatgttaatttggatggagctaatgcttctgtatcatctctagccttttgttcattaagcatgactttggctgttgggacaacaagtggtctggtgcgcatctataaactccgagaacacactgggggttcaagcttccattttgtgagtgaatttaagcaagaagttcatgttgttcatcatgggaaaggatttcattgttatgttgcctttttgtcagcaaattcctcagtgctatctctattatttatggcttcaggtggcctccttgctgcaggctatcagaatggtcaggtggcaatgcttgatccaagtcagttatcaattctattcactgtagatggtgcatcaggaacaaattctcctgttgtttccttgggcatctacagtgttgctgcatctgctgcaaaagcagatcaatcaaagaaagataatcctcaaaatgcaacgttatccagagatgttcttctttccttgacaaaggatgctcgtgttactgtacttgactgtacaacggagtcagacgagacacaaacccaattatcagaggacaaaattccaagtcaaggtcagacagggaaagatggcaatgatcttgacaaaatacaaacccaaggaattgaaaagcacctgaaaaatgcttcccagctttcgcaaaatggtggttcagattcactccttgtggtgtgctgcgaggatgttttgcttttgttatccctggcgtcattgattcagggaagcagcaagcatctacagaagacgaaacttgcaaaaccttgttgctggtcagcagttttcaaaaacatggatgacaaagtttgtgggctgatattagcttatcagactggcactatagaaatgaggtttgggccagatctggctattgttgctgagacctctttgatgtcattattgcgatggagttacaagacaggcatggaaaaatccacaagctcctcaaatggacaagttactttggtaaatggatctgaatttgcgattatctctcttatggcctcagagaatgacttgaggattccagaatctctgccatgccttcatgacaaagtacttgcagcagctgcggaagcagctatgagtttctcaactgatcagagaagaaagcagaatccagcagcagggattattggtggcttcattaaaggaatgaaaggcaaggctgaagaaaatgcaaaaatgagagaaagtttgacattgcgagctccaagcgaacagttggagtcaattttctcgaaagaaccatttgctgaaccttcaatacccgaccttgatgatccgatggaagaactgtcaatcgatgacatagagattgacgatgaagtagcagtagccctggcacaagcagcatcgtccacatcccaagggaataagagaacagcagtggaggaggagagagcgaagctgtttgaagggtcaaacagtgcggataaaccgagaatgagaacgcagcaggagattctaaccaaatataggtttggcggggacgccgccgccgcagctgctcatgcgaaggataagctgatgcagaggcaggagaaactggagagaattagccaacaaaccgcggagcttcagaatggagcggagaactttgcttccctggcgcaggagctcgcgaaaacaatggagaacaagaagtggtggaagctataaactgggtttgtttgtacgtatgtgtgttgttggatgccacccgtcgttgcgaattgggacacataccagcattaccatttttttgtgtccgtattaatcactttggatattctttttgtgttttggtgatgtacgtgtaaagataaaaaagagagaatgaaaggaaccctcttctcctggctatatgagcgagtctcttattcgtc

SEQ ID NO: 39130 - DNA, 2192 bp, Zea Mays
caacccttcaaaaatgggcacagctacgcaggggggccttgtcaggtctgcgactatctgcgacatatcatgaatcatttcaagttttcaaccgagcggcagaattttggtcatcaagcaaacaaacaggtggtgtcgccggggtgacagaatctgatggcctcaactatactactatactgtactgcctgtctatctacacatggccaaccgccgcgaaggccgaagaaggtgcggaaaacgcaacagctgcgatccgtgcgcctgtgcactgcagtaccaggctgttgaatccgtatgggctatggtcgccgaggcactcgcagtcggacgtgtcttcatcggagatggagtttggtacagcgcgccagtacgacaccaccgacctcttcttccaggaggactggctctacgacgatcacctcttccctagcaagctggacgatgaggacgacgaacgcgaggaggaggacaagtttgtactggatgctcacggtggtgcctcagcgcagacagagataggcaagctcggtgcaggccataaccaccgtcatgaacacatcggtggtgaccgatgtgagggttgcgctgaggtgtacacatgctcatcgccactctgcggttgctgtggagggggactcaagaatgacgggcttcatgtggccaggagctcaagctctactgtgtatgggagataccagatcatggatgaccggacagagacaatggatgattgtgcgcaggatgggtttcaattgaagcagagtggagatattatgtttgaatgtggtatgcagagggatcctggacgaggagatgatgattcagacctgagtgttgtggagaaggagcttcaaatgctcagttcatttgatactgatgctgttacgaatcacggtgtacatgatttcacggacaacggtgacctcaatggcatctgtgacaaaaatccgaaaatcagcattgataaagaatatctgaaaggtcataggatacagccattccctgaaattggtgatcctgatgaagcatatgagtttcgaaatgtaggatcattaaatgcagatgttcaacattctactgctcttgaagctgaggaagatgcggagacaaatattgatcttgctctctctgattttcacagagaatatgaggtatttgaattgagaattatccaccgcaagaacaggactggctttgaagaaaacaaagattttcccattgtgctaaattcggttgttgctggaaggtattgtatcactgaatatctaggctcagctgcattcagcaaggttgtgcaagcacatgatcttcagacaggaatggatgtttgccttaaaataattaaaaatgataaggatttcttcgaccagagcttggatgagataaaacttctgaagttcgtgaacaaatatgatccactagacgagcaccatgtgttgcgcctttatgactacttctaccatcaggaacacctttttattgttactgaactattgcgagcaaatctatatgagtttcagaaatataatcaggaatcgggtggtgaggtatattttactttgcctaggatacaggttatagctcggcaatgtttagaggccttggtttacttgcaccatttaaggatcattcattgtgacttaaagccagaaaatattcttatcaagagctacagtagatgtgaaattaaagtcattgatctgggaagtagttgcttcttgacagacaacttatgcctctatgtccaatctcgttcttatcgagctcctgaggtcattcttggcctaccttacgatcagaggattgacatttggtctcttggttgcatcatttctgaactgtacactggtgaagtattatttcctaacgagcctgtgtccatgatgcttgctcaaatgattggcataatcggcccagttgacatggaaatgctagaattgggacaggagacacagaagtatttcactgatgattatgacctttttaccaaaaatgagatagtaaggctaaatgaatattctttaattgcaaaatctatattgcacgagctgcttctgattgtttccttcgccttcataaaattcattagctaccagttgcctctcggaagttatttatttcctacggtttgttataaaagctgtaggaagttaaaaaaccgtaggaagtgtatgattttggtgtagtgt

SEQ ID NO: 39131 - DNA, 393 bp, Zea Mays
tccatggctgctgcgcgcagccgtgattctccctggagctcggccgcgacctcgccgtcgttcggcagctccagcgcctctgttcctctctatgcgcctatgccgagctcggttcctggcacggtcctgctcggttcttcttgtgccgcgcccccggctcctctgttggtcgcgcggccgtttcctgttccctgcgcgactgccgctactccctgacttgccgcggtgcccgtcgtcctgtgcgcgctctgtttcctcgcgcggctttgtgctcgcctggccgcgccctgcttccatgaccgccgtcgaagcttccctgctgcgccgtcgagcctttgctagccatggccgctgtaactcagctcggccgaccgcgctgctccctgcgtgccc

SEQ ID NO: 39132 - DNA, 789 bp, Zea Mays
aactgaagttgcactttgaggagagacgagatcatgaggaagcaatactcccctgtgctctccttgtgcctgatggcccttgtcgtagctgctatggtctgtgtcatgtacaccacctcggcacaagcaggtaaggtcgtgtttggaagtgtagttacagttttgaaacaatattatggtatttagtgatactatagtattgtaactcaaaagatgtttgttttgtacaggtaaaacatagttttaaatactatggtttacctaaaaccattatatttttggaattttcgaaactccactcatcattttaatgttcttttcttctctttacaaatactttgtttttctaatagaaccaaacagatctcggttttgagtaatactgtagttttatatatgcatgcgtgtttcatacgtacgtggtagctacagtttacgtctaattacccaatcgtctttaccttcttcaccacaggaaggagtggctacaactcgtacgaacctgatggaaggagtggatacaactctgttccaataaacggcggtggcagcccctagccaggcggtggagcctgtatcagaaatcaaaaaaatataaaggctcatcggatgaaaactgtgtgtgtattctgtcatgtcatgtgtgttggtatatgatggcttggtcgtcgtaattaatgtaatgtgtggacaataaatatgcggggttgcacctcaacgtaactctagtacttgctattgcgatatatatgtactttattattattattattatatgtgttagaagtc

SEQ ID NO: 39133 - DNA, 1929 bp, Zea Mays
cttccggtcgtcggtcttggcctcttccgcgaccgcgtcgctacttcctcctaccgctggaggcacacggtttccacgccagccagcaaatgggtgcccaccgcaaagatcaaatcaaatcaaaagggaatttctgaaaaggagagaggaacacccttcctcgccatttccgtccaaagtgtttccccgaggagtcgcgcgtgcctgccgggttgcgtaggcgctggggcggcgggacgggagcatcgcaggccgcggtggaccctggcgctcgagtttcttctctgcggtgaccaactgaccagagggacagccttgtggcaatcatatataggacagtttcgtatctataataatgtgctcatataaagaaatcaagtacaaatgaagaagcacatctctgcccattatttgatgactgaagacaggttgcactatggtagctgctacaactgcgggaatgtttcttgtgtgttttgagtccctctgtccctgttttgggtcaaaaagtaaggatgggagcgaagaccatgttcttgcagaatattccaattcctgaaaattttctctctttacgtgctgaattcagcaacgaagtcgcattactaaaaagtattgaacataaaaacttggtccagttgcttggttacattgacaaagccaatgaacggattctcataacagagtacatatcaaatggaactcttagggagcatttggatggtcaacatggcctagttttgggatttaatcagcggctcgaaattgctatagatgttgcccatggattgacttatctgcatctctatgcagagaagcccataatacacagggatgtgaagtcatcaaacattctactgacagaagctttcatggccaaagtggctgactttggatttgcaagaactggtcctactgagccagaccagtcacagattgagactgatgtgagaggaacagcaggctatttagatccagagtatatggggacaagccatcttacgatcaagagtgatgtgttctcttatggtattttgctcctagaaatcctttcgggacgtcgtcctattgagagaacgaggggtccagcagaaaggattacagtgagatgggccttcaataagtaccgcagaggcaatgttaggggcatactggacccaatgttaactgaagcagtgaacgaggatatactgaacaaaatcttcgatgtggcgttccagtgtgtcgctcctacccgcgaagacagaccctccatgaaagaagttgtggagaggctgtggaagataagaagggatcatacaaaaatacagaggatagcagaattgactctctgaatccttaaggctctgttcgttttttacagattggaggcccgaaacggttcctgaccggattgtttctctaatttatataagttttgataagttggaatgaatcctggtccaatactagacaaacgaacgggccctaaaccatctggtcctggttgctgtttttgcttgggagaacatgggtcagttcctagtgaagaccaaagaccgccacataaaaataattcaaattttgtggttgtgaacaactgggattctttaagagatgtggggaacaatgccctgcgattgatggtttccctgtagccattactgttaatcagcataagctgttcagtcatcgtcctcgagaagtacagtgtagcttcggtgtacggcatccttgtactttggaaaacagttagatatgaaggaaacctctgactactaatttcttctggatataactagtgaaggaaactaaaaattattattcctcactcgtgtaatcttgcaaagactttttggtttatgaaatgtaaatgacaatggtaatgatttatgcttgagtaccaacgataataagtttgaatatatcaatattactttttagtgtgat

SEQ ID NO: 39134 - DNA, 2186 bp, Zea Mays
acatattccatatatctatccctgttcgcatcacgactcgcgagctcccggtcccaaaccctaggcctagggggcgacctgacccgatgtcagcgtcttacggatccgaagactaccgcggcggcggcggtggcggaggctacggtggccgaggtggcggcggcggtcgtgggcgcggaggcgggggaggatatggaggtggcggcggtggaggaggatatggaggtggcggtagtggaggctacggcggcggcgggggtggaggtggccgaggcagtggcggcggagggttcggtggtggaggacgaggaggtggtggaggtggccgaggcggtggcgggcgcgggggtggacgcgaaggagactgggtttgccctgacgcgagttgtggcaatgtgaactttgcgaggagggctgaatgcaataagtgtggagcaccttgcccaagtggaggtggtggcggcgggggtgggggttataatagatctggtggaggtggtggaggatacaaccgtggcagtggtgattatggttctggaggtggtggtttcgaccgagatggtggagactataattctggtgggcgtggtggtggaagcgggggtggaggaggctacaatcgaagtggtggcagtgaccgtggttttgatgaccaccgtggtggcagaggtggcagctatgggggacgagatcaggagaaccaaaggggtagtgaaggtggctacagtgctggtggctatgggcaagctcctccacaagctcctccttcgtatggtggtcctgcgggtgattatgcagcacctccgagctcctatggaggcaacaatgcttatggttcagattctgcagtgccgcctcctaatagctacagtggtggcccaggctcatacccaccaagctatggtgccccgcctccacaccaatatggtggtgccccaggggggcaagggggtctgcctcctacatatgatggtggatatggtggtcggtccatgcctgggggtggaggatctgggggtgcaccaccgccttatcatggtggcggcagcggttatactggtagtgctgaccctgaaccagctggaaaagttaagcagtgcgatgaaaattgtgacgagacatgtgacaacgcaaggatttacatctcaaatttgcctcctgatgtcactgttgaggaattacaagagctatttggaggaatcggccaggtcggaaggatcaagcaaaagcgtggttacaaagatcagtggccttggaacataaaaatctatgctgatgactctggaaaagccaaaggagatgcttgccttgcttatgaagatccttctgctgctcattcagctggtggattttacaataattatgacatgagaggttataaaatcagtgttgtgatggctgagaaatcagcacccagagcggcaccctcatatgggcatggcggtggtcgtggtggtggccgcggtggtggtggacgcagggataattacagagatggcggggggcatggacccaatagaaaccagggtggtggttcacgttcacgaccatactgaaaacaaaacaattgttgttactgtgattgtcatctatgagaaaccatttctattcctgttatacagatttgtactcatacaggctcataagaggcagatggatataagctccaaatgctggtaggtttgtgatgttatttcagccggtggatcactcatgtaagctttggattttgctgcgaagaacaggttgcagccccatcacttgtgccctaactcatcgtccccagcaacacgatatgacgtgtgttgaagtggtgatctataagtagaaaaggagctgaattgagtgaattgttgcttcatctgcccccgtgatgcctctcgaattgggactgggagctcgtgacttacagcacttgccacgaatgggaaaccctctgctccaaaggaagcagttcaagcatatcgacgtgcttgcagggtcatcgctaaaaataatgtctcgaccacatgctaagattggaggttgttgtccgattatatatgttacaaaatattacatatgtgatcaatccaaggggtgtaacagttttctcaaagggacacactccttgggatacgctccttcacttgtatataagtgtaatgatctctggaatacaatcagtggctgtcacattctctcca

SEQ ID NO: 39135 - DNA, 4640 bp, Zea Mays
cacaaattcaggtaaattttacaactcaatcacattgtataaaagtgttattttttcttaatttcgtttcaaacattttatacttactgtgtattatatattaacttatacataatatttatgtatatttaaaatcttagatacgaatttgatatcgcgcatagtatgtgaaaaaaccaataaaaaatgaccataacggtagggtgcaacgcgaaatgacaagcacctccactccaactgaatttacccccttccacggcacctccagtccacttcgtcttcctctcttccccagttcagatctactccattgccaccttcctctcccggccgcttctcatgacgtctccgagcgaaaaccctaaccctaatcctaatacaccatttgagatcgggaagcttttcaggccaacgaatcccatgcccaacgccacccccaaccccatcttccccggcgtcgctggaggcccggcgccatccggcccctactcctaccctccggtgaccccgcccttccaccgcggaccctacatccactacccgcaggacccccacgccatgacccgcccagttgtctccttccccatgccaaacccaaacctcaaccccaacccgaacgctaaccccaacgccgtcgccccgggccccaaccccggcgcgcgcctcatgcagctgctcgggaactccgggccgacacaattcgagaccgccgtctccatgcccccgcccacatcggaattcgcacaactgcagttgctcccagcgatgccatccgcgccgccggccaggatgctgagcagcaccagcagcaaggtgcccaggggggcggttacttggcaccggggaacgagcggtgcacgatgttgactcgaggctgcccggggaagcgcagccaccgcagctggaggtaacaccgattaccaagtacacatcggatcccgggctcgtgctgggcagacagatcgctgtgaaccggacgtacatcgtgtatggcctcaagctcggtaacatccgtgtgctgaacatcaacaccgcactccgttcactcctccgtggtcacacacagtgcgagcgtagatgggcggatatttgtgtggaggatagatgaagggcccgatgaggaaaacaaaccacaaattactggaaagattgaaatcgccatccagattgtaggtgaagctgaagcttaccatccaaggatatgttggcactcacataagcaagagattctttttgttgggattgggaactgtgtcttaagaatagacacaactaaagtgggtagaggaaaagactttactgtggaaggacctgtaaaatgtcatcttgaaaagcttattgatggtgtccgcttagttggtaagcatgatggtggtgtgactgatttgtccatatctcaatggatgagcacccgcctggcttccggatccaaggatggcacggttaaaatctgggatgatcgcaagcaagtgccattatctatttttaagccccatgatggtcaagcggtttattcagttgcttttcttacagcgcctgaacgaccaaatcatattaatctaataactgcgggtcctgttaaccgagaagttaaaatttgggcttctactaatgaagatggctggttgttgccaagtgattctgagacttggaagtgcactcagactttggaacttgttagctctctggaacctagagttgaagaggcatttttcaaccaggttgcagtgctgcatcaagctagcctgattttgcttgcgaatgctaaaaagaattctatttatgccgtgcatgttgagtatggcccagatcctgcctctactcgattagactatatagctgatttcacagttgcaatgcctattttaagcctaactggaacacacgaaagccaacctgatggtgaacaagttgttcaagtctattgtgttcaaactatggccattcagcaatatggtctagagttatcactctgttcgcctcctacagctgatagtactgggtttggtagagatcctgctatttcccgtgtttatgaggcagctctggaaatggcaggaacagagccatctataggaactagttgcacagactcttactctgtcactgctttgagtaaacaaccaaatgttgaccagtctgcagagcttgatctgaaaccatcagctccaccgcttgcatactcagaaggtgatagttccatgcctcttccatttacagctcttgcacctaagattgaggttcctggatcaggaccagcacctggaactcgtgatatagagcaatcagcttttaactatacgaatacgacaaacagaaacatggagcgtgatgctctgaaaagacaagataccccgatgcccattagaaaggatatcttaggaaaagatgagccaagagatggtcaaagtaatgttccaatgcttccaaatccccatatggtgtttcaagttggagggaatgctacacgcttggttactccatctgaaataatatcgggtactctctcatctgctgaaaacaatgatgtttctgaatctggtggggaaaatcgagatgtttccagcggaagttcttgggttgcagaagtggaaccaaagcatattgatgagagtaaaccagatcaaaacttgggacttgaagcagtcaaggaaactcagattgtttgtgagaacatggcgaaaacttccatggagcaaactgttgaaatgatcactaagcgctcagttacaactgataagcacagtgtggaagaatcacagtcatcatctgatcgaccagcatcagatcagacttgtggcactgatgaaaatgttctgaagaagtttgtggaaatgcctgagaaaattgattactctgcttccagggagcaaccatctttgtttacaaaagagaaagttttgcaccctcaaacatctggtcagccatctcctcctgtgagtgctttcaattcaactgagccacatgagcctttgagctctacatacctacctgtcagctccttcccagaagatgctgccacacaaggaatgctgcaacagctcttggatcaccagaaggacatggaaaagcagctgagtactgtggttcctgtgtccatcgcaaaggagggcaaaagacttgagacattattagggcgcactgtagagaaatcattcaaggctaatattgatgcgttttgggttcgtctccaggaggaaaacactaagcgtgaaaaggctgatagagagcgaatgcagcaactgtgtactctcattacaagctcaataaataaggacttaccttctaatctggagaagtcacttaagaaagaaatttcttcactcgggcctgttgttgctcgcgcaattacacctgttgttgagaagtccataacctctgttgtttctgattcagttcagaaaggggtgggtgacaaggtgtgcaatcagctggagaagtctattactggaaaacttgaagctacgcttgccaagcaaatccaaatgcagttccatacatctggaagacaggctcttcaggatgctttgcgtactagctttgaatcattgcttgttccagcatttgagcaagcatgcaagacaatgtttgagcaagtagatggtgcatttcaaaagggaatgtctgagcactccaatgctattcagcagcaagttgaggctgcacatactccgttagcgctaactctaaaagaaaccatcaattctgcttcatcaatcacccagagtttttcatcggagttacttgatggcaatcgcaagctattggcacttgttacttctgggaatgccaaggcacataataccagtgctttgcagcccattaatggtcctatgggtggtccccaagaggttgaggctccgttagatccgatgagagagctgagcagactgatatctgaacgcaagtttgacgaagcatttacaatggctcttcaaaggagtgatgtttccatagtgtcgtggctgtgctcccaggttgatttgcgggcactatgtgcaatggttccagtacctcttaaccagggggtccttctggccttattgcagcagctagcaattgacattcacaatgagacatcacggaaggttcaatggatgacagatgttgccatggcaatcaacccagcagaccagatcatcgcggtgcatgtgcgaccaatctttgagcaagtctacagccaattggcccaccaacggacactccccaccacgaccgcatcagatggcaccagtatccgtgtgatcatgcatgtaattaactcggttctgcttagctacaagtgattgcagctatgcaactgtgggaagtatggcctatttgatatcttgtatagagaaattttgaatggcaaatagaacacaacccacgagagtatacttggaagagggtggaggttactctctagtgtaaattttgcctttgaaattaaaatatttgtagtaattgggcatcctctaattttctaggtcatgttcatttgtcgtatgatcaatgggtcttgtatttcagtcataacttgtagctcggacagtttggaaccaacagcagctgcttggtgttggttggtccacacaaaattttgaagtcccatgtggacattgtttctggtggcaactgcaaaattggtgttattctaa

SEQ ID NO: 39136 - DNA, 917 bp, Zea Mays
ctcggcctttcgggtctttcgctccccggctcttcgtctccctctcttgccgaatccaagccctaaaccatagggcttgcctggtgcccgggtgggctccccatggcggcaatagaggacgaggagatggagaagaaggtgcagcagtacctgcaccgcaaggggttccgcctcaccgagctcgcgctccacgaggagcgcagtcgcctctccacctccgacgtcgcgcttacccggtctgacaataatccagcaagataccatgagggatacagcagattaatagcatgggcgtatagttctcttgatcaatataagtgcactgcttgtagataaattgtacttaatattcagccaaagcatatcacgccttcaaactatttctaactgttaccttcaagtgatgcattttatgaatcctctgtgttctatggcacaaatttacttggcagacctcctctccttttatgaatcccatatctgtcatataagcatgattttgcacttgacaacttatgtaattctagtttttcaaaagggcgtttggttgtggcaggcaaactattttatgttgtgatctgattttttaacttacagtcttacgctccattctgttcttaaacttggcaatataattcatatttcttaattcagatattttttgtagcatgaattacttcgcgtcctttacccagtttttatccattgcttcatggatctagtggcagagggacatatgcacaatgctcggtcatttttccatacatttcgggaagctcataaggtgatgcattcaagggatcttcagaagctggaaggcatcctctctccttcacacttggaggaaacggaactggctcgatcttttaggaaaaaataaatttaaaattaaattatgcgagaaataactacatgca

SEQ ID NO: 39137 - DNA, 1808 bp, Zea Mays
gatgcactgttctgttgcagtgctcagggatacgaggaggggaaggaacaagatgagttccaagaaagcaacaaaccggggtttggtacttgtccttctgctcgttgttttgcctgcgctttcggtcggcacgcacgcaggttgatttccctattcagtctatcgttattttcattttctgtaaatttctttttccccttaaattgtattatgaactcaggaacttgtcaagatatataatcaacatgtagtactggaaagtatatgtgtagtattatttttcaggcgtgcagaagtggatgacttgattcattagctagtcttcgatctgtaatttgattttgcaggagaaagagagttgccagatgaaaaggatcacaagggccattccactgttgcttctggaaaggggggaacggcttcaggagatatggtgaagacgaatgactatgggcgctacgatccaactccggcgttctccaagcctcgctccaagcttatacccaactaattacactcacacttgctgcatctacatgcttactatatggatggcatgcatagaaatatagtcctgtacagaatataatgctcacttcgtttttttttgtcgcgttctagttcaaaaataaactaatcggcgataaatatttaagaacggaggtagtatctagtatctagccttgacgcctctactgaatgtacctctactgaatgtactcggcttcagttcttaagtttggtgtgttggatctctgtttcgtcttccttttattttctaacaacaccaggttaagaatccttatttctccaatttatgaaggcaagatacacattgctgaaatgcttttagctggagcccgacatgcatgcgaaacaaaacaaacgctagctagctagcctcgagcctctccgtcttggccatcagcgccagcttccagcgtcatgttctgcgtcgactcatggaagacgttagcgcagacgacgaggtagacgaggtcgacggcgccaagaaccgcgagcagcgcgtagtaggagtcgtaccggccctggtccaggtcgtccgagatccacggcgcgccacccccgccgcccttgccgctggtcaccacgttcacgagcttgacgatcaccgtcgacatgatgctggcgacgccgctcccgaagaagagcagcgccagcacgaagctgcccatggacttggggagcacggcgtagtagaactcgatctgcgcgatggcaccgaacgcgcccgacagccccatgagcacgtactggggcgccagccacagcgcggacatgaggggaggggcggctccgtctgcgtctccgtgcctcgccgccgtcgtcgcggcgtgctgcctccgatgggtctccaccgccgatgccaccgccatggaggcgacggccagggacacgccgactcccatgcgctgcttcagcgtcagcacgcgctgccgccccgtcatcctccggaggaccggcacgatgcaggcgtcgtagcagcttgaccacgccgtgaaggtcaggatctcgaagaccgagatcgagcccgcgggtatctggaaccttgttgcgccgacgcggcggtccatggtggctgcctgcaggaccccgaacgaggagctctgcagcaggaacgacatcaccatggctgaccacatgggcatcacgctcagagctgacttgaggttctctacttgctccactgtgcaggcgtttcctgcgcttgtgctgccgtagtcgtcgtcgcttgtgctgttgcctggacgaggcctcaccatgcatgctttgttcagaaacctgaa

SEQ ID NO: 39138 - DNA, 1333 bp, Zea Mays
gaatgaccttttgtgttcgtcgtctccccaaaaggacctcccaagacctggcatctccagcgaatgcgacgccgggaaccaccgaccgtgcgtcctctctcctcgtgcgcttcgcccgtctccacagttggtgcagcttgcgacgcaacttggattctctcctctcctctcctctcgttgcaacaaggcagtccagtgaatgagacggatggccccagctgtgcctgtagctgatgcatgatggagctgagcctgtgggatgtgttgggcacacatggaagtaaggcaaaatgatgcatcgacatgtgatacgtgagcacgtatttcagaacccgataggttggttggagtgggcttcttaaaattattactccgaagcgtgcaattgagattgtagtattataatacccacgtatttgtaaatttgttatcgtcgttgctttaaacacccatctatagctcactcactgctgctgttactggcatttctcccctcatcccgttcctgaaaacggatctgaggccgtcgtcttccactgggtcgcgctcctgttcgctccgtcgtcagaaatgcaggcagcgccagcaggtcttgcttcacgctcctcgcggatggtggcccctccggcccgcgccgatgcagttgaagctccttccgaagcacaaagattaaatagagtttggaatggtcttttagacgccattagacacatgcaagtctcagccgatgagttgaggaggttgaccagacgcaaccatgtgcctgagtatgtagagtacctacgcaaaaatagattatgaagcccatgtgagtgctgttactgaaattgcacaaggtctagaccacgtgagcacagatttggcggaagttcttattggtccgcaacctcttcttgaagattatgaagcccttggtttgtacgatgatttccaatgcgatggtgaagatagctctgtggactcggatgagatcaatgatcgtcgtctatcgcatatgaacgagcgtatatgagatatttgtttgcgagagagttcagtttgccattgatgtctgtagcttatgaagcccttagttagttgccactgttgttcctggtacttgtatgaattgggttatgaaaatgaagagttgtgttatgagttgtattttgtgatcatataatggcttcatgtgataattctgcacctgttgtcactgttgttatgagttgtatcttatgaagcccttagttagttgccactgttgttcctggtacctgttgatcatacaattgttagttgtcactgttgttcctggtgctcatgatttcaagatcattttgataattctaca

SEQ ID NO: 39139 - DNA, 266 bp, Zea Mays
atggagacggggcccgagcaggaggcgtcggcggaggtggatcccttggtggaatggtggctgctgttccggctccggtcaagaagaagcgaaacctccccaagactccagatccgggcgccgaagtgattgcgctctcgccgaggacactgttgtccacgaaccgcttcgtgtgcaaggtgtgcggcaagggcttctagcagaaccagtgctgcaattgcaccgccgcggccacaacctcccttgatgcgtgagatagcgccacc

SEQ ID NO: 39140 - DNA, 1263 bp, Zea Mays
agggtcccgcttgacatcatggctctggcgaagaatgatgtttatgctcgcatcgaacttgaacaagtgactgtgcaaaatgctttggatgtgcaataccaggtgcatggtcgacgacagtgttatacttgtttacagacaaataccttgctggaagtcttagagggattgtctattccaggagttcgacggcttgttgttattgaacaaagtaccagatttgtggaaggaatcatctcattgagagacatatttacatttctccttggatagcatctgtgtagccattccatacatgaaaaagcttgttgtacttggttcaaacgaaataaaaaggttacaaatgtgatagccatcttctatcttccttcttgatttggttcatattataccgcagacactacataattgagttgcaccgaaggaaagaacaggtaggtgctgcaggatggagaagtgttcaggtgattgtttcctgctcgaccagtccagccgccaattatttgcaggcttccagaattgttacttgcaagttaggagcttgactacctttttaagaacttgatttttctgtggttgtattctttgaacattgatacaggctacagaatcattttcataggatctttgaaacagggggattttttgaaggaaatgaatctcgtggatttttcttccttggaatgaagtcgaaggacctcttcaaatgcgagcatatatatcttttttttgtggaaacatgaacgacgtcatgcaaatgattttcttgaagcattgctgtcattccagttctataagatttgaagtgtttctgtacaattacaatgcttttcatgaccccatttggttttgctttctgttttcaaacaactctgagatttggctcatgagaattgtatatgttcaattatcagtgcatcttggtgtgagtgacattaggcaacggaattttgttatgaaagactgaactgtacaagaaattgctatcataaggaaagcgaattaaggaattttggttgatgctcgaaatatgtcaattattcgcactgtgctagtgattatgtacagaatcagggaatgtctcgcatccaattagggagtgggttggttgggttggactgtgttatactgtctttggtggatcatgtaaaatatgtgatgcgatattgtagatgataatgtttgatattgtttaaaagtttgacattgtttgtagagtgaagtttaaaataaaagatgagatagatgataatgtttgatatt

SEQ ID NO: 39141 - DNA, 824 bp, Zea Mays
cgctacgcaatgcttccagacccctccggacttcggccgctagcgccctcttcgttgcgcgatggagctccgaggctccaccccccaccaatgatgcgtccagacgcctagatgagcaccatccccttcccctccacccatcctcagaagatgtcatgctgacggcttcgacgtggtctccagtagatccgagcggagcgccttcccgtctacccctcaaacattgtcgcagtgcctgggccgtcgcgaggagcccccaaacacaatctcctccttagacgtcgccggtctcctcgctccctcctcaaacgtcgtcgtgctaccgacactgtctgtggcggctccaaccggagcaccatcccacctcctccgtcaaacgacgctgcggtgtttgggccaccgtcgggagtctgaatctgccccctcagacatcgccacctcgaaacgcacaggttggcgcggtagggggcactggtggttcggcgcggtcacctggcgaacgacgacgaagaggaggaggtggccgagtctatcatgaagagacgctgtgaagagcagtcgccatggccgatggatcagttgccggttgcattcatcgaagatttggccctctccaccaccatgtcgctaccccatacccgtcttccctgcatatctgaatgatgcaccttcaatccaccgctgcccaaagagcgaatggggaaggaccgacctgagcattctgtccggtagctgggtagcaagaagcaccagcccttccccctcccaaggacacaactgctgagattgctaaaaaaccagagcaaggaaaaagcttctttggg

SEQ ID NO: 39142 - DNA, 1437 bp, Zea Mays
ctaaacaaggcaccaccaccaggcaccaggcaccaggcaccagccgcaccatcgcctattcgcctcctctcgggctcgctcgctcgcccccactctcgtgcttctgcttccccacccagtcacctcgacctcagcccctctcgccctccctaatctcgactccgatgccgccgccgctcctccaggcgcgcgactacatgggcgccggcgccacccctctgtcctgctcctccagcggcgagggcacggggccgcacctcgcgctgcggctcgggctcccagggtccgactcccccggccgcgacgcggggccggagccggaccacgcccacgtcgacgccgcgctcaccctcggccctgcccccgcccccgcccccgcgcctcccagggtcggcgcaaagcgcgggttcgccgactcccgcgaccggtgcgcgaagcgggacgccactgctgcggatgacgctgctgggggagtgaccggggaggagaagcgggtaggtgcggccgctgccggagctccgccggctgccaaggcgcaagttgttggatggccgcctgttaggagctaccggaagaacacactagctatgagtgccacaaagacaaacggggaagatgaaggtaggagtgaggcgggatgctgttatgttaaggtcagcatggatggagccccatacctaaggaaggtggacctcaagaccttttcgagctatgaggacctttcgcttgctctggagaaaatgttcacctgcttcatcactggtcaaagcggttcgtgcaagacttcaagaagggagaggcttactgatggttctagggctgatgcccttcaggaccaagaatatgtccttacttacgaagataaagatgctgactggatgctcgttggtgatctcccctgggacttgttcaccacaatttgcgggaaacttagaatcatgagaggctctgatgctgctggcatggtatccaatcttcctgcagctccaagatcaccggagcagatagttgggaccagaataaggaacgttgcccggcatgcagagtcgtgaactgaaaggaaaggacagagtttacatggcgctgaagggagcggtgtttttacgtgaagtgctccggttaagtctctctctctctctttttttttgtaacccccacatgtgcaatgagatgtgtgtggccctactgtaagacaccccattttgcccacgaggttgtcacgtgttattgtagatggtcgcctttgtgttatgaacgatcaaactcggcagtagcctgcttgctgcttcctctatgatactttcctccgtatttggaagctcgtacttcatatggtagaagtaagaaaaaaaaagcccatgttgcccattaagattttttgttctcctgatgtgtgtgcgagtgaactaaactattcagtggatctagaaagaatct

SEQ ID NO: 39143 - DNA, 1383 bp, Zea Mays
gtatagccagcggttgacctggcttcttcacatacactattatacgtacattgatatatacgaaccgtcctggttcttgcaccaccgccgcaccgattcgcgcgaaagcgaactccgtgccttagggccgaatcatcaccgtcgtccgatcgatccgggaccgggactcgggaagcatgttgttaaatggcgacagcaggcgggccgcggcgacagcagcagcgctgctggctctcgccgcctgcttctgcgcagctactggagacggggatatggcgggcccgcggccgctcgtcctcgtggttgaccagtccggcaagggcgaccacaggaggattcaggacgccatcgatgcggcgccggcgagcaaccgctccgccggcggccgcggcagcgtcgtcatccggatcaagcccggagtgtacagagagaaagtggtggtggacaagccttgcataactctcgtcggcgcgaccgccgccagctcgaccgtcgtcatcacctggaacgagtcctgggtcgccgccgacagcccgacagtctccgtgctggcctccgacttcgtcgcgaagcgcatagcgttccagaacacgttcgggactagcgggccggcggtcgccgtgagggtggccggagacagggcggcgttctacgggtgcaggttcacgtcgttccaggacacgctcctggacgacacgggccgccactactaccgtggctgctacgtccagggaggcaccgacttcgtcttcggcaacggcaaggctctgttcgattgcaccgacgttgctaatcaaatttgtgttgtcactggatcgtcgaatggcgtacgcgtaccggcggacgtgcagaagtgccacctccactccgtctcgccggccggcggcgcgttcacggcgcacagacggtcgtcggagtcggaggacactgggttcagcttcgtcgggtgcaagctgacggggctcggggccggcacgtccgtcctcgggagaccctggggtccctactcccgcgtcgtcttcgcgctcagctacatgtccggcacggtgaggccccagggctgggacgactggagcgactcctccagacagagcaggagcaggacagcgttctacgggcagtaccagtgctacggggaaggctccagaactgacgggagagttgcgtggtctcatgacctgtcgcaggctgaagctgcgccgttcatcaccaaagtttgggtcggtggacaagagtggcttcggtaggaaacactggctagctgtgctctgtttggttcgtcaacagtgacgctgggaataagctagagctgcagacgcgttatggccggttggtgtcgagagtcagaatgtgaaccctagctctaacagggttgggtgatat

SEQ ID NO: 39144 - DNA, 1024 bp, Zea Mays
atgtaacttgaataataaggtaaaatgataaaatattctttgaacgaaatgttgctgacaaatatccaaaaataaggtagatccaaacaaattaatggcactaaagactgaggcacgagaaaaatgacgtccatatttgtggctcaccaattcacccatgagaatgcaaaaacataattccaatattacatctttcacactgcaagcaaactaagaataaacaatatgaacaagtattattcttgttgcccaataaacaatacagttatcaatgaaaacatcaaagctccaagtccttgctttatatccctgtattcccatccgcttctatctagtattttaatgggtacaaaaaccaaaactgaggcacacatttttttgctagtctcaaaacagagaaccaaatctatattttttgctattatgaaaacaaataactgaagcatatattttctggtattctcaaaacaaagaacttaaccacatattttctacatagggctagacagttgtgtgttgaggccaatatggcgacagccgacatccgataggcaaatgtatctaataacttgtcacaaaaatggaattcgcatcgtaaaaagaaactactcgagcattgagagtccagcaggaaaaaacagacatgtagtgttaaacatagaaaaatgggtcatcactaagaaataatttccaagtactactttcctgaagataaacagtaaatggaatgatgtggttgccagttgccagacacttcatcccaaattcccaatttcagaaggtaaggtaaaaattcttcagcaatccaatcaataattcagactcaagagtcagagcataactaaaacctattagctattgctatgcaaacttcattcaaagaaacgcaacttgctagtatttcttgtaaccaatatttacatggctcattaaatgtggaatcaatatttaaggtctatatagaaccaaaaaactgagtagaaagatgttctcatttaattaaagaagccaaccataaacagtg

SEQ ID NO: 39145 - DNA, 1357 bp, Zea Mays
tccctcctccctctctcttgtcttctcccttgcggcgatccggattccgccgcaacggcccctctcgccttctccctcgcggcgctcgatccctccggattggcgcgtggaggggacagtggtttagaggagagaaacaagtgccgattgacaccaatagggtattcttaccattttcagatcagctggttcaacaaaactagtaaagatggcatcagaagggaacaaagacgtacctcatgaagctttgaccgtggatcactcatcgatttcgggttcaaagcgcaagcgtggccgcccaaggaaatatgagtatcctgtaaatgaactaccacagaaggtacagcccatccagagcgccccacctcttcttcactgcacacaagatggctcaagtctggccagccatgcatctggtggcggtgctcatgcaatacctatatcggttgctcccatcaatcctgaaatgagaacttcggccaggcaggatgctgaacttgtgatcccacaatcatcagtttctgcagtgccaataaaatttgtttgtcctgcctcggtaccatgcaagcaactggctaatcaaaatgagtttactggaaataagtctgttgatgaggttcagaaagattcggaatctccaaatgtaaccaaggaatcaccagtgaaagctgaaaaaccaaacattgctcttgtggatgtagtggccaaggattctctaggggaagggcaacaacttaatgatcaagtaacggatgtagttagggatttttctggtcaaactcaaaatgttgatgtgacaatgtctgatgagatcaagatagcatcaggtgccagagataagccaaattctgcaaattgtgaacagcagagttctaaggaaccatcagacatcacagaacaatctgagcagctcaagacagagaccgatgtccagaaaggagttgatgcctcagatgacattcatcctgcgcatgatgaacaataaatcaaggttgtcggcttattgggatgtggagctggaattttagcatggaccaatgctttaggtgtataggtgagagattaagtagagttacataaacccaaaaaaaatcacctaggacgtagcagttatagcacagagagaatacttgatggacttctcatttttaggaagatgacccggcttaaagttattttgaactcctggtcttgtaatatgcctttttaatattttaagctctattcacagacatatggaaacatgatgctatacaggaaaacttgcatgttatatgtaatggccctcttgtttgttgttattctcccccaaaaaagtatttttcaacagattttgttcccgtgttttgtacctaaa

SEQ ID NO: 39146 - DNA, 3958 bp, Zea Mays
gtccaatactgctatagtagcttctccaagttatgacactgttaggaagatggttcaacttctctcgaaatgaagcttctgtcttcctatgtatagacaagttgttcagttaggaggtctagattctcttaaaatggtgctatctacgagttaggaggtctaggagcacactgaatgttttagaggttgatgaaatcgttgttttcctaaaaaagcattttttctgctttgtttgaaattgtttgggttttcctccccaactttcataattacctatttctattgtatgtttgatcatttggacttctactccatccacaattttggtttattcagtgaggaactatgtttttaaccactctatagtttgtatagacatgcaacattcatctcagggtcaagaaagaagctcaacttggcatgcttcctgtttaaagcaaggagctactgacaatggaaagcaacgattagagtaacttgatgagtgaggactattcattcagttgcttcgatcaataagtgaactaatggatgcatgtttcttttgataagtgagctaactactttagtcacaaagttcgtgttgatttctaaacatggtatgatggttttgtcatcctattcgattgagtttgggaaaaagcctgcacattctgaaaacaaacagactgcacattgtgtggctgataaggttgagtgggtaaataagatcaaagctattatttagacatactgaaaatatagtgaaggaagcgtaagcaatttttctgctatatttatgcattgtatccttgtaaaattatcaatattgttctgacttgtggggaaaggtatgagagtattcatttttttgcctcttttctgtttgcattccttcttcagtataatgtttgttagaataaccaggtgaatttacaaatttcatatccatatactttcttcgatgacaaatataaatctacctaggtttgtcataactcataggtcaatcattctaacttcaattgacattttttataaaaagtatcataaggaaaataatatattatcataaaagtgacgtccatctatatcaaattttagatattgatggtggtcagagttaaaaaacagtttgccttaagacaaaccaagatgaacttgtatttacaatcgaaggaaatattgcacattgcctagacatttaatttattagataaattcttttgttagttgttcaactttgtacgtcttataagtcacaggaacaatgtttatctagaacttcggtctcaaattatacagtagtgttcagccatacctgccatgtcacaagaaagagagataaaaagtatttaatagtagacctaatgatgctcatttgtaattgtagatattcgtatatcctttttctgcaaccttgtgaaacatgtgatggtttgacttggaacaaactttgggtctgatatagtaaaatgcaatgtatgtggagggaagtagtagaacaagacagaacaagtgccaaataaggttatatagtagaatacaatgtgtggagggaaatagtagaacaacacaaaacaagtgccaaataaggttacaaggtttatagtagcgattgcttagctgctacaacgacactcatagattagcctggcatttgcaatgtcgctcttgtatttgccataacctcacttaaggtcacacattgcctctgggaccttgacctccgctactgttgtcgcctggccgcgtcgacttcaccaatgccggggtgtccaacctcatcagcttcaccgtcgtcgactgctcccacacaaccgagctgtgggtcctggtcacatatggaaagtgaagaacccaaatgatttcttcacaggaagatgaagcaacaagctagaaaatgtggaatttgtcatatgtccggatgcaaaacgggtaacttcatgctttccacaatgtgtgtcgacatgatgcttgtagagatgcttggaccaatcttcaactcatggggcgcttcatcctcggcctcctacgcatgcacttctcctgcttctcctgctggtcatcgcccaaggtgcacttttcctccctgttctgttcacgtgcccatgtgtcattcttgtttttcactgtttaggatcgtgagggtgttattgcaataatagctgatggagaaatgagaatgattttcaaatgatgacaggattggcagaatgagagcgacaaaggaatgagctaaatcttttgaaatatgaagcaatatgatttctttccagtgttatatttttttatttcctatgcatttcttaaaagtgctattacatgttcacctactaatacccttgtttttcttgcatctcaaggatgaattgctgctcttgaccatagggattggagcagcatgtagtttatactttatcctggttttctctctcgagtgtgtcagatgtgccgtaacagatgactccaaaatggattgcatgctcttcaaatagctacagataactatcttcacataaaatggagagtacaatgtttataaaagaaggaatatggataaggatccagattctcctatagcatatgaagaggcaaaggaaatggcaagccaaagctgcacaatttctgatgatcactcgttgttactgttatccattatctcctcagaggcattgcttttaaattcaacagcagacatggcaggtgcaggtcctatcctatccattatctacccctgcatgtgtgccagctattctactctatgtttcaatagtttggaaataattcagagctaaggttttctgatacaggtacgtgtccactttcttctcaaggaattgcactagaggttggactttgtgggtcaagagaaatttaatgcctattgttaatacaacctttagctatttttccatgatgatggagttggacaagtaccatattgagtataagtgttagcctattatatctttgtacaaccatggcaaacgaataatttcttataacaccatgaagataatgtttaacgaagtgtgtttgcgtgcgtgtgtaatttcttcttttgttttgctgctaagtttgatagttcaaaacatgattcttgtaaagtttggttttagtctaacaaatacactcaagtcctgacatgtaaactgtaaagttggactgttgcttggtggatctgtattgaactttattttttttaaaatgttttatggcttgtatagtttgtattcacttctcacctaagctacaatttgtttttccagcctttcaagatttggcacattgacataatgacatgggttggtcacggattggatgtcaattttgctccctgtaccttgtagattatcggttatgtcaattttcgaaatttctatcgtgatggataacatttgaataaaacatagttaaataaacatgactactgtttcagtctttcgaaattctgatgctatagtgtcagtatactatgtcattttagggaaaatatatgtcatgtttattttgataaaattatatgatttctcactcaattcttgtcggtggcttcaggatttgttattttgtatatcgatctgtgtcatttgacaaagtactttgacttggtataatatgagtgttacttcgaccaaaagagcttggtaaagtgtgagaaactccgcaaacttcttctgcagacgatgactagcaacagttatgacgagggtcaagatagccgccatacatgatacattgagtacaacatcaagataaacactccctccccacacacaacttttgccttccgttcactctgtatgttgtgtttattacggttgcatatgttgtgtttattatggcatcaacacgttccattagaaaatataactattgtttgtcaagtacaaaatcataatcacatcagcttgtaataatattgcatcactgttttgtaccaaattgtaagttgttgtagcaacgcacgggcacc

SEQ ID NO: 39147 - DNA, 2217 bp, Zea Mays
ctggcagtcgcgtcgacctccccgccgcgcccacggcactcgccactccacccaccaggccaagcacgcggcggcgacgccaaagcatcagggcaccaatggttgtgctccccgcggccccgcggcccctactcctacagtcctaaataatagccttccattccaatctgttcccacagttcagtcgcacactcgggcgggtcaaattcgactcgggaggaaccaaccacccggaaattcccccctcctccagtctccacttgatcggcgaggcgctgcggccgcgggcgaatggcgtcggaggcggagtcgcccgtggtgatccacgcgtggtcggcgccgcgctccctcagcaccagcctcatgtactccttcgcccagagggacgacatggaggtgcttgacgagcctctctacgcaaatttcctgcgtgccacaggcgtcgacaggccctaccggcaggagctcctgtccaaaatggaccctgatggaaataaggttgtcaaggaggtgatttttggcccaggggacaaaaagtatcgttactgcaagcacatctcaaagcaacatctcccaaatctgtcaagcgacctcatgaagaagggaaaacatttcatattgatacggaaccctctagatatactgccatcttttgataaagtcgttccaccatccttcatggagcttggcataggcgaacttgtctcaatatacagtgaattatgtggacttgggagcccaccccctgtgatagatgcagatgatctgcaacaggatcctgaggccgtcctaagtggtctctgtgaggatctgggcattcctttccagccacaaatgttgaaatgggaagctggccccaaggaatttgatggtatatgggcaccctggtggtatgggagtgtgcacaagtcttcaggtttctctaagcctcgccaatatcctctgactttcccattcgtgttttatgacctgcttgagcaaagcttgcctttctacaacatgctgaagcgccaaataaggaagataagaggaccgcagcaaccaccattatcggaccctcctctgcctgtccctgcaaataaaaacattcttgtttgggttggagatgaacttttgccccgtaacagtgcaaaggtttcagtgtttgattcagttgtacaaggaggagatgctgtttgggaaggtttacgtatatatgatggaaaagtattcaaattagatgaacatttggacagattgtttgattctgcaaaagctatggccttcagcaatgtgcctactcgtgattggattaaggatgccatctttaagactctgattgcaaatggaatgttcaacaatgctcatataaggctcacgctcacccgtgggaaaaagtgaaggtgacatctggaatgagtccagctttcaatctttatgggtgtgccttgattgtgcttgcagagtggaaaccaccagtttatgataactctcatgggataaaattggttactgccaccacacgtcgaaattctccaaatagtatagattccaagattcatcacaacaatcttatcaacaatattctggcaaagatagaaggtaatcttgcccaggctgaggatgccattatgctagataaggatggctttgtatcagaaacaaacgcaacaaatatttttatggtcaaaaagggaattgtattgacacctcatgctgactattgccttccaggcattacgcgagcaactgtcatggatcttgtggtgaaagaaaactttgtgttacatgaacgacgcattagtctgtcagaattccatgctgcagatgaggcgcggacgcgcatggccaaggtgtgtgttgctgctgccgcggcacagatgccactgcagcacatgtcgctgctgccgcagaagctgccctggacgctaccgctgcaggcacagtcggcttgggcatgggttctttccccacactcctgtcgcaaccccttcctcctggtctcctccggtacgatggcgccttgtcagtgccgctgcgggccgctatcccccaacgactcttttaccgcctacttcacccttgttactaccattgccacccaagtatgttgtcgttgctcgggggtgttgtgatcaccgacactttacttgagtccgatgatatcaaggtttcctaggcatatgaggcagttgccatcgctaacctacatgctcagtggactagtgtacacaacat

SEQ ID NO: 39148 - DNA, 1533 bp, Zea Mays
aatccaggtttttcgtcgattacacgtttaccacactaattttaaattcactcgaaacgaataacccaagcaaatcacttagaatgtaatgactactataaagcaagggatcagcaacatgtatgactaccgatcaaatcacagtaaacgactcaggcaatctaataaatattatacctagtcgactggaataacgaatcaacataccattccaacatctgactcgaatccgcgagatcggtaatcattttccgattcaaacaatttgtcgagcgcttggcagtggccacacgaacttcacgcacaccaccatcaaatctttggacatatttcttggggattcttttgtctgcgcgatcacaatttggagatgtcacgtagggactggcatcgagacgacggaacaacgacgaactagcgagatgaaccacgacgagtgatgtcttgacgcggatgagcaatggcaactggcggactcggaacagcggagtgaggtgcacgaccagctagcaaagatgagtgtgtgcggcacgaatatgtttggcgctaactaagacgtgcgcgcagatgcctaggactcgacgagcaacgacacgaggagtaaatcgaggtcacgttcgggcgaactatacggcatcgactgctccgggccaggacggctgccgcgacacacacgacgttgctacgccacaacaccaccatggccaggaacagaggcgcgagcagcttgcaggggaggccgaacactagaaacgacggtcgggtcgctcatgagctcagcatgggcaagctggtttccacggtgagcgacggcgacacgaacagtgctaggcgcggcttggctggagaagacacaagtcgccagcgagcagagaggcacggtccgagcacagggtgatggggcgcactggagttgggccgagaagagaagtccaagcgccgtccatgggaagaaacctcggctgggcgcgcgctgggcgtacaggaagctcggctgaggacaaaaccgcgcttaggatcgagcagggagggagcacgcgcgccatgaggagctcggcgctgcaaaaatttgagcagagggccagggcagctgggcacacagcggcccatgtctgtgatgtgcagagagcagggggcatcgagcaagaaatcgtggcgcgctggaacgctcgaccggacgcggcaagcagtgagagggacgcgcaccggcgagggagatccgagccggggaaacgccgagccgaggctggagcagggaacgagctcgacacagggagttccatggcgcgcggcgagctcgatgctgggaccagggtcgcgcttcggctgggagtgcgaggacgcgcagagggaaagaaaaacagggacatgacgcgggtagggagcttcaagctgagcgcgagggagaaaggtctgagttggagcttggagaaacaccagggagatgggaggaggaagccacggcgctacgcagagagggagaggacgaccgggcgatgcaggaagagagcgccgccacgagaagaagataag

SEQ ID NO: 39149 - DNA, 1954 bp, Zea Mays
tttctttctttttttcatttttagggaggaactatatagcatattattatgaatacaaagcatgacactccacccacatggtagccgcacggcatggtactgtgtgtggcaataaaaaggacctctgatcaagcctcatttcgcatcggcggacatggtggtggccgtgcagctggccgctcttctcgcgctgctgctcgcgctgtggcgcctggtgtggcggccgcacgccgtggcgcggtcgttcgccaggcagggcatccggggcccgccctacacgttcctggcagggtccttgccggaggcgaagcggctgctgatggccggccggagagggacggcgcccctggacgccggctgccacgacatcatgcccgtcctcttgccgcagtttcacagatgggtcgcggactatgggagaacgttgctgttctggatcgggccgattcccgctgtcttgtctactgatctacagctgattaagcaggttctgacagacaggacgggcctgtatcagaaggacttcatgatccccgtgctcaagttcctcttcggcaacggtgtcatattgataaacggagacgattggaagcggcaccgcaaagtggtcctccctgcgttcaaccatgagacgatcaagagcatgtcggcggtgacggcagaggtaacggagcagatgatgcagcaatggcgcggccagatacacggaagcgaagaggaatccgccgagatagacatgatccacgccttcaacgacctgacctccaaggtcaatggccgcgtcgccttcggcacgagccaccgggaagtcgaggaggtcattgtactgatgcgggagatgcagaagctcgccactgcggccacgctcgatgctccaatactctggcgcggctggccgccgacggagctgataggcgtggtgggcgcggcggcgccgtttccggcggaggcgacctacttgggctgttgctagaggcgtggacgccgcagccgcagcacgggaacggcggcgagacgctgacaaccgacgaggtgatcgacgagtgcaagaccttcttcgccgcggggcaggaaaccacagctacgctcctggtctgggccatgttcctgctcgccgtgcacccggaatggcaggacaaagtcagggaggaggtcgtcagggaattctgcaccagcgacgacggcgaggttccccatgccgatgtcctcgccaagctcaagctgctatacatggtgttgctggagacgtcgcggctctacccgccgatcgtgtacatacagcggagggctgcctgggacgccgtccttggaggcatcaaggtgccccagggcaccgtcatctccatccccattgccatgctgcaccgggacaagcaggtctggggccccgacgccgatgagttcaacccgatgaggttcgagcatggcctcacaaaggccgccaaggatcccaaggcgctgctgtctttctccctgggcccaagagtgtgcactggccagagcttcggcatcgtagaagtgcaggtcgtcatggcgatgatcctcaggaggttctccttctccctctccccaaagtatgttcacaagcccaagtatctcctgtccttgacacccaagcttgggatgcctctcatcgtcaggaatgtggatggctgagagggataatattgtaaaagctcgttttgtgtgtgaaaatgaatacatgactagtgtgtgacaaatggtactctctttgtgttactactgctgtaacaagcccgacagaagaaccatccaatgcaggcccacgaaggggatccagtctgcgccggcctagtactcggcttagggagtttgtgtgagttgtaattgagatataagggaatattgattagggaaaagacatcagacttgtaataagaattctggacagactgtcgctctgcctatctactctgccatctactcttcttcc

SEQ ID NO: 39150 - DNA, 832 bp, Zea Mays
atggctgtgggctgcggctctctcccagtctccctgtccctgtccagcggcggccggcggctgtggctctctccctgtctccactctccagcgcaaggagcaagacagtcgcgggggcgccgtccgcagagccggagccggagacggcggcaacggcatccccatcgtcgtcaccgatgccaagcaggaggtcaccgtctcgcagttcgtcgcacaactagaagttactttggtagtaagaataatttgacacagatatcagtcctcgcgaaatccattcgcactcttgcacgtatggaagacccaatcaaccaaatactcaaaagaacagaggttgctgaaaatttaattctcgagaaaacatcatgtcctttgggtgtcctattggttatttttgagtccaggcctgatgccttggtccagattgcatctttagcgattcgaagtggcaatggtcttctcttgaaaggtggaaaagaagccatgagatcaaacaaagtattgcataagcaacgtgggtgaaaaacttattggctttgttacaagtagagacgaaattgctgatttactaaagcacatttactttcatagtagaaatctttgtgacatatatgatattttcagcacaattcatgatactcttactttttccgagacattgcttgttcataaagatcttataaaggctccaggtcttgatgacttactgctatcactcaaaacagaaggagttgctatttttggggggcctgttgcacatgaagtattgtgcattccagaagcaaattcattccatcataaggctgcaacaccatctagtggaggtagataa

SEQ ID NO: 39151 - DNA, 3976 bp, Zea Mays
aaaacaatgtatttgcatctagttggcgtgaggccaatgacctcatccgatccctttccctttcccatccgcgcgtccctactcctccccctccctcctcaacgacgcgagaagacgcaatcctgggagctccgaaccctagctcctaatttgagccccggtgtcatcgattcctcaggagcccgccgcgattcggctcccgtagcagcatagggctccaccgctccccagctgcatcagcatcgacggcggcggcgcgccgccgcgactacgctcgaggaagcacctagtctcggcgggttctcgttcttggaggccttccataaggcggtttcgtggtgtccgagcccggatctacggcgatctgcaagcggaaggcgatagatgaggcgattcagtggtaacccccaatccggtgggtttccggctggcagaggcggaaaggttcgggccttcggcgggtgatcagatttctccgtgcggcgcgcggcttgtgtctaccgcaacggtgtaggactggagcgcaggagccgacgaggcggtggagatacaaaaaaattgcttgcttgtacacttgttcatgttcatttgttcctgctatctgttgtggtttaaagcatcaattttccgctcaatttaagggcgaagacactttttttgttccttccttgttggtttctatggaataatctctatattacagaagaggagtgtggaaaagcaacaaaaaagaggaatataaaatacaaaaaagatataaccagcagaaaaaagagattttttttgagtgggcaagcaaatggctgtgtattacaagttcaagagtgctagagactttgactcgattccgattgaggggcaattcatctctgttgccaacttgaaggagcggatttttgagtccaagcatctcggcaggggcacagattttgaccttatgatctcaaatgctcagactgatgaagagtatgctgatgaggccactatgataccgaaaaatacgtcagtattgattcggcggataccaggacgaccaaggaagcctattgtcacagaacctgaagagacaaaagctgcagaagatggtgtacaagatgtcatgcccacatcgggtgcttttcttggtgattcatctatgaaatatcctgaagaatctgagtgggatgatgagtttggcaacgaattatatatttctgattcagttccttatcagcctgtttgccaggcggttgatgctattgaaaataaagttgacgaggatagtaaaataaaagcacttattgatacatctgcccttgactatagccaaatccctgatggttatggttctggaagaggctatggtagagggatgggtggaagaatgatggctggacgtggctttggacgtgggctagaacgcaggacacctcctccaggctatgtttgtcacagatgcaaagtacctggtcattttattcaacattgccccacaaatggggatgctagatatgatgtgaaaaggatgaaacccccaactggcattccaaaatcaatgctaatgcaaactccggatggttcatacgcactaccaagtggagctggtgctgttttgaagccaaatgaagctgcttttgagaaggagatagagggcctacctaccacacgtcctgttggtgatcttccaccagagctacgctgcccattgtgcaaagaagtaatgaaggatgctgttctaactagtaaatgctgctttaggagtttctgtgataaatgcatcagggactacataattaacaagtcaatgtgtgtctgtggtgccacaagcatattagctgatgatcttctccctaataaaactctaagagaaaccatcagtcgcatattagaggcaccaccaactagcagtacagaaaatgtgggaagcatggtgcaagtacaggacatggagtcagctctacctgtacaacctaagcataggtctcctgctgtttctgctgcttcaaaggaagaggctaaagcatccacacttgtagaagagtctccagatgctgagagcctcaatggaacaaaagctacaaatattgatgcgagttcttcggataagaaagctttgacagttccagatattgctgaagggaccttggattctaagaaagcgaaagaagataaaccagtagaagcaaccccagtggcaaaagattctcaagaaaagtttcctgcaggggaacaagatactgattttcttttggaagcttcagcggtaaagaagaagaaaaagaagaagccacgtgttcctggaaatgctgaagagcaatggaaaaattttcaagattttggaactgaaaatttttcggggatgcccttgggtccaactggagcattcaacccttactggggcggaggagtgccattgccaatggattacatgaatgcaccgtttcctggtcccatgccttacatgggttatccaccaggtccatttgacccttttggtgggggtgttctcccacaagatccatttatgcccccaggatacatgatgccaggagttcctagggatctttctgaattggcagttaacgctatgggaataaacatgggcccgccagttatgagcagagaagaattcgatcccaggaaacctgaacataggaggagacgtgaaatggatcggttcaatgatagggaaagagagcgtgaccgttctcgagagcgagagcgagaacgggagcgggagcgttccttggagagggagagggagcgggagcgggagcgtggccgttctctggagagggagcgggagcgggttcgagagctggagcgttcccgcgagggtgaccgtgaacggcagcgaggcagggacagggacagggactcacgcagagaggccagagcatcaccaggggccattaatgatagttcctcgatgaggcggaatgatgtatgtcttttcctgtcaatctgttatcatgccaagttttgtactattatcggttccatgtggatcatcttcgccgccgtctccgccacagtagacagcttgatccagcggtttgctttgggttacaagcagcagtcaccagcggtagcatttgcccttgtgattgtgctttcctgggttttacaggatgccatcgctacggcggaaagatctttaggggatagtattagaatttttaagaggtcgaggtcccagccggacaggtcggagcgtggcccgccgcagccgtccagccccgaccggcagtcgcgtcgctcctcctccggcaagaagcgttcctcctccgaccgctacgacgacatgccgctcccacctccccctccgctgcccgcgacgcggcacgaggccgagcccgccaaggcaccggggtcgtcgtccaagtccaaggccagcgtcttctcccgcatcagcttccccggagacggcgccaacccctccgacgccaagcgcagccgcagggcctccgacaagccccccgcgcgctcctcttcctcctccaagaagagcgccgcggcagagggcggggacggccgcggccaccgccaccaccgtgagcccgcggccgccgaggaggagaagcctaggcccgctgcctccggtggcgactactacggcggcacggacggagaggagagcgaggacgaggagcagcacttcaagcggcggccgtcctcgtcctcccggcgcgagcgcgagcaggacgcgccggaagagcagccgcgccactcgcgacggtccagggaccacaggcgccggtgagcgtcgccccgtccgtccgtgatatataaatcttagaagcttgagttgggaggtcgtcgcctccgcagatcagagccgtcctgcttccctgtcgcgtcggagttgggccctgtacattgccttcccgcgattatcatgttttgtttaaatcggatcggatcaaatggggattataataagtttgatttgatggatcatcttaatcgctgtttaattatgtttcccttcttgctg

SEQ ID NO: 39152 - DNA, 612 bp, Zea Mays
cgaaagcaggatatgctcggtccaaaacaggccagcgatcttgttggcttgatcggcgggcacgtaaaactccgcgacgctctgaatccaacgcgagaacactgaacacatgcgcgcgagtcgcgcgaatcatggagcaaaagagctctggacacgaacacatcatggccaattcaacgacggatagtagagcaaggttttttaccgcgagactcgagtttcagctgtagcggtaccagatcactcgaaaaccatagaaaaccgcaaccaataagaaaacgccgatcgaaaaaggggaaaccaaactccatgtgacacagacgcgagtgaagaacacgggaattctcccacaactcgaccagctccgatgaacaggacccatctccgcccgatccaaccagaatccccgacccactacaagctccccgaaacggctccccactccgtcgaaattgggaggccgacttatccgaaccccgcccggccaggccagccgcccaaaaatggaaacgaggccatcaaacccgaggctggcaaaagagggccaacacagcaacaccaaacgtccaaaccgccagtcaggaaccaagagaataaaaggcaagcaagcga

SEQ ID NO: 39153 - DNA, 2623 bp, Zea Mays
atctcatatttttatgccccacgcagcctaggccatcccaccgcagagcaggaaaaccctagcgtacccacggaccattgctggcccacatggcatcccggcctgtggccacatccatctcggcgcctcgcccgccacacccaacacgctgcaccgccgctgccgcttctcctcccccaccgcaccatcgccctgagtaccaccgcacacgccgccggggccgcatctctccccgtcagggcccagccgaacactgtcgtcgcctccacctccgcgtttgggccaccgcaagagttcagggctcctctagggttcgagatcaaatccggccagtagagcagcatcctcagcaccacgctcaccatccccctctacctcggcaccggcgtcttcaccctcggcaggagagtcgttgaggctgagacgacggcacgaatgcggcaaggagcttcagattcactgccattagaaacttgcaggtgaggaaggagagggtccaagttcctgacctctgcatcgactgagagggtccaagttcctgacccctgcattgactaattatctttgagtttcatcattatgttgaaattggtatgcgttcaaaatactcaattgattctcacggctaccgtgcctcctagcgaaacttgcttttcgttggagtatctggcgtagtaatggaaaaaattaccttctccctttgagggttcagtccatttcgttctctataattgtcacctacccttcccgagcctacttttgttgctactataagaataagaatgaaataagcttcatctctatttgtttctgatatgaattgtgtagcttagagttgtctcttaacttacaatcttacattggtgtaaaacagtgaccacactaaaagcacaaatgcaaggttttacagaccagttgtgatgctactaccactaacatgtacaaataggaaaggcaagaaaatggcttagagcaagtatttttaaagaaaaagtgatccatttaagaaacctttttattaagttactcctgataccagctcctcattccgcgagtgtcttcagcttcactttctctatctgttgtacgcgggtgtctcttcgtcttgtgtgtgagttggatgagaactagacaactggtaggaaccactctctgtttcagtttctgtttgtgtttcacttcagttcaggttgtctgcgctcttctcttagggatcgagaatcatagggaggttcctcgcttctataagaaatatgtgcctttttgtttcattttccttgtggagttgtagttcagttcagttcatcttcgtgcatggggagtgcttggttcgattgttcacagccataggtgctacagattcgtctatggcgaagacagaagtttttgttttcatgatgttttcatggaagatggcgagaagctctccacccttatcatagttaactcttttgattaagtgattaaccaatttagtaacacatatttaatgttttagcttgtttggtttagatatggaggtccgtcagtaattttgtaattttttgtattatctttatctggaaactaagttgtatgtagtgacaggtaagaaatactgtggtggtttggacctcagttattggccagatgaagggcggaggccattatcagatcctcgtccacctttgggctactgctgataagaggacgagtgtcgtacacctctccaattccccccttcaatgtggtcagtgctgaatcatctacgtcatacagtgaacaagggcatactgatgagagaagggatgacatggatttttctcattcgagcatcaggttttgtgcgctgattatggtgtggtcgttggtgagactgcaacgccctctgtaatcatctctctgacaagttagattatgtgctgaaatttctgttatttttgttggattgtattgttgtgaaagggggcatagtacgatgaattggggactgaaagagcatagcagagcagagggcctatgtaatataattttttatgtataaattgtgcaaaaacaaattacctcttttgggtttcaatcatttgacaacccttggaccctgacattatattagtttacttaccttgaccttgtgatgagttttggaatatttggaggaggttcacatggaccgaacagcctgtttagtagctttgcttcagcacagtaaactatatttagaacatttggatggtaaactattccaatcgttgttgttacatggtatcagaggatttggcagtcaagtcaatgcctcaattgtgagatatagaaatcgatgataatatatgtcagctccggcgaacgagaaggcgtaccgcagggccatgaagtgcgcctgcctagccgctgcggccgttctccacgaggtccggtcactgagcgtttaccattttatggcccactatctccctccttgtcatggcttggtatggcgtggcgcctggattttagccgctgatcggaattgtcgagtgcgtagggtacaattgggatcgggagattggggcacactgtccatttgcgtcagtgagacgtggtgcattataaactgagccgaccatggcctacttgttttcagtcctataaatttggggtttct

SEQ ID NO: 39154 - DNA, 1911 bp, Zea Mays
ggaccaatgggcctagagcccctagacaggcagtttccatgcctgctccaggcccaggcaaaacagcaccggactgcggctccaccattgccgttcctgtttcttcgaattcttctcccgttcaggcgtccatccctcttttctctcgtggcgacgaagacgaccgacgccgacgctgacgccctacgccaggtgccaggttccgtcgggtccttcgccggcgaagagcatccaccaggcgacccagtgctgttctggtgcggtttcattgcggaagttttgttgtgggattttccggtggcgaagatgatccgactacccatgtacgcggcgttcagcctgctggcgacggcttcggcggcgtactacgcgttcagcagccgggagcagttctacccggcgatggtgtcactcatacagaagcgggaggcgtctgttgccatcttcttctcctttgaatatacgatactagcaacatccactttatcaacatttgtgaagtacatattctatgtcagtgacatgctaatggaaggtcaatgggagagaaaggcagtttatacattttacttggagctcatcagtgaccttgtgcacttgtcattatacatgctcttcttcatagctatcttcttgaactatggtgtcccgctgcacttgattcgtgagctatatgagaccttccgcagcttcagaattcgcattgcagattacatacgttacagaaagatcacttccaacatgaatgaacgctttccagaagctacatcagaagagctcgatgcgagtgatgctacatgtattatttgccgtgaggagatgactacagcaaagaaactgctctgtgggcatctgttccatgtgcattgtctgaggtcatggctagagcgccaacacacttgccccacgtgcagagctccaatcgttcctgcagataatggacgtgctgcatcatcacgacaacatggagcccaggctggggttcaacctggtactgccactccatcctcagaaggagcaccaggtgagaacatgagcaggcgccaagcaaaacttgaagctgctgctgcagcagcttctttatatggaagatcttttgtttatcctccagcaaacaccctaaacagcaggtctggttctccccagcctacatcaagtgcaccacaatctgaagccagtagctccaatcatcagtcacaaaaagaccaagaaacacagctccaaaacagcagcgatggtttagtgcctctgccttttagtgcagatggtgttgttggttcaggaacaagcacaagagatcttgaaaattcactgcagaaggcacaagaaaactttattaagagccagattgagatgttacaaatccaactgcaaatggtgcagcgtggcgctgctgggttgagcagtagcgagaacactgagcacacagaagactgactgaatctgtaaacaggcactcctgcatcgtggagtaataatgagaatactgagcacacgcagctgaatctgtaaataggcggagatgaggatggggataaaagaaagcaatcaaagaattggctatacctgggggaaactgatgttttgcctggattttggtaggcttgttgactatgctttcctgttactgtgttagtgccttcttgccagcgttagatgtttctctacgtgtggtggtttctgtaggttgggtacatctaattgctagtttaattatacgattacacaaaattcttgtaccgagggaaaatagaaaggataattgtacaaatgacttttttgtgtgcatatccatgatatcgggattgtctgtagattttgtgtttactggagtaaaacagaaaatttggctgctgattggatgttgaacagagtggatctggcatgcctaatactgcagctaaccgagcg

SEQ ID NO: 39155 - DNA, 3685 bp, Zea Mays
atgccccgcccgccctgctctccgtcgcgcccttccagggatcctccatcgccgctcccgccatcatcgcgcccgcgctccatcgatggaaggtgtcgccccgccatcctcgcctcgctccccgcgacacgcggcgccagcttgtgtcgcatcttctatctattcaccagcaaggtacctggcacagaacccagccgaatcctagaacccagccggatcctagaaatttcccattggcatctggtgaccgtatccggtggttgggcgtcagacgcagcggggcggtaccggtgcttggagttggaccacccgtgcaaggcaccgtggtgcgacgggccgctcggcgcgctggagagcaacgggtgggtgtactcggcgcactgctccttcaagctctttgtggccgatgcgtcgtggtggtgccttgacgggaagtggctcttcttctggggcgactctaaccacgtcgacaccatccggaacctcctcaccttcgtcctcggcatcacggacacgtctgctgtgacacgccagtttgatgcagtgttcaccaatcccattggtggggcagggactctaaggatcacaagcatcttcaacggccactggaacatgagcatgaactatctcggcttgcattccctccggaacagaggtttccggcagctcatccggtcctacttcatgtccggtgatcgtgttccagacgtcatggtcctgaactctcgcctgcacgatggctgctactggaccagcgtccgcatctacgcgcaggctgcggatttcgcagcacagttctggtccggagtcatggacaaagtccgggctcgtgggcatgcagtgcccagggtgttctaccggacgcagatgcctcagatgcagggaaaaaccacgcgactcccttcacggaattgagagatgaagctggtgtcacatactcacatccgcagggatgggtcacgttgcagacacttcctaatgaagtccttgtagtgctgcgaaagattttgttagtagacaacacaaggaaggaagcacaaggaagtttaacctgtatagcacaaggaagcaagcagctcagcctccattttatttggaaaagtcttatacttatcagaagtaagtttttgatcctctattttattacagattttgtgattccagatctgttgacctcaaggcagattggaaacaaccttattgttgttttgttgaccaactctagaaagaaaagctaaaactctaccctctgcgcccaccttcaagggtcgctccctatcttccttcactctccatcaaagctttgctcgcatcaaattaaatttcttttcgttacgaatttagcttcattatataatattttgctcagtgaattgatcaagtttggtgcacgagtgtcatgctcctaggttttgtactaattgaagaagtagcaaatgtagttcgtggtggtggtttaagtcatgtctgatgaaattgatgcttatatagaggggttctttgtgctttcgaaagaattctgcaggaaaatcgactgcatttgttgttcttgggtacacaatgaaagatgggaaggcatattttcccccacatgacagtatctatacatattgcagttgaaatggaaataattgaaatacaaggtatgtgcaggtgcagtctattatattggagttaagagagcgctagcttgcagtcacactcgatgaagtcctatagggctagattttaaaagtaagatccagtacaaggttacttcaattgcaattagcgattagccaaaactttcatcttcggtctcactaggcctcactaggcctttcatcttcaaaagaatttataaagatattatttttcagtctatctctacatccctctctccatcttgttatgcaattatgagttcattagatgtcattgatctaaattaatttctatccattatgaacttatttttaatgaaccatgctccttcttcgttgctcacaacagggtccatgtacttggcacatgatatacatatacgagatggacttaaaaattaacaaaggtcttcttttggtggtagataattttggttttcttatgattctctttatgaagtgggtgtggtacctctaaacaaatagatgatctgttgacttatggcagtcaggcattacatttttttgcatgaaatcgacatctgagaagtgataattttgttttgatcgcttctctattgcaagatttagatggctactatcctttgcaattgatcaagaatggtgagctattctaaggaagcttctgaacaatatacctgttgtcctggagtgtcacagatggcaaagatttgcgcttagagaaggaggaagaacggtcggtgctagagtcatctccaaagttcttagctgatcagtttccactttcttctctgtagtctggttgcaactgttgatgatattgtaggtgtatgaaatcttctaagcaaactgttaaatacattgcacccgatcagaagggatgctctataatgcagcctggtaaacctccctcctgggcccagctgtcctctgctttcagtgtgaaactactgatttggggtgtgatctccgtacatcgtgctccagccgcactcagatctagccttggccgggagacaccgcgacagaggctggacgtgctcttcccgtcctcatgccccatgccgctgcgcgctcttcccttcacctctcactacacggcggctgcggggcaggggtgaaagaggcgaggcttctccagcttctcgaggccggagaccgtttgctcaagggtgtcgttcttgacggcctcctccgacagcgtggacgcgtggttctcaaccatggccttggtcacggcaggaagcagagcctggtgccagagaagctcccagtgccccatgtgttggcagcatatcagcatgaaagatcctatgagccaagagctactagaggctgttgaacaagagaggaacatccgatctaatccttcacgtaatactgctgttttccaccatccaatgctgggtgattttgaggttaagaaactccatcaagaaaagcagttaggaatgatggtggacaaaggcctggtagcaactaggacagggttgagtcagtaccacctgtctcactggcctagaatgtttgaggtgatcaggatgctggaaggagacatgctcacagagagatgggaggtgtcgcagaacgtggacatgccagagttcgtctcatcggagctcctacttcaaaagtacatggattttgcagcggacgaatgctcgcttggtgtagaagccatggagctctctggactaaggtgaccatctgatcgatcgaatcggccatcacacaggtcgcataggtgtcttgccatatcaagcctatattattgttgtattacattggacacatagggaagggaaaaaatccggtgaattatagggtgtgatctgtctgcctatacttgtggtggcattcatttgtgcaaatgattttgatatattgatgtagagaatatatatgttgtttatttctatgtaatcgttgcacactataattttatcaaacaacttttgtattgttgcaaggggcgacaaaaatccagtggattgtagtgtgtgatttgtctatctataactgtggtggtattcatttgtgcaaatgatttgttgtatatt

SEQ ID NO: 39156 - DNA, 932 bp, Zea Mays
ttttagccaaccaactattaattttagtgcatttaaacacccccataatttagcccctcctttgtatggatgactccagtgtcactgtactgtacctcgacttgtcacctcacctaaagcgacgtgacctagaaacagcaagaggtcttgactctcgaccaaagagtacatgtgtgatcggataactgtgggcctacaaggttttttcatacaaacttgaaacctcggttttcgttgtagacttgatgattcccttgccatatatgtttgattaaatcatcatcttacatgctaatgttccatacttccatacagtggcgaatgcaggacggaaattcatggagccaagaagaataattgacagaatcaataagggcgagggcactgggaaagatgtgacaggtgatgtctctggctgagagccagggctcgttagttcgccaagctcaccgatgacgatgacaacgagcgaaacaagagcatcgagaaggggctgatgttgcgcattgatgaggggtggtggcatcgaggcggactggctcgagcgacgtcaggaagaatgggaccaggcgaattgatgttgtaagagtgattggatcaacaacactttatattgatctcaagtgtaatatttatacatatacaaacaatgtctaatgcatcatgcggtcattgcgcaagcgagcaccgcgagcaggtgacatggtcctcttagttagaagagtcatatgagcattgggcattgggtcgttgtagttgttaacagatgtgaggactagtccgaagagtaggacaatagttaggagaactagagcaatctaatgagaagacctataatgatattgttttagccgactcaaatatttatttttttctatacatgacattaaataaacatatttataaaaggttataagaatttgaggggcgca

SEQ ID NO: 39157 - DNA, 3416 bp, Zea Mays
ggagcaaagtcgaaaggggaaaaatgagttaaacccaaatcgacaccaaacccactccaggaacacccgcctccgccgccgccgccgccatcgccggcggccactacaagcgcggcgtccggagacagtactgcgctaccaacccctagagcctggattctgatgagccctccatggcctgtcatatctgtcccctcttcaatctccgactcttgctgctgctcggcgcggttctcgggaacggcggcctcggccggggcggcggagcggaggcttcagatcgggcggacccggacccgtactcgatcctgatgtggcacgactactcgccgccgtcgcccccgctcccgcccccggacccgccgtcgccgacggcgacatgtgagggggacctccacgggaagggtgacttccacacgcgctgcgaggtctccgaggaagtggagctggacggcgacgtctacatcacggggaacggcagcctcgtgctcctctctggcgcctccctgacctgcgagaagtacgggtgcgttatatccgccaatttctcaggcgaggtgcgcctcagccgcggcgtccgcgtcacagccggcagggtctcgctggttgccaccaacatcacggtcgccgacacggtcgtcgtgaataccaccgcgctcgctggtgatccgccagaccggaccagtggcgttcccacggggacgcacggcgacggtggcgggcacggtggtcgtggcgccagctgcttcgtcaaggaagggcagacgcaggaggattcatggggcggcgatgcctatgcatggtctgacctcgaacacccctggagctacgggagcaaagggggctcgaccagcgttgagaaggactatggtggtgacggtggtggcatcgtgtggctgtttgctgaggacctggtcatgaatggcacagttctcgccaacggtggggatagcaatgagaagggtggtggtggttctggagggagcatctttataagggctgcatcgatgcatggtggtggcaagatcagtgcctctgggggtgatggtttggctgggggaggtggagggcgagtttctattaacgtttttagtagacatgatgacacccagatttttgttcacgggggaaggagttcaggctgtccagataatgcaggagctgctggaactctttatgaagcagtaccaaaaagtcttattgtcagtaacaacaatctgagtacacaaacagacactcttcttttggagtttccaaatcaaccactgtggacaaatgtttttgtaagaaatcgtgccaaagttgctgtccccttgctctggagtcgcgttcaggtcgaagggcaacttagccttctttctggtgctattctaacttttggtctcactcgttatccatactcggagtttgaactgatggctgaggagcttcttatgagtgactcaacaatcaaggtgttcggtgctttgagaatgtctgtaaagatgctccttatgtggaactccagaatggaaattgatggcggtggagattcgatagttgcaacatctttgttggatgctagcaacctgatagttctgaaggaatcatctgtgatacactctaatgctaatcttggagttcggggccaaggtctcctaaatttgtctggggacggagacacaattgaggcgcaacaccttattctttcgctgttctacagcatacaagttggacctggttctgttttacggggcccacttgtaaacagaagtagcgatgatgtctgaattgtgaagctgatagctgccctgtggaaataattcatccaccagaagattgcaatctaaattcttcattgtcatttacccttcaggtctgtcgtgttgaagatattgatgtctggggtctcgtacaaggaactgtaattcatttcaatagggcaagaagtgtcactgtgcatacatctggaaccatcagcgcatcaggcttgggctgtcgaactggagtagggcaagggaaaatgttaagcagaggtatatgtggtggtggtggacatggtggaaaaggcggggatggtttttataagggaaaccttgctgagggtggagctatctatggcaatgctgatctaccttgtgaacttggcagtggcagtgggaatgactctaccgagttgtccacagctggtgggggtataatagcgatgggctcatgggagtattctttgccaagtcttgccctctatggctcagtagaatcaaatggtggtagctatactaatggctctgttggaggacctggtggtggttctgggggcacaattcttctatttgtgcatactttgtccttagctgaaagctctgtcctctcaagtgttggtggcttcggaaatgctggtagtggtggaggtggagggggaaggattcatttccattggtctaacattcctactggagatgatggaggagtcagcaaagggctgggatattctggtggcaatggaacggtcacaggaaaagcttgcccaaagggtctttatggaacattttgcaaggaatgccctttgggaacatacaaaaatgttactggatcttctaaatctttatgctttccatgccctcctggtgaactccctcaccgtgctatatacataaatgtcagagttcttagtggagggtctgttcttttttttggtggtcatgggtgtcatgagctcgcgtccgtgctgggcacgctgagcaacgtggaagggttcgcgttccagcgcgacgtgtcctacacggcgttccttgaccgggtgcacggcgaggaggtggcgctcaacaagctggggctgtggcgggtgccgcacccgtggctcaacatgttcgtgccgcgctcgcgcatcgccgacttcgaccgcggcgtcttcaagggcatcttgcagggcaccgacatcgtcggcccgctcatcgtctaccccctcaacaaatccatgtgggacgacggcatgtcggcggcgacgccgtcggaggacgtgttctacgcggtgtcgctgctcttctcgtcggtggcgcccaacgacctggcgaggctgcaggagcagaacaggaggatcctgcgcttctgcgacctcgccgggatccagtacaagacctacctggcgcggcacacggaccgcagtgactgggtccgccacttcggcgccgccaagtggaatcgcttcgtggagatgaagaacaagtacgaccccaagaggctgctctcccccggccaggacatcttcaactgatgatagcccatgcatgcatgcatgttttagtttcttgggacaataatgtgaataactcccagctagcggctattaattaatctgtatatagattgatcactgcactgattgtatgtcaaggtcattatttacgttatggtaaaaaaaataccctcgtcgtata

SEQ ID NO: 39158 - DNA, 1136 bp, Zea Mays
ttcacaccacaccacaccgtcaaaatatatatatatgcgctgctgggccagcaggggaacatgtcggcggcgcccgcagtcgcagcgcgcgacggcgaaaggagtagccccgccgacaaggaccgcgccgactccgcggcggtgtcagccaggcccagggcggcgcggagcggaaaggccggcggcgcgccctgcacgccggagcgggaggagccggccttcaagacggtggtgtacagcgccagcagcagcgtcggcggtggccggggccggcgcgcgctcgccgagttctccagctacgtggtgcgcaaggcgccgccgctggagcggagggtggagtgcaccctcgaggagctctgcagcgggtgccacaaggaggtcaggtacacccgcgacgtcgtcaccaagaacggactggtcaccaaggaggaggcgacgcggacggtccgggtgaagcccgggatgaggaaaggcgcgacggtgacgctggagggcgccggcgacgagcggccgggctgcctgacgggcgacgccacgttcgtcgtatccgagaggaggcaccggcggttcaagcggctcggcgacgacctggtgctcagggcccgggtgccgctggtcggcgcgctcacggggtggcagctctcgttcaggctgctcggcggcgacaggttccggtgcgcgttccgggacgaggtcatctgccccgggtacgtcaaggtcgtcaggggcggcggcatgcccgtcgccggcggggccaagggcgcgcgcggggacctcgtggtcaagttcgacgtcgtgttccccgaggacctcacggacgagcagcggaaggggctcgccgagattctgaggggctgcggatgaagcttgcaggtcaactcaaactgcggcctcgtcctgtgacggcttcgtgccgtgtaaaaatttttgttaggcgcttctgttgatagacagctcgggacaggaggactctacagcgcacgctgacagcgtgtacatagattacagaggttctgtttttgaaccgataatatacgtggttgtaacctgcaagaactgtatacggcgattttttgtagtttctcttttatttattacgtggatctaaatatttatcggttaccacaccagctagc

SEQ ID NO: 39159 - DNA, 1930 bp, Zea Mays
gagaaatttagagggaatcgctgcggatagcgttaggcatgccttccccgatggctcgcatcttccaccgccatctcctcctcgccgtcgtcaccttagccgtggccgcttctctccttcgcccagctgccgcagtgcgcccatttgttttggttctctccggtgaggacttcctcaaggatccggccgcgcacccgtcccttccctctgccgactccgacgacgacgatgggtgggacgacttcgccgacgattcaccggccgccgacccgctactctctccgtcctcctgggcccccctcctcgacccaaccatctctctcccctctggcgatgagacggactcgccggccgacgcgctcttcgtcgcgggcacccgcgcgatgctatccgcagcgtctgatggagacgacgcggcgttcaccacggctgccgcgcagatcgaggcctcggcagaggcggggcacccgggcgcgcagtctgcgctcgcgttccttaccggcgccgggatgacgcgtccggcatcccggtcgctcgcgttcctgctgcacaagttcgccgccgacgcaggagatctccagtcaaagatggccctcgcgtactcctacttccgccaggagatgtatgaagaagctgttatactatacgctgaacttgcagaagctgccctaacaagctccttgatatcaaaggagccaccagtgattgaaccaatccgtcttcacagtgggactgaagaaaataaagaggccttgaggaagtcccgaggtgaggacgatgaagatttccaaatcacagagtatcaggcacagcgaggcaacgctgccaacatgtacaaattagggcttctgtattactatggactacgtgggctccgccgtgattatggaaaagcatttcattggttttctaaggctgttgagaaaggcgagacacgggcattggagcttctgggtgagatctatgctagaggtgctggagtggaaaggaactatactgaagcgtacaagtggttggcacttgctgccaagcagcaacattactcagcttacaatggattgggttatctatatgttaaaggctatggggtggagaagaaaaacttgacaaaagcaagggaacttttcgaacttgcagccgagaataaggaagccggtggacattataaccttggtgtgttgtatcttaagggaattggtgtgaagagggatgtaattagagcatgtaatttcttgcttcatgcagttaatgctgggcaaccaaaagctatttatcaggtggcgaagctgttccagaaaggcattggtcttaagaggaatctccatatggcaacaatgctgtacaagtctattgctgagaggggaccctggagttcactgtccagatgggctctggagtcttatttgaaaggcgatgtagggaaagcattgctcttgtattccagaatggcagatcttggatatgaggttgcacagagcaatgctgcctggattctggataggtatagtgatcaaagtatttgcatgggagaatctagtttttgcacagatatggaaagacatcttcgtgcacatgctttgtggtggcatgcatccgagcagggtaatgagcatgctgctttgttgattggcgatgcctactactatggccggggcgtcgcaagggactatgaacgtgcagcagaggcatatatgcatgctcggtcacagtctaatgctcaagctatttttaaccttgggtacatgcatgagcatggtcatggactcccccttgatttgcacttggcaaaaagatattatgatcaagccgttgaggtggattcagctgctaagctccctgtcatgcttgcattaacaagtttatggctaaggacgaactatgcagacagttttttgggtgagtttggataccgaaatcctcttgggatccc

SEQ ID NO: 39160 - DNA, 1954 bp, Zea Mays
cagcctatccaccctcctccgccgctcgcctgcccgctgctgcgcttcaccccgctctcgcctcccgccgccgcgccgtcccggtcgcgatggccctgcgctccccggatctgcggtggctcggatcgctcacgaggcccggccgccttgcaccatccccactcgccgcgctcgcctccccacggcgccgccgccgcgcaccgtccccttcgccctcgccctccgactcctccaccccatctaccgcccctacatccgacagtgggccgggagcggaggggatggaggggctggagtggaagaagatcagtgccaagaggttcgggatcaaggagtccatgatcccccccgaggcctggaacgtactacaccgcctccgcagcagaggatatgatgtgtaccttgttggtggttgtgttcgagatctcataatgaaaaagacgccaaaggatttcgacataataacaacagctgatcttaggtgaaagacactttcttaggatcagctgttatagtaggaaggcgttttcccatatgtcatgtacatgagaacaattccatcgttgaggtgtcaagttttaatacttgtgcaaggggatcaagtggtagccagatttacaattcaaagagccaaaattgtagcaagaatgattttgttcgctggaagaactgccaaaggagggacttcacaattaatgggttaatgtttaacccatattcagaaaagatctatgattacttgggaggcattgaagatattaagaaagctaaggtccgtactgtaattcctgctggcacttcgtttcaggaggactgtgcccgtattctacgtgcaatcagaattgcagctcgtttagggttcagcttccccaaagaaacagcttattatgtgagaacacttgcttgctcagtggcaagacttgataaggcaaggatactcatggagatgaactatatgcttgcttatggttcagctgaagcttctttgaggttgttgtggaggtttggcctccttgaacatttgttgccctttcaggcagcatatttctcttcgactcgttttaagaggaaggataaaggaactaatatgctacttgtcttattttctaagctggataattttcttgcaccgaacaggccatgtcacaatagtctatggataagccttttagcttttcatgaagcattggcacgcaaaccatgtgatcctttgatagtggctacttttgcactagccttttacctgggaggtgatatgtctttggcagtggatatcggaaaatcaatcaaccgacaacatgatactggctttcgggagctcttagaacccaaagtctggactgataagcatttggcaggtgaagtacaaagctttgctgcattgatgaagcaggcattaactgaaatgactgatgagtatcatgtcgcaaatgctatggcaaaaatccctcaagcaccttcctcagatcttgtatttataccactacaagcctacctgaaggttctcaaatttatcgagtgtgttcaatatggcaaaaaggagcgtggccatgaaccaaaacgcgatgggatgatcaattaccataacctgtctaatggtacacatgcagaaataagaaacctctttacactggtggtttttgacacactgtaccctacagacacggaggatgaaaatgactgcagttcttagagagacatcatgattgggatgaattcaatactttgccagacatcaataaatactccatttgtcccaaaatatatttctttctagtcttttttttggtccacattcatcctaatgatagtgaatgtagacatacatacaaactatattcgtagattaattaatgaatgtttgtttagtttaaaacgaattatattttgggactgagagagtaataaataataaatagccagggacaactggagctgctgcatcagagtgaag

SEQ ID NO: 39161 - DNA, 326 bp, Zea Mays
gtgacaggtacccctgcgccccgcctccctccgacgcccctaccacaccgccatctccgcgcgcagattcaaggcaggcgcgccccgctcccaaatttcctccgcgctagggatccgccgcgaatcgcccatggcagccgcactccatcgcccccttccatccatggcatcgcgcgtccgcgcccctacgccgccacctcactcctggtcctctctcttgcccccatcccccatgaatcccacctccgtgatgccctcagtccccttccgctctcagatttcggcatctcccggatccggccactcgcgagggccttctgcgacgc

SEQ ID NO: 39162 - DNA, 1293 bp, Zea Mays
cgatccgcgagatctgtgaacccgaccgtgtcggggcgcatagatccgcccgattaggctggcattgttgcgctaactctatttcttgatcaacatcaacatgtcgcgggaggataatgtttacatggccaagctggctgagcaagcagaacggtacgaggaaatggttgagtacatggagaaggtggctaagaccgtagatgtggaagagctcaccgttgaggagcggaacctcttatctgttgcctacaagaacgtaattggggcccgccgtgcctcatggcgcattatctcctccatcgagcataaggaggagtcccgtaagaatgaggaacatgttattcagatcaaggagtaccgtggcaagattgaggctgaattgagcaacatttgtgatggtatcctgaagttgatcgactctcaccttgtgccttcctccactgctgcagagtcgaaggtgttttacctcaagatgaagggagattatcacaggtaccttgctgagtttaagactggtgctgagaggaaggaagctgcagagagtacaatgatagcttataaggcagctcaggatattgcgttggcggaactggcatctactcatcccataagacttggacttgcacttaacttctcagttttctattacgagattctgaactctccagacaaagcttgcaaccttgccaggcaggcgtttgatgaggctatttctcagttggatacgcttggcgaggattcatacaaagatagcaccttgatcatgcagctcctgagggacaacctaaccctatggaccgctgacagcacaacggaggacggcatcgaggagggcaatgaggcctcgaagggtgatgctggtgagggtcagtagtctggtaaaacctcgattgatggttcggcatgtttttgaagtctactgtgttggaaaccatgttctaatagaaggcgtctcccgctccatgcattccaagattctgtcctccccctccctccccccatgttgtaggctggtagtggtcaaattagttggccctgggtccatttggactgatgtattgtttactgctattgaagtcattcgttctcgttttgctcttgcagtggatcgctatagccttgtgttttcaatcttttagggcctgtttgggaatgcagtttcaaaatactgtaattttgagataccatagtttataattgtacatgacataaatactacggtattgctttaccacaataaaactatagtattgctcaaaaccgagatctgtttggttctattggaaaaacaaa

SEQ ID NO: 39163 - DNA, 307 bp, Zea Mays
gagaattaaagtcaagtcagcacaaaagttaccacaacggtggcgaggatgacgaactggtcattgttgtcggtcctcctctacgtcacctcctgcgtcaagatgacgccacggtcctcgatatagtagtcgtcgaacgcgcgcgacataccgagtactgatgactcttggttgggctgtaaaacggagtgcactctgggctcatcagcaaggtagtacccctagccgttgcaccaccagatgtggtactcctctacatacatcatgttcaacgacactcacacaacgtcagcaacggccatcgtcc

SEQ ID NO: 39164 - DNA, 1756 bp, Zea Mays
cctatcgtctgttttgtgcccaaagttccaataaagtattgttgaaattcgatgagcaaaaccatggaccagcaccgccggtatcccgttcccaattccacagatttccgctccccactccgcactcccagtacttaaaccacctaaaaaccaagcaaaatcccacctcccgaaccctggactcatagacaaggaattgggagattcgatttctgctattcagcccacgcccactggttcaaccggtttcttcaaatctcaggcttcaaggccgcaacttttcccccgttggggttggacttggacagctgccgtgcttgggaggcattgccggcaacgggaggtccaatcatcgatccttcgattgtatataaggaccacggttcagattactgtcaagcatgtctctactttcaaagttgcgcttgatcaccgtggatgttactggtacactgattgcttacaaaggacaccttggggattactactgtatggcagcaaagtctgctgggatgccatgtcctgactataaccgcatgcatgagggcttcaagcttgcatacactgagatggcaagacagtacccttgctttggatttgcagctaagatgccgaacatcgaatggtggaggacatgtgttaagaattcattcgttaaggctggctatgattatgatgaagagacatttgagaaagtcttcaggcgcatttattctgcatttggctcctctgcgccatactcggcgtttcctgattcgcagcccttcctaaggtgggcacgcgaaaagggactcactgttggcatcgtcagcaatgcagaataccgctacaaagatgtaatcctgccagctttaggattgaatcagagctccgaatgggactttggggtgttctcaggtgtcgttggcgttgagaagccagacccaagaatttacaagatagcgctggagatggcaggaaacgtcgctccggaagaagcgctccacataggtgacagcatgcggaaggactacaccccagctaggagcatcgggatgcatgcgctgctcctggaccggttcaagactgccgacgctgagagctggaggcagtcaggcgccacggtgctcccggaccttgtcgccactcaagagtggctcaccaaggatcagaatgacgaacaggaggaaacagtggcagcacgagtgctgaagagaatgtccgaaaagctatagatgggggctttaaccatgcattaattctacgagtgttcctttatattatctagctatggactgaaggtccaaaagcaacttatgctgatgagaggttggtgacgattcttggctactggctactgtaattagcttgagctactattctggttgcagcatctgtggctgaacacgagtaccatatctgagtgtcataagtcatgttgcgaagaacatgagtagcatatttcaggtgccgtttggttcatatatttgtaatgtaatgggtaacggataacgttaaatcatgtttgttttagtccaaccgtaatcaaataccaccctaaaatttgataccagcctattcaaatttgttaccgccagtaatcgagtcgaaaccattaccatttgcgttacattttttgaaccaaacatcacctcagtgtcatgagtcatgttacgaagatctcgagttgtcttacattcacctgcgtggagcagtagaggagcaagtggaaatgaatctgaacatgagcacaataataaaggacgaagcagtgaat

SEQ ID NO: 39165 - DNA, 283 bp, Zea Mays
cttcttctccgccgaaggtcctcaagacataaacacctttagcaaaatgccacaagaggtccgccccacttctgccaaaggttctcaagacgaagaccttgggaagaagcaataatgcaaaacaccgaagctcagtagcttcgactcagatcaagcaaagaaggaaaacactagatagaccttattagtttaagctgcttataaacaaatgttcaagggcatggatgtaattttacccagactgcatcatgtgcctataaatagatgaaaagtaacaccgtac

SEQ ID NO: 39166 - DNA, 2468 bp, Zea Mays
ggacttttagaggtgatcagcatgatgatgttttataattgtttgcaaaagggctatagtacttgatgagatgaagtcaacagtgttttcaacagctgttgtttctattgggtatgcattgcttggatgggattttgcagcattatcagaagctaatcatcatatggaaaaagaatttgaattgttgaatggaccttctattgaaggtataacattagcagcctcaacatttggggctattgtgataacaatattctctggcgcgctattagattggctcggaagacgtgtcatactggtttactcgtctctggtattattttcgggtggcgtcttgatgctgtggtctcctaacatctacattgtacttctagctaggttaattgttggatcaggaagtgggttggttttcacctgtgtccctatttatatatccgaaacatctccttcaaatatgaggggcttacttggaactatgccacagtttatgttcttcataggaactatcttttcatattgcctgatattctggttaacattaatgtcttcacctagctggagaatcatgattggtgcaatctttgctccttccatcgtgtactttgctttgttggtttactacttgccagagtcacctaggtggcttgcaagtgatggaaagattagtgaggccagagtttctctgcagtggcttagaggaaagaaacatgatgtttcaggagagatagctgctattgtggaaggtgtggacatcatatcggactccactgttggcgctgctcgtgctcagagtttctctggaaccagtgctagccacacttggccccgtagtactttttattggcagctttcagacccactagttgatcttctcggaagcgttcatgagaatatgtcagaaggaggaagtagacggaatagtttcttcccagtcttcaacagtttttcttttccagagcatgaacatatgaatgaacacagggatggtaacagtgatcaacagactagggagacttattatgctggagaagctaataatggagatggtttaagggcttctctgctttctcaggcagcaagtgttgaagtaaatgatacaaatacctcttttacttctgaagggagctcttcatatttaagaaggcatggaacatcagtgcttgcacaagagtttatggcgtctatacatgattatgacattgaagaagaagaagaagaaatccatgggtttgcattgcctcaccagtctgcacctcgtgatatggaaagcaccgggagacatccattcagacatcaaatagtccggttatctgaaacagctgatatgaagtttaaatggcgggtgcttcttcaaccaggaatcaggcatgccttatgttatggcatgttaattcaagcccttcagcaatctacaggaatcagtggtcttctccgctgcgctcctgaaatatttgagcagtctggagtggctagtttgttttcagacattggactttctcctcattcaacatcaattctcatgagtacccttaatgctttgctgatactcccttgtataactgccgcaatgctgctgatggatgtctgcgggagaagggttattgtgctggccactactcctgtcctgatactatcattgagtgttatgtctatgtccaccctggtgaatatgggaccgttcgaaagtgccgtcctcttccacttcgcattaaccatttgcttctggtcctatgtcattggtttgggaccgataccaaacattctctgctccgagatattcccaaccaaggcccgtgcgacatgtgcaagtttctgttcgctttccttctggtttgggggcctgctttcagcgtactgcttcccggtgatgttgagcaccatcgggcttggcggagcgtgtgggatctatgcacttgtgtgctgcgctccgctttttctcgtctactatcgaataccagagacgaagatgcttaacctggagctcattgcggagctgttcaagctttcaaggcaggagcatgtacagtagattgtccaggaaccgaggtagcccaggctgagtgccgatggatggtgatgtgtgtacatatgacaaatgtaactttggatgctgaatttgtttttgctagttaggaggattggtgatagtgtacgaagtggtttactcttttgctgtccacaggttgctggcagtgtttgtagtgttttgtcttagggggaattcctgtactccactgtaattgtaatgtaccctataacttatttgtcatcgcaaatatcctaatgcaatttcttatccttccataccattgctagtggtatagaagggaccaggacatgcagttttcttatatttttttatgccgtcgccggtggcatggaaaggtaagaaattgcatccatccgagtgtcattacgagagattaggacatttgcgattggaaataaagtattagacaaaatttggc

SEQ ID NO: 39167 - DNA, 2716 bp, Zea Mays
ccccgcgcacggcctctctcctttctcgagagagcgaagtaaacgggacagcggctgcagccacccagtcttgcaaggcgccaaggacggacggaggcgacgactcgcaaggtagctctgctcgggcgaggcagcagcagcacgcagcagtactccgttcagaatcaggagagaagacgttgttctccgggcactcgagtcgaagtcctgacgagatggacggcaatgcgaggtcggcggcaacgaatcagaagaagcccgtcgtcgcggacgacgacctcgtggagctgctgtggcacaacgggagcgtcgtcgcgcagccccaggcgcaccagaggccggcgcccacctacgaccccgaccgcccgggcaccagcggcctcaccggcgaagagaccgccgcgtggttcccggacaccctcgacgacgcgctggagaaggacctgtacacgcagctctggtacagcaccatcgccgacgccgccccgcagcacgagggcacgctcccgggccctacctcgcagccttcgccttcgccgcccgttgggagcagcggcgtcgagtcgagctgggctggcgacatctgctcgaccttctgcggaagcaaccaggtgctcaggacgccggcaaggatcagggggaaggacgcggcattgcagtcggagttgccgagcaataccggcgcgcacgacggcacatcgtcatccggcgggtctggaagcaactatgggggattcgggctgcccagtgacagcgtccatgtacagaagaggaaggggaggtgtagagacgactcagatagtccgagtgaggatgccgagtgtgaggaggcaagtgaggaaacgaaaccatcaaggcgatatgggacgaaacgccggactcgtgcagctgaagttcacaatctttcagagaggagaagaagggaccggatcaatgaaaagatgcgcgcattgcaagagctcatcccgcattgcaacaagactgacaaagcgtcgatattagacgagacgattgagtatctgaagtccctccaaatgcaagttcagatcatgtggatgacttctgggatggcgccaatgatgtttcctggtgttcaccaattcattccacagatggctctaggaatgaatccaggttgcatccctgcagcacagggcctaagtcagatgccaagattaccatacatgaaccacaccctgccaaaccatatccatctgaactcgtctccagctatgaatctaatgaatccactgaacgccgcgaaccaggtgcaaatcggtcacctcagggatgcaagtagccacttgcttcacctagatggcgggcgagcagcagtggtacctcaggtaccaggaccaggaccccatgttcatggacatcaaatagcacaagccgaagaacacaataagatactggaagtggcagctagtactgttataccaacttctaaggcagggcaaccaccaactttacatagagtttagagtgaccaaaatcatgccttgagctgtatatctgtacagaagtgtcagaagcatattctttgacatgtaagcttagttctagagttattatcaggagtcttgtataggttacaagataacagcctgtctaccgccgtattctatctacggaagaactcagctgcatactgctgtgcagactgcagtacagcgttcaagagagaattgaatgggatcaagaaagggtctttctttttctgggaaccgctgaaaatactgacgtgatgaggagcggatggcatctctgtagctgcgctgcgctgcagtgtatctacatcaatatggcaatgcttgtctggacacgaatgctacatctacatgtaaatgcagagttgcaggagatgagctcgccagacagtccatcacactgccggcttgattgcatcttcacaggacgtggacttgtgggcacatgctccacgggcaacggttcggcatcctcctggcgttcttgtggctggcagcagccgcgagaatctgtgtggagccctgggctgggctcgttgcaagatatgccagcctctcatcttcagactggaggaggaggggggggttccctctccaggctttttccatgatgttacaggcttacagcattcagagtgcatgttacactcacggccctatcagcacatgctgtgggcagccggtgatgataggatcagatgctcatatctcctgcggttttctgtctaccgcatttggattggatttggaccccccctgtactgtacttcctccttgctcccctgctgcttggcgctttgtccatgtgcctggttggaattgctactatacatttttggagggtaattgtttcaccggaacatgtagcgtggacgtgtggtaataacaattgaattgatgcctttactgtctgagtaataacaaagggaagcgatgagcagcacatggtaagcttccggtgccggttggaggcttcgatgtcgatgtctgcattgagtttatttgatgctgtgtgttctatagctagactaggctagagtttggatagagttcatgggacaatgttgtctgcatcttcatctcccctttagtttaggacttatctgagaggtacggttctttgcatgacagaacaaaactagcagcagcaaaaaaaaaaaaaaaaggaaacaacgacaaaatataaaaaattggcttcgcccgggttcgaaccggagaccttcagt

SEQ ID NO: 39168 - DNA, 361 bp, Zea Mays
caggaccggccctgaatccagggtcgtcgctgcgcccggacctcaccttggggctacttaaggttgtgatccgcagagccctcccctcctttatccagctcaacgaacctccatgcccagcagagagagagagatgatggagtgagcgccgccgtgcgggatcggtcgccaccgtcgtacccattctccgcgggtgtagcagagtgaagctcgaggatagccggagaacgttgtggtgctcccgtgagtgaagtagatgcttccccggtgcggattggcgctcgagaccgacgggaatccctcaccgtcgctgcggatccgcagaacagcgcggcctgatcccctcggcacaggatttggg

SEQ ID NO: 39169 - DNA, 1581 bp, Zea Mays
cccctcccctccgccctccgcacgccgcctccgaaccccatcgcccatcctcactacggcgacggctattgccacagccgccgccatcttgacgcgtacgagattctgaggccttgatctgaaacccgcctcgatcccacagccattcacccaccgttccaccggtcacggtagcggcgatccctactctcaggccgtagctacgacctagccggcgccatgcgacacggaggcggaggcaggggaggtggaggtaaaagaggtcgaggaagaggagcgggctccggacgcagagacgcgcgccccggcaacgattcgtaccgcggcgaccgtgtgtagcgaggaaatttctggaccttgatgcattgctatcacatgcttatgatacatgcaaggccggtttgaagacaaaacacttggggtttcacaaagcactgtgtgttctgatggggtggaattggcatgttgctccagacacatctaaatcacatcactccattccatctgaggaagtaaatgccatgaggggagacctcatgctgtggcctccagttgttgtgatacataacagctcgactggtcatgaggcaaaggatactgatgcaaagattgtgtccatagaagaaatcgaaggtgtattggcagatattggggtagcgcatgagaaggctagggttagccatggaagatcagccaatcagagcgtgttcctggtgaagttccagccaacaatatctgggttccaagaagccatgagagtgcatacccatttctccaccagaaaccatggcaaggaagagttccagctgatgaaaggcagcaaaggtaagaaggctgcctccactgatagcctggaagagctgctgtatgcgcatattggggtcgtggaagacctggggctgctggatgagggaacaaagaagagatgcaaggtcatgaggaagaaggaaattgaggcaaatgcagaggcaacactgaatttagaagtttattaggtctagtactaggatccgaaccatttgaagtggtcctcttttgcttcatcttgcagctgcttgcttgtccttgcggctgtaacgtcaaaagaagaaaagaagtgtaaattctgcttttgccattaaagagtgacgaaactcagttggcttctgtctgctggggaaggcctgcctcggtttgcatggcatggcaaggacataattttgtggctagatggggacaccttaacggcaaaagcagaattacctggtcgaagaaccgagtttaatctttatattatggaatcccttctttttttaagtcttttgctgcgtgaagttatgcataattcgttgaagtgtctataggtttgatggtggactagcatgtatgtatagtagcagctgcagtgagtgacttttctcaggtgttgcatgcatgagaaacgcaaactctattcggcgatggtttgcgctccagcttctcagttgctttgctctccatctccgacaggctgagtctgctcatcagcttgagtctgcttcaaatgaggacttaatataagcgagcaaacatcgctagactagtaaataattctggacaatt

SEQ ID NO: 39170 - DNA, 382 bp, Zea Mays
cgccgccgcacctccgaggcatctgtgcacgtcgacatgccttgccctccgccgcgccttgctcatcgccagtaaaccacgcctccgccctcctccatctgctcacggcgtcgtctgccctccgccctctgaccacgccgccatgccactgccgtccgccctctgccccacgtcgcttggctctgtcctttgccgcacctccgccaccgtgcctccaccgtctgtccacattgtcgctcctccacgctgtgccctccgccgcactctgtcctccgctggtgagtcccaacgtcgtgcctccgcgagccctaactggctaactaggacatttgctcgtaattttacaaacattagtgaatgtatatttttatagtctataagt

SEQ ID NO: 39171 - DNA, 2768 bp, Zea Mays
cggcgctgttgctgagagctgctggtggatacaattcttgacaaagaaaattttacattggaagaacttcttgacgaggatgaaattattcaggagtgcaaagcacttaactcacgactcataaacttcttacgtgacaaggctcaggtggaacagttgcttcgttatgttgtggaagaagttccagatgatgctgaaaggaagcgatctttcaagttcccatttattgcttctgaaatatttacttgcgaaatcgatgtcattttgaggaccctagtagaggatgaagagctaatggatttgcttttctcatttgtgaaacctgatcatccgcatagtacattattgtctggttacttcagtaaggtggtaatatgtttggtgctgcggaagactgctccacttatgagttatgttcaggggcatccagagatagttgtccagcttgttgacctgattggcatcacatcgataatggaggtgctgatacgactgattggtgctgatgagaccatatattcaaactatggtgatacgttgcagtggttagaaaatacaaatgtacttgaaatgattgcagataagtttaactcgtcggattctcctgaagtgcatgccaatgctgcggaaattctatgtgcagttactcggtgtgcgcctccatctcttgctgcaaagatatgcagtccaagttttgttcggaggttgttccatcacgctcttgaagaatcaagacccaaatctgttctgcttcattcactgtcagtgtgcatatctttgctggatccaaaaagactagcatcagcttcgtatcaagcattcaaaagcaacttaagtcatggggcattggtcatggccagtccagagacagttgatggtatgcttgagagtctaggcaacttgctgaatttattggacacatcggctgctgaaagtgtgttgccaacaacttatggatgtttgcgcccacctcttggaaaacatcgtctgaagattgttgaattcatctctgtgctgcttacaattggaagtgaaactgcagaaaaggagctagtaagacagtcagcaataaagcgatcgattgatttgttctttgaggtaaaagacctgaagttgttgagcatgttcttcatgaatgtgatattgttggtaaaattcttgtttcagaaaggctttcatctttgtcgactgagtctaatgggcctactgttcccactgaaggaaaaacacatccaagagttggaaatgatggccacatgagaaaaaaagccaataagcttattcagttgggcaacagtaacaacacaatccaggctcacttacaggaaaataatgagtgggttgaatggcaaacaaatgtgctggtcaaacgtaatgaagtagagaatgtttatcattgggcttgtgggcgcccggcgtcattacatgaccgtggtagggacagtgatgatgatgacttccgggacagggactacgacgtggcagctcttgctaataacttaagtcaggcatttcgttatgggatatacagcagcgatgacatcgaagaggcacaaggatcacttgaaagagatgatgaggatgtgtattttgatgatgaatcagctgaggtggtaatatcttctttgcgtctgggagatgaccaggaaggctccctctttacaaattcaaactggttcacatttgatggagagagaggcattgatgaccgatcatctgcctctgttccttcatcatcccccaattctgaggagacatcactaaagactgaggaagctgatgatggtaaagtcattggcactgaggatgaaatggaaacagtgtatcttggaaatggtagtgttgaggaggtaaaagatgtagcagaatgtactgaacagccaaattgttgtactgaggaagagcgattgaaaaatgaagaagggatggaatggcatccaaatgcttcaaataacgataccgaggctgaggctgccgcagagtcttcagccccatcagttgagatagtggcagagaaaacagtagatgaaccattagaggtgggaagaaaattggatgaaccggcagaatcatctttggacagttctgtctctgtagctttgccagctcctgttaacggtagtgagcctgccaactcggaagtatcttctgaacaagtagcccatgccactgatgtgcagcaaccagtgaaggaagctcctgccgaggatgatgatgcaaagaaaactgatgcagccaaaacaaacgagtgaagtagcaacatgctgggctgagctgatcagagcgattgcttgtgaactgaaaactctgtagagtgcagcttgggcatccatcttgcttcatgtgtgctcagctgccacaagatagtctgaagcaaactgctgtacaataagcaagtaattgctctaccatcaaccgtggcatgccactgtacaaatgagcaccactgactaacgcacgtcagtcgccttgtctgaaactggtcattttctttgaagttcaccctccagtccatgtgctttggtggcagtcttcatggcatggtatatgatacctgaaagaacattctttgggtggcaactggttttggctacttagtcttctgttgctttaggttaactttggaactgtaatatgagatgtgattttatttctagtctagctattgtatttttttttcggactctacatgtgtcagttcgatttgaacatgttatttttttcataaagatttgaagacatcttgatcgacggctcctcgtctaccc

SEQ ID NO: 39172 - DNA, 1709 bp, Zea Mays
ggaatatgctcttctcgctccttccgcttctcgagacttccatggttggcccgtgcagtgcatgcctctcctcgctccctccgcctcgtctctctctgagtcccttcgtctctctgccagctgcttcaccttctgccgctttgatcgtccacttcacttcagcacagtcacgtcgtttattgtcgccttcatcgtctgctccagtgtttggtgatatccatcgctttcttcgtcagctccacttcctcgtcgagttgctgcttgtttcattggggtttctaagttcctcttgcttccttatatatttacacattttaatcttccctgcacttcaatgtgagatgtggaaaggcttgccacagctagatttgtgcatttttatctagtcagctttatttggaaaatacacgccaaaaatgaccactcttttttgggggtcaattcaacattccgcttccctcccactgtttctctctgctcttgaatctacgatgtgtagactttgttattttagtgttttgcaatttcattttcccttgaaaatatagggaacctcattgcattctttttggatcgatggattccgtggcccataaatccctgctcttcaatttacaccctccgtcttcatctgcaacctgcttcgtctaccgttgtttttgtcaggctatgaaaaagtgtcttcggcgtaaaaggtcaatcgccccgcctccagcaaaatgacttcatttttccccgacttttgttacgcacgtggagtgatacctctgcacctcagtggctttatcggcgaggcttggttgctgaggtaattagcattagttttgatctactttccttcgtgctggttgttcactaatagattaatgtttgatgtcctgttcggcctaggatacttaccagtgtgtctatgtgttccaccaatatactgcattatgcacgcttgctagtttaaagtgtgatttcgtgtacagaacacagtacagagcttcttatttaaaaatatttgtaactttaacaaatcaactcttagatatacaacctaatgaaatatattcaataggctcgatgtgttctagcatattccgatgtgccatgcagtgcagaggtaaattcagtgtacttacatgcttaacttctatatatactaatgaagatagatatctgtatactgttaatgtctctacaacaaatgataaaaacatgttttccaagttaaacacctacaaattcttcggcacaaaagtgctctcccactttggactaccatagtaagatagcaatgtttatcttatcgttcacaagtcatctacaaagacatggatcagctgaccaagctcgagctaccatcgcctccaaaaaaatgaagcatacccaacttaacaaagagctaccatattctatgggttcaaaaaatgaagacgactagcccaccacgaagcactcgaaggtattggttttttgcaagcattagaagagctccatcactttttaatataaaagccttttgtgtacatatgaaccaactgttggagcatttctaaaactgtattgacttatgcaacctctagaaacacactgttactgcatattggagtacactgcttaaatgctacttgatatatattgtaatttcatttgatattacaaatgcggttagcaaccaaattcagctataaatttcgtaagcatgtggcgccttatccgac

SEQ ID NO: 39173 - DNA, 3396 bp, Zea Mays
tttcaccccttgttttcgacatgccattgctcctccctcaaacgccacggcttttttcacgaaccaactgtgacaatccagtcaattctgatctctaggccctcgcttccccttcctgtggatgccatcggggcgctcaccgggacaacatactcctcgacagcgacgccgccgcgcttccttgaggaaagctcgtagctgcccccgcgcaaagctccggtctttcttggccctgacccctcctccccgccgccggcgccgcgtgagcacgccgcgcttggcttgatgctcgacttctgcgcgccccacgggcccgccaagctcccggttgcgtctgtcgctggggtgcgagtcgccggcaggtggttgtggcgatcggcggcggttggggcggtgcgccatggcgtctccgcgcgggcctcatccttcggttcccggatcgggctcgattctcagaattttcacacaagggacctctcccagttgttgtggatcggtccggtgccaggtgacatcgcagagattgaggcctactgccgcatattccgtgctgccgagcagctccatactgcagtcatgtcagcactctgtgatccagagacaggagagtgccctgtacgctatgatgttgaatcagaggatctgccggtgctggaagacaaggttgctgccgtccttggctgcatgctggcgttgctgaaccggggaaggaatgaggtgctctcagggagatcaggtgttgcaagtgccttccagggatctgaggacagcactgctgataggatcccaccgctcgccttgttccgtggagacatgaagcgttgctgtgagagtatgcaggtggcgcttgcaagctaccttgtgccaagtgaacctagggggttggacatatggaggaagctgcagagattaaagaacacttgttatgatgcaggtttcccgagggctgatggttatccatgtccgacattgtttgcaaattggtttccagtgtacctttcgattgtgtcagatgattcaggaatggatgagctagaggttgcattttggaggggaggacaagtcagtgaggagggactggcatggctacttggaaagggattcaaaactattgttgatctccgggaagaagatgttaaagatgatttgtacctttcagcagttcaggaagctgtctcatctgggaagatagaggtggtgaatatgccagttgagattggaactgcaccatcagctgaacaggttcagcaatttgcagctcttgtgtcagatggcgcaaagaagcccatttatctctacagcaaagaaggtgtttctaggacgtctgcaatggtctcaagatggaaacagtatgttactcgttcagagagattggctgtccaaaatcactctctaaatgggaatggtaacatcctgacaaatcacaagaccatgcagcacactggcataccaagttcctctccgaatggagctgaaaatggtatgataacagaatctgataggaccatgaacaatggggaatcaagtgagatagacatagatacagctcgtcataatctggaggtcactaatgccctttgtaatgatcaaagcactcaacaaggtgaaatgcctgacaccgtggcagaactcttgtcaaactttaaactggagagtaacccccttaaagcacaatttcctacttgcgatgttttctctagaaaagagatgaccaagttttttagaagcaaaacagtttatccaaaatctgttctgaactctaggagacgatcaagtagcttggttataaggagaaaacaaaatctctgcacggagcgtagtggaaccaatgactatgaagcagcagagtttgcagttctcagaagttcaaatggaaaatcatttgacagtgattatattctatcagttgcttcaggtatcactgatggaaaaccttcaaacaatgaagcctcattaattgaggaaaaggaaagggaagtttcagttgccactattgacactagagcatctgccaacagttctaatagaaaggttcaggttggatcacaagaatctgctgaaaagaatagtaccccttatcttgagagaaacaaatcagataatgttgatagaaatatgtgtgcatctgcaactggtgttgttagactccagtcaagaagaaaagcagagatgtttctagtacgtactgatggattttcttgtactagagaaaaagtaacagaatcatctctggcttttacgcatcctagtacccagcaacagatgcttatgtggaaatcacctccaaagactgtcttacttttgaagaaattaggagatgagctcatggaagaagctaaagaggttgcttcatttctgcatcatcaagaaaagatgaatgttcttgtggaacctgatgttcatgatacatttgctagaattccaggttatggttttgtgcaaaccttctatactcaagataccagtgaccttcatgagcgaattgattttgttacatgcttgggtggtgatggactcattttgcatgcatcaaacttatttagaacttctgtaccacctgttgtctccttcaatctcggatctcttgggttcttaacttcacataatttcgaaggtttcagacaagatttgagagatttaatccatgggaacaacacacttggaatttatataactcttagaatgcgtctaagatgtgagatctttcgcaaaggaaaatcaatgcctggtaaagtgtttgatgtgctgaatgaagttgttgttgatcgaggttccaatccatacctatcaaaaattgagtgttatgagcataaccaccttatcactaaggtgcaagctgacggggtgatagttgcaacaccaactggcagcacagcatattctactgcagcagggggatcaatggttcatccaaacgtcccatgcatgctgtttactccaatctgccctcactcactgtcatttagacctgtcatccttccggattctgcccggcttgaattaaagataccagatgaggcaagaagcaatgcatgggtttcgtttgatggcaaaaggaggcagcaactgtcaagaggagattctgttcgtatatccatgagtcagcacccactcccaactgttaataaatctgaccaaacgggtgattggttccgcagcctgatcaggtgtctcaactggaacgagagattggaccagaaggcattataggcactagaaaattttttattgtttctgtacatatgtaaatttatacacatatagttttgtttttctgccaacatgtacaacgtgtaacatcaaagaatcttgcacgtaaggagctccgtagcttactttatccatgtattcacgtgcttcacaaatcaacttatatattatatgcccgtacgttgc

SEQ ID NO: 39174 - DNA, 966 bp, Zea Mays
cttgattcgtatagcacctcacatccaaatatgcaacacatagataaggagaaggtgggaggcacaagaacgaggagatcaagttgcctctgtgcttgatgttggagaagttggtccccgagcagcatgtcgttgccaggtcgttagaagtgttggcccatggtcagcaggaacagctcaaatcgaaggaagcatccataatgcctatttttctcttattgaaaaggcagaacattttgtttacatcgagaatcagtttttcatttcaggtctttcaggggatgacacaattaagaatcgtgtattagaagcactatataggcgcatacttagagcagaaaaagagaaaaggcgcttccgggttattattgtcataccacttttacctggttttcagggtggcattgatgatggtggagctgcgtctgtgagggcaattatgcattggcaataccgaactatttgtagaggacctaattcaattcttaaaaatctgtatgatgtggttggctcgaaggcggatgattatatctcattttatgggcttagagcacatggaagatcagatgatgggggtcctctggtcaccaatcagatatatgtgcacagtaaattgatgattattgatgatcgcatggcattgattggctcagccaacataaatgatagaagcttgcttggatctagggattctgagattggtataattattgaagataaagaggttgtcagttctataatggatggaagaccttgggaagctggaaagttctccctcagcctacgactttctctatgggcagaacaccttggtcttcttccaggagaggttagttgcattatggatcctgtggatgattcagcgtacaaaaacatctggatggccactgctaaggaaccatttgagtgactatctgtcactgcacctgtctatcgatgccgtaatttcattatctaatgattttt

SEQ ID NO: 39175 - DNA, 1489 bp, Zea Mays
tcagcttgattcgtcttctgctcttatgatcggtaagggatcgtatggcacagtttacagggcgaagcttcgtcatacagtagcagctgtcaaagtactgaactcccctgaaggctgtggaactcagcaactacagcaggagctcgaggtcctcggcaaaatccggcaccctcacctgctgatgatgctgggagcatgccctgaacacggctgcctggtctacgagtacatggaaaacggcagcctagacgacatgctgcaacgaaggaagcagaactcgtcgccgctggcctggttcgaccggttcagggtggcctgggaggtggcggcggctctgatgttcctccacagctcaaagccagagcccatcatccaccgcgacctgaagcccgcgaacatactgctggacgggaacctggtgagcaagataggcgacgtaggcctgtcgaccctgctcccagtcccaggcacgggcggcggcggtcaggacgtgccgtcgacgatggtcaaggacaccgcccccgtcggcacgttctgctacatcgacccggagtaccagaggaccggtgtcctgtccatgaagtccgacgtctacgcgctgggcatcgtgctcctgcagctgctgacggcgaggccgccggtggggctcgcgcacgccgtggagaccgcgctggaggagggccgattcgctgacgtcctggacgcggccgccgggcagtggcctctgggcgaggcgcaggagctggccgttctcgcgctgcggtgctccgagatgcggcgcaaggaccggcccgacttgaacggccgtgttctcccggcgctagagcggctcaaggatgtcgcggccaaggccagagaaggcgcctttcagggtcacgcggcggcacctccgagccatttcatctgccccatacttcagtgatggtcgatccatacgtcgcgtcagatggctacacctacgacggcaaggccattgagctgtggctgagcacgaacgagacgtccccgatgaccaacctgcgtttgcccaacaagagcctgataccgaatcactcccttcgttctgcgatcatggactggaggtcgagaagcaagtgacttgtgattcgttcagccctcgggattgcatgcttcttgatgccgcagcgatgaccgatttgtcttgcacaacgaagctgccagggttttttttttattttgttctaagaaatgtatgcgagtagtattcagatagggttttagaggttgtgcagcagctcaagcaaaaatgtaaaaaaaaaaacgtcatctgatagcattacctcgctgtctcagcgaagccattccttctcctctctctcgtatgcaaacaatgcatttgcataagcctgtagtcaatgtcaattgttatgatctagcatctgattccgagacgaaatgaactgtgcatattagaacagtgccctaaatatatgtagtatcttacattgtagggcatatttttcagaaa

SEQ ID NO: 39176 - DNA, 4049 bp, Zea Mays
tcatctaatcgccctcctcttcttcccctttttgcttcctctccacgagcgcgcgagcgcgacgacgtcagcaacaacgcagactaccccgcagtcgccgagggagcaattccgcccccaattggccgccggaacccttcttccttcccctcccacggagtcgctgccgcgctcagatagcccagccgagccggcgacgacgaggacaggaccctagccctaataatccggtcccccacatggcggggaccttccgcgagggcgcggggccgggggacgcccatgcgcccccgcccacgcctacgccgcccctctcgcagttcctcgcgctggatgcgctcccgtcctggggctccgaccccaagcagccgcactggcgccaccccgagctccgccgggcgctcgcctccgacgaccaagccgacgagctcaggcggatccgtgccagcgtccaggactccgcgggcaaggccaagtggaagggcgtggtagtgttcctacaaggcaaggccctttgattagtactgagaaaaattcacctctagagaaggaaaagagcagcgcaagaatatctgctacagtttctggcctttctgatgacaaattgcggggtctatctactggcagtgaagggtgggaaaaaaagatgaagcgtaagcgctctgttggaacaatgctcagcagaggcagtgatgtggatcgagatgtcaaatccgcgggccagcatagaccagccaatgaagtacgcccacggtctagtgatggccttgggtatagacatggagtttcggccggagcactagtaggtaacaagttggatggcacttctcagcagaataacattgtatcccgcattctgtccaagtcagatgccgattatgtggctcagccaaatgaaagaagagaacgtcatcctggagttgaaaaagaaaggaccacattaaaaggaaacaaggcaaattcttctgatgatatgcaaaacgtaagcttaaacccattgcccaaggctaaagcatgcagggcaccaagaactagttcacttgctatgaactcgtcttctaatttccaacgttcaactggaggaagtgatgagtgggaagaaacaccttacccaaataaagcctcgcctttgggaggcatgacaaatcgcaaacgttccacacattcaaatgcttcctcacctcctattgcctgggttgggcaacgcccacagaagatgtcaaggacaagaagagcaaatgttgtttctccagtgtcaaattttgatgaagcgttatctgaaggatcaccacttgacactgccactagatcggcacctatagagtctggcagtgtcttgctgacaaagaacacatcaacaaccaaaatggataacatctcatctcctgctgggttgtcagaaagtgagggatcggctgtgaatgaaagcaagtccaaggagaaagccatgcatagtggtgaagtcgggaacgagggtgcaaatgcagcccataatgcaatgggattgatattttcatcaaataaaaataggattcctttgaaagaggagcttgaagatggcagtattcgtcgtcaagggaggagtggaaggggagctatgcatgtcaaggggtgttctcccataccaaaagaaaaactggacactgcagaaacaagaaagccaacaaaaggtggaagacctggatctgaaaagaacgagagtaagttggggcggccaccaatgaaaaaagcctctgaccgtaaagcttcatcctggcattcacaagctctaaatagtgatattacagacataacaggtgaaccagaagatgaccaagaggagcttttagctgctgttaatgctgctcgcagcgctattgttagtgcctattctggtcctttttggaagaaaatggagcccatgctaacttttatgagctcagaaaatttatctttcttaaaaaaccagatcaaccttgttgaagagcttgaagtgagcatgtcctgcatgtctgacggtgaacatgatattatagcatcagttggtcacagaagaatgtcaaagatggaggagcattcatctcagggactggttccatctaatttttctccctcatctcagcaaagtaaaactaatggagtcggagaaaaaggattagtcggctgtttctctcatggtgacgaaagtcgtactggaccacaaaagctggaagctgataaatggtttaatgaaatggctccaatgacacacagactcctttcggctttaattatggaagatgacctacctgattccaatggggtgcaaagagatatacttgttgaatttccaaatagccacaatccttacactgtcaacagatacttagaaaatgaacttcaagctagtgccataacatctaattttgggctgagcgtggatttcgtgcactcaaacagtacttctgtggtacatcagagcatgtgcaatggttttacagcttcaagcaatttcattaattcaaacagtgaaaattcagttcatagtgagaatttatcagacggactaaattttacagtatacccagaaagtggccctttgcatgacttgataccactgactccacggcaatgtcaaaatccagggaaagatttccctttgtctccatatgagtatcaatatgggcagatgtctatggaagataagattttaattgagctgcaaagtattggcatttgtccagagacagtgccaaagctagatgacggagaagatgaggacattaataaaatgatttcagagctgaggaaaaggctgcatgatcaggtgaaccagaagaaatgcagattacataagctagataaatcaattcaagatacaaagaatattgaggagaggagcttggagcaacatgctatgaacaaattggttgaaagagcatacagaaaactcaagggtgggcggattggctctagtcacaaggctggtgtcagtaaatctgccaacaaagctgcaaaacagctagccttggcttttgccaaacgcactcttgttcgatgccacaaatttgatgaaacagggaaaagctgcttcagcgagccttctctttggagtatcctgtctgcacccttgccaagcagtgattcaaaatgcacagagggtgtagagaggctgaagcatcaaaagcttgacagaactccattcgaccaaggtggtgcaaaatggaaaaaggtcgacagggaacgggaccacaacagggatgcatccgcgaagggctccggattgaaatcgggacgtcattcatcaggtggtagcggcaggagcggcgagcgcaaaaacaagacaaagccaaagcaaaagcttgcacagctatcaacctcggggaacgtgctgggtagagtcgttgagccattttcgtctccaacagtgcaggagccccctgaacctgcaagcgagaaaaagacccagcatccaactaggggtgcttccagcagcgctgcccagcggcttaccgtggacgctggactgccagtgttgcctgggttagatgacatattggacgtcccggaagggcttgacgggcagggcaacgatatcagctcgtggtttacggatggccttgacgactcgttgcaagacattgatctttctggcgccctggaaatcccagacgatgacctcacccagctgggatttatgtaaggagaaggaagcaatcgttgtttgtcctgtgcatatacatgtctttccttcacctaatgtatggtagcgctgatccattgatctccctgccacaacctggtaggtcagaggttgtaatctgtaattaggctgttggattcgtgtcgatattcagtgtctgctggcatggactggatagttgcagatgaggcgaggtagcagcaacaagaacatgctgagatttgttaatgttatcctgtagtttgtgcttctgcttcctggattatcctgtcggaatccgacagtacgtgtctttgaaaagctcgtcctttgcatgcctaagatttgttgcggaaggagacaagtaacctacgtagtgtgttattataatttttacagcctgcagaat

SEQ ID NO: 39177 - DNA, 1515 bp, Zea Mays
caacaggaaaaagttggaggaaaagtaatacaccgccaagggggtgtcatatttctttttcgtggtagaaactacaattacaggacccgcccatgttttccgcttatgctctggaaacccgttgcacctgtgtacccgcgccttgtcacgaaggtcccaggtggcttaactccagatgaggccacagaaatgcgcacgagaggacatcagttaccaccaatttgtaaacttggaaaaaatggtgtttatgccaaccttgtgaaccaagtcagagaagcatttgaagcatgtgatcttgtccgtgttgattgctcaggtcttaacaaaagtgattgcagaaaaattggagctaaactaaaggaaatgttctggcccagattgagttggtcagtgctgcaacatctcacaagaactggaacttggatgaaggtcaagaaaaatttaaagattccactgacagtgatatggtactgaattctgcaaaggatgttcctgcattgttccattctactggtatatctagaactgaaccctcagcagacattccattggaatattccccattaaatccagtatgtgatattatggatccatccctgaactgccgaagtatcccaacaaacaactgtgaaagtagagctctggtagagaagtcagaacattgtccggatgattataatttggaaatgaagaggaaaagaaacgatggtacaaaaggtacagttgttctaaatagcggttctaaagtagagggattgttatgtcttttggaacaggccattcacagtggcagggcacttgttctgagtgaagatgagcttgctgattcagatctggtctatgaaaagtctgttgcttttacaaagtcaattccgcgaagactggtttttgagaatactcgaaggaagtccagtgccaggagaaatgtgccagacaatcatgcaagaactaaaacacatcttgtagaaaataaaatgttgagcagtcctgttgaaaataaatttatcgttaatggaggatctgcaatgcagacaattgaccatggacaagagtttctttctgatgttgttcatcaaggtaccttaagagtagatgaactagcaaagttactagcttgagaggtgattgctcttttattaaccacacagaccagtatcaacatcctttgaacacatatgcaagatttgcatgaactctgaatttggttaaaacaggtctcaggtctgttgcgtcgtggcgagtcctttttaaccttgaaatactgaactatggtgctgtttggttcaaaaaatgtaacgcaaatggtaatggtaatggtttcggctcgattactggcggtaacaaatttgaataggctggtatcaaattttagtgtggtatctgattacggttggactaaaacaaacatgatttaacgttatccgttacccattacgttacaaatatatgaaccaaacggcacctataatcctgtgcgatgtacaaacaaccttcagaatacatattctctgattt

SEQ ID NO: 39178 - DNA, 1017 bp, Zea Mays
tcctccagctgccttgcgaaccccaacacttgtgtcacaactcggttcctgctccagctccacacctccttatcgcaacgcgagcagcagttgcattggaggcgaggaggagccacgccggggctcaaggaatggccgctctccgccacctcgccgccggccccacctgccaccaccaccaccaccacggcgtcgcggcagccaccgcctccctccggctccatcgcctccccctccccttccgcccccttcgctcccgctccggctccttcaccagggtttatgcgatctccagcaatgacatcagggtcggcaccaacgtcgaggtcgacggcgcgccatggaaagttctagagttcctccacgtcaagcctggaaaaggcgctgctttcgtcaggacaaaactgcgtaactatgtaactggcaacacggtcgagaaaaccttccgtgctggaagtacgctacaggaaccatccctttcaaaggagaccaagcaatttacatacaaggatggctcccagttcgtgttcatggatctgacaacatttgaagaaagtcggttaaatgaagcagatgtcggtgacaaacaaaaatggctgaaagaggggatggactgcaatttgttgtactggaatgggaaggaggaacaaagcctgcaaccctggaaactggagctgttgtcactgtgccctcttttgtgaacgtaggcgatgatattctggtggattcaagaactgggcagtatatgaatcgagcataacgaattgaagaggatttcggatttgaggagagtactgcttttttgtttgaccattttagtcccattcacttgtacaaacgccctgggtctttggccccaggaaatttacatttctgctgcatgtgaatcctcactctgattataaccatgtacatctttggtttccagatataaggaaaattgtgttcagatttttaaagctgaaatctcaaactctgattataaacatgttactactgaccacaaaacatgagcaa

SEQ ID NO: 39179 - DNA, 563 bp, Zea Mays
actagagtctagactagagccgcccgcccgcccgcccgcccgtgtgccgtttaccggagcacaacacaacgcggccccctcacggcgtggagtggattgggccgacgccgatcgagagcagaggagaggagcgcggtcggatagggtttgtctgggtgaggttttgagcgagagcgcagggcgagggaaggaggaggaggaggactggctcctggaggaggaggccggccggggcttggatggtcgcggagcgctcccgtaggtggtgtccatgggaaggtcgttcagggactcgctcaaggtgctcgaggccgacatccagcacgccaactccattgcttctgaatttaggagggaatatgatggcgcctcccttcagatgaggatggcatattgccctgctgcccactttttcctttttcttgtgcagtggacagactgcaaccttgctggtgcacttgggctgttgaggattctaatttataaggtttacgctgatgggacaaccaccatgtgtactcatgaaagaaaagcaagcattagggaattttatgttgtttttg

SEQ ID NO: 39180 - DNA, 2422 bp, Zea Mays
cccactaatcagatccccgcaggctggttcactgagccggcttccgagcggcccatgggcttgcccaggaccggctcttccagtcgcctcaacgcgcaggcgccggagttcgtgccgcggggcccgccaccaccgacgccgccccggccgtttgagtactatgcgcctatggtgaacgcagcggatttgctgccaaggagcaacaggcgcgggagccggaagcggagatgctcccgcccgccgcggtgaagacggagctggtgtatctgggcaatttggtcggttggcacggggtatgcatcaataggcaccgtcatcgcagtaggacgcgtgcgtgatcaagcctggatgggacggttttgacacagcacgtcctgtgtgcgaggatctcgaactgggtcagttcgtggtgatgttcttctaggattctttcgtcatttcttttactgcatcgttgaaactgatccagggtagtgcggcggtgttgggggttgcggcgggcctcgccctcatcgtcggcttcgtccgctgcgatacctgtgaagttaacaatctacgctattatcgatagcaatccagcgctgaagtcaagaagttacctgggcaaaaacagtatacccgattctaggtgagaagctcaaagaaggggaagacatctacatctatcaggggtgacaaatccttttgctatgaagatgaccacagggttcttgtttgcgagttcatcctctagaatgtattgggttgtcgccacgaaaaaacacacgaatacataaattcaaataatttctggtgctgtggagtattcataattgtgtgcttttgttgaatccttcatgtaccataattcttactgctttcaagcccttttagaatatgactttaggatgtagaaattggtgaaaggagacaagaaattattctctaaactactattttttataggcaagggaggctggaagcaccttttttgcatgggagctgcatggagagaaattattggcagaaaacaaacttagaccagattcttgaatgtgccaagggaataagcttcgcttgctgcaattcatgtgctgcttggcgccacaaaaggagtagagatttgcttgctttgcagggagcggggtcatagtctgaagaactgtcctgacaaaagcgagggaaatttgaagaaattttgctagaactgtggtgaatctggacactgtctttccaagtgccccaagctcattgagaatgggttacaaattttgcaagctgctttatctgcaatcagcaaggacatttgagcaagaactgccctgaaaacaaacatgacatcccatccaaagctccatcttggcgccaacagtggttcacataggtttgctcttgagaattaagttgttaatgaagctactttccgttgccctgatgagctaggatggaaaccacagaggacacctatcatatcatcagatggaagcatcttacacgcaagacagcaagctttctggtatggagctgaatggtactctggattatcaattgttaagtctacaggctctgaaaacaatggacttaagcaacaaccacttgcatgattcaatcccttaccagttgccatcaaaccttacctatctgaatctggcaaaaaataacttctctggtaatcttccatactctatatccaacttggtttcacttgagtacctcaatctcagccacaactcgttatttcagaaaattggtgaattttctttcagaattgtatattgtgtaaggcctactgtatatttcagaaaattggaagcctcaattcactttcagaactagacgtatctttcaacaacctcacgggaatcttcctttctcaatgggcgctctgtcgaagctttctaccctaggcaaccctttccagtagggtcgcgcccctctggtaagagggtcgctgttaagttgcctgattaatccattctttcactgtgtctgcatgttgcagtagatgccagcagatcatgaagcgcccaaatgagctacagtactatcagaagctgaatagattgctgctggaattagagcaaaggagtggaggagtttctgaagagagcagacctgcaaaataaccgtcgtcatgtcagtgacatggccgctcaacttcttcctcttactgcattgtatctgaactgcgtcgacctaccaactacatcactgcaccgactgctatactgcatcaaccaaccgaacggctatatgaaacgacacaatgtcagccgtcagatatgaatattaacttcataaaagtaattgtaacttgtgtaggctggttatagcttgtgatttcacatttcatttgttagcggccaagatttatttctgttagtttatgaccaccactcaggaaagttgattgattctccattccaatctttgttagacctgc

SEQ ID NO: 39181 - DNA, 1859 bp, Zea Mays
aagaaaacagctccctccttatttttaggaagagctatagaaagagcaccatgtttggttggaaatatagctcctactgtagtttctcctacgatgtagcaccgacgaagagaaaaatatgggagaggagccggtagaagctccttttttttggctcccggttcctgctggttttttagaggagcttatccctcttttcaaggaagagctcatcaaagagcctccgttttggtagatttttttaagaagccgttgaaggagcctttgaagaagccctaccaaaggaggcatcaatactgtccgatccacatgggatgaaataaactggtgcattgacgacatcgttgtggtaaaggtcgtagtgccagagtaatcattaccacaaggcgtagagggggatgtcataagccctatatagttaaatcgatttttgacataatcaaaaagatatattcagtagaatcgtaaccatagaatacaactttaatcgaaatgcatgcatttgtctcatacactatggagatgataagaagatatatatgttacatctccgatgggctataattggagatgctttttatttctggtacaaaagtttctatattaatgggaaaactgttgagcaacgggacgacaacaagtgattgagttcagcagttgtttgtagaaaatgattgactcttatgtgtccagctaccagcttccggcacatgagccgctgtcctctgagtgggccgcttccatttgggctgcttgaatcgtcggctaaggaggttgggccgtgacatcccatcgctgagtccgtcaagcccacgcatcatcactcacgcgcggggccgtccgaccgggcctctcctccctcgttttacccgcactcgccgcaacgccgagaagacgcgagaggaagggaggaggtgagccaccggaagcggagacgtgagcactcgaccaaccccgtcgatccggctgcggcgcggcgtgctagatcgctaccgaccatggtggtggaggagatcgccgagggggtgaagaacctaaccgtcaccggagatgcggcggcttcaggcggagaggggcagaggaggggcggcggcggcagcagcaaccgcatccaggtgtccaacaccaaaaaacccctcttcttctacgtcaacctcgccaagaggtatatgcaacagcacggcgatgtagagctatccgctcttgggatggccatagcaacagttgtgaccgtggcagaaattctgaagaacaatggatttgctgttgaaaagagtgagacttcagggctttgttgtcttgtagattatgcctaatctatattattatatttgccgctctgaatcatccctttgtgtcttaaacctacatagaaattaggacctctactgttgaaataaacgacgaatcaagagggcgtccattccaaaaggccaagagaggggcgaagtggaagatggtgaagagcaggcttgaaaacagtaccgatgacaagctgctgctgctgtgctctgttagtgttgtttaatttagtttaataccgtgtgcatgagatatggcacgcgttcttgctcaactacatcaccatggcaatgtctgcaaatccatggattgatggatggatgttggttgtttcttaacattctggacatgttgttcatttgtttctttggctatgtatgttttagcagtccagcgttccccttacaaaatatggcgtgctttgttgactacacagaccgctgttcctttcctgaattattgtctgcaaagattagagataatcaatgggtaactaatacccaatggataaaaactctattagggctagtttggaaccttatttttctaagggctag

SEQ ID NO: 39182 - DNA, 2408 bp, Zea Mays
catgaatcgtcctccctcccgtctcccgaaacctcgtccgccggttcccgtcgccatggtggtggtagtgtccacctccctatgctccttcctgcccgcgcacccgttcagcctcgcgcgccctcgccgtccccacccaacgaacccgaccgccaaacccctctcccgtaccctctccatccgctgcatcgccacaaccgcggcgggacccccgccgctcccaccgccgaagctggtccgctgcccagctctcgaccgccaggcggcgcgcgcaagccgactccgctttgcgcgcaagctcctcaccctcctcctctccaagccgcgccatttcctcccgctccgcgtgctcaaccgctgccgccgcttcctcggcctcccgcgccgcggccgcccgctcatccccatggtcctccgctacccgaccctcttccgcctcttccaggcccacacctccctcccgctctccccgtccctctccaccctcgcggtcgcgctcactcccgccgccgaggcgctcgccgccgatcttgcggcgctccgcgccaccggcacaggcgcaggcgcgctcgccgccaagatccaccgccttctcctcatgaccccgcgccgaaacattccggtgtccccgttcgagccactggatgagggcgctagtctggagatgttggagcggcgggcgtgtgctgtggtgcgggaggtgctggccatgacggtggagaagcggacgctggtggatcacctcacgcacttcaggaaagaccttggcttgccaaaccggctgcgcgccatgctggtgcgacatccagagctgttttatgtcagtgtgaagggggtgcgtcactcagtgttccttgtggaggcgtttgatgatgatgggaggctcctagtggaggatgagatgctggttgggagggataggctggaggagcttgttcgggagggaaagcggatgaggcgtgctcggaagaaaggtgttctcacgttcgatggtgacagtgatgaggatgaagatgatgatgcagcagaagaggaaggttcattaaaggtggatgatgaatttggggacttgtttgaggatggtgtcattggggaggactgggaggaggtaggcgatggaggtggaagtgatgcatatgaagagtacgatgctgaatcaggtgacatggaggagttttgggtcaagaaggctgtggctcaaggactggttggcaatggtaatgagcaggatgtttggtgagtgcatcagcttgtgggactgctcaggaagttaacgaagattgagaattcctcaagtgtgcttttctcagcaatgcacataaaccagtaagcatcagtacatatccgggtatcttggacctcttggtcccatttgccgcctgtctgttggtacttgcaaggaggcatgctctcttacttcccaagatctcttgcacggaaacacatcacaaacctaatgtgtcacttcttatgctaaagtgtgcagagtgcgatagcttctctgctacagaaaactttgaaaaagatggcgtttcatctcttaaggaggcagccactgtatccgtgttagagttgaatgtgccctcctgtcagaagcgtttatgtattataggaggtactgctctaaggtgaaagagcaatgctcagcagatatgatacatgctgaggatgcattcaaaagctcttggatttatcatgctgaggtgatgatggctgagttttgtactgtctgcattgaaaagaatttaattgataaaatgattgatctgccctgggattccgaggaagacaaacatcttcacaagttcctcttcaactctgctcgagaagtgcgcatgaaaccaaatgatagtctgcttgttgtctactaccttggggtaaatattctgattttctttccttttctttgtatttgaaaccagattaagaggcatccaggaaattactagtggaactaaaactctaggatatcctgatacaggtctctggatatgctgagaaacctttcatcttaaatggaactggtgtagcccaaaatggccctgctaaaaggtctgtctctggatatgctggctaccagccaaggataacatcttgattctgcacgctggtttgtggcgatatgtttcgtcgtggtcctggttttaatttgggagttcaaaatgtaatatcagtggaatgaaattcgtgcgttttgagtagctcggggtatagaatttgaatctgactacgtttcaaatactagagttagatgactgcagtggctggcttccagcttctttattatttttgtctattattctcctatctgtcaatgtggccggtttacagtcaattagcgctaacagaggctacatcattcagtgacaaaaaaaaatagtgaatggtgaaggtatacaaactgagct

SEQ ID NO: 39183 - DNA, 428 bp, Zea Mays
tggcagtaagcttggattaaaggaaccgggtcctctcgatttgacaaacacaacttcactgaatttagcttcatctcagccgttggactcaataaagtacagtataaagtggcgccaacactctagccaataaaaaaaagatgccaacactacagagaacttaaaaaaggcgtcaacaatccaggcaactaaaaaagacgccaacactccaggcaactaaaaaaggcgccaacacttcaggcaactcctggtcccccctctccttttgttctctcggtcccctctatttcttgttccttttcttcttactcgcaacactccaaggtccctggttcctatcctccttttcttctcttggtcccctccatcttattctcttgttggtccccactctcttgtttttgcttttgtgaaaggcaaacagctac

SEQ ID NO: 39184 - DNA, 596 bp, Zea Mays
gtaccaaacgagacgtcggcccattagcgtgcgcgaataagagctgtaaacaggcccggaagaatattgctccccttcgttcacctcgcgtacgcgacaactaggctgaccgccgccgccctacgctcaactgcccacctgccctggtcttcgactcttcgtcgtgcgctttgccggcggcgagcacccatcacaccaggtatgtccgccagtcaaaccaaaggtgaaccaggaagcggctttttcgaaaagccggctttcccacattgcaaaaattaaaatcatcattagacaactgcagaagctcgtggtaaactactgcgactggggagggagcagcaggggcatcaggtacgctaattatcgagatgcgatggccagggtctaggttgacccctagtggtgcaaaggatggcctacttcgagaggcgatgtcggcggaccaatctagaagattgatgatctctacataaacacaagattacattgattcaactctgatctggtgtatgaaatattgattgatactcatttatattatttttttattatattattattaaatatatatgtctgtgtatttctctttcaaatta

SEQ ID NO: 39185 - DNA, 888 bp, Zea Mays
ccttcaaagatatgaatggataatggaacagtgggagagaaatttctatatcactgcactggctggggcgaataatggaagctctttggtgattatgtcaagaggaacacaatatgcccagcagtcctacaaagtaagcgatacatttcccttcaaatggataaacaaaaagtggaaggagggcttctatgtcactgctatggcaacagctggaagccgatgggcagttgtcatgtcccgcaatgctggtttcacttctcaggtagtggagcttgatttcttatatccgagtgagggcatccacatgcgttgggacaatggctatcgcatcacggcaacggctgccacatgggaccaggcagcctttatcttgagcattccaaggagaaagcctagtgatgaaacacaggagacccttagaacatctgcgtttcctagccagcatgtgaaggacaaatggtccaagaacctgtacctagcttccatctgctatggaagatcggtgtcctgaaacccattttctcgatttggtttggttgccgagaggtatattgatatcaaagacaggtggttttatgatatcagatggagtgttttgaagctcaaaactctgctaacctactgcaactaacaaaagatttcattggaatgtcatcgggactggaggagacatgctgacacaaatgaacgacgacagggtcggcagaatcgatatcagctggtgtttcgaaattacaaagatggaatttttagttttttcttcatcagttctaagttacagatcattagctatgtcgtaattcattttgatacatcattcagaaggatacaaaattgcttctatgtatatcgttgtgcagttgtgctccaacaagcggccattccccc

SEQ ID NO: 39186 - DNA, 1286 bp, Zea Mays
acgcaacccccatctcgtgagtcccacgaacgatctgccactccgctcgccaatgcctcccgcgacctgcgccacccaacccccttgcaccctgccttaatggactccgcgatgtcagcgctccgctcgtcaatggttgtctcccacgcaccctgcctgcgtttcaccctgccagcctcgcctcccgtgacctacgccacccgaccttcacgatagccgcgccacccagcccccgtctacctcgcctcccgctaccagcgtcgcatccaccgcacctcgtaggcctcagcctcccacgccgccggcgcgtgcaccaaacgtctgattcacccgcaagcccctccctcgtctagggtttggcattttagctgccgtcttggcatcagcgtcgctcgcgctcctcgcagccacatcagcacatcgtacaagaagagcaagctggcgagaccgcgatagggccctagaacgatgggaggaggccgacgcggtgcgcgggtggttatccgccgtcgtggagcgtaatcttgccctgcgacactgaagaggctccgcatccttctacctcccccgcggtggcttggtcagcaccgctggctccaccaaagagcgtcgcggcctccgcgaagaaaccaacgcgttctgtgcgcttggagtcggagcaaaaatggaggaaccagcgtttgatctgggcatcacgttcttctgcctcgccacaaggccaagcaaaagaggtatgtcatgaagaagatcaacctctccaagcagaacgacaacgcatgtgctcctaacataggaagacaagaagaatttctagagcggtacaccgtgatccagtacccttccttccaccgcggctgaggagcaactctcccttgatgtcctcttcctatcgttgtatccacacgacctttgtgttctataagtttgctttgttgttgatctgcctgctccgctgctcctcgtaagccttagctgatgatcttactatcttcctctttagtgaagggtggaataggaaatgatgatacactatggcagatttctccaaggtgcgcgaagaagattcttctactactttctattgttatttggaacttccgcttttactgaaaactatatttttatgtacggacgggtgggcgatatggaatttaagcttatacctattttagatctgatcgactagctataactgaatttattaggggaatccccaaactggatcattattttctcaaatagaaatgtcaattcagtttgttataatggaaaataagtgaagaaat

SEQ ID NO: 39187 - DNA, 2734 bp, Zea Mays
tgcttatgtgagtagtgatatacacatgcacatacatgtcgtcacatacatcactgtgattttctggattaaattaaaactgaaaatgcctatttgtccaacaaattcttcatctggttggcctcccttaatagatgttttctgcggatagactagcccgccggggccttgatcacctagaaagttgccctctctgttcagcacattctgatttcctgtgttctcgctagagatatttggtttcaagttctaagcaaggtggggctacaagctttatccctcgggattgctgacattgttttccaggattggtagggcaggctgaaaccaaggtgtccaaagtccagaaaaaggctttaattccactgtcatcttggtagcctggtggttgtggaaatactggaatgcctgtgtttgatggtgcctctccatgcagcagcttggtcctgctccatattcagcaagatgctcatatgtggggcatggtcggggcagtaggcattagaagtctgtggccttaaccctctggtggtcctagttatttttcatggattcttatttgtatgcttgtgtttggccgccgtaaggtggcaatcctttgtttcatgtctggccctctaaggcctttcttttctccttcttaatataacaatgtgcagttctcctacactttcgaaaaaaataggaaccgaaaaaaatataggagccatgtaacagtttagatcttaagcaaaaatagatagcaattgctctcccctgcccctctctcagccactgcatcccccctcgccatgtgcctgccctacccactacctctcctcccacacgccaccatcagcagcaggagccgcagcccccgcccctagcagggctgtgacacgtgttacgtgttatgtgtttaagaataatttagaaatcagtttcattttgctctgcatgagatgaagggaaattgaattctatatctatattggagatggccttgtcctctagtatgtcttcaaaccccatatttctttcccttagatatccacgttgcatcgttttgaacttcaaattaatcaataatgtggaagtagaataatataatatcatggccttcacttgctaaacttaggcgaacatattggagatgtaacaaatgcaaattcatatctaggtgatcatgcaaacttataatgtgtcttgtgtttagatggaccagacttaaatggaccgggaaccacatcgatcagtattatgcaaatatgccataggttcaacacttgagtctctttaaacttaatgcatcaagttaactaccagctacctgagttttcatggccaattggactttcatttaacaaatacacatttttatgacaaggatattcagagagtatagaaacaaactaacatatgaatcgaagtcaagatcgtattaatcaatagtgaagcagcttgaagtggatcaaccataaaatttttgcatgaccaatggattttgctggatagtatgttcggctccgaaccagtatagacacattgaagtcactccatattttgggctaggtgcagaaaatgaaatttagaatttttggaaatgagagatgcaaaatatttgggttgtgcaaaactttaatccgtagagatggttatgggtacaatgtctggagatgaaaatgtgctagtactcaggtgcctttggttagagaatttgggtttcatcacagcacatgtacactagagcttggacaagctacggtcctaacttgtagaagtgttttcttttttcttttttgttctcgaacatgcaggagagctgtgtatcactttattaaaaaaaagagaacaggagtgtcaggagaagtgtcatcaatattcatcagcatttttcactcccagaacagtaacagtcacattaatgaaatgaaacatatgaactatcgacctatacagtcttttttactttgcaatatgaaaagaaggtttgttattgtggctccgtcagcgcctcactttcagccagacatggcagtctcaaatctccccaccaaggccattaccttgttcttcctctcgtggatagttccatctaagagagaaggcaaacaactgtggaaaattgaccgcaaagcacaaaaggaggatggataggaaggaaatggcatggttcaaagtattctgccaaggaagaggcatacctgtgctgacctccgagctgttcacacggactccaaaagccgatcaatctctgcgatccatggtcaccaatggaatatagaaggaaggggaatgcttgcattgatgtgccccactttctatggcctgcctccttcacctcgagagtctaggcggtcgctgtgttcaaatagtctggctgaaaagacttcgagaatgtttggcccttgtgcttccttttttttttgtattcggtgggcggtctataaatagtgagcagagacttccctccattgatgattcatggtgtgtggagggcactccgctattcttggggatccgccgttttgtgtctttcaagcctattaacggcaggcagccgggcacggttacttgcgtgcctgcgtatgaactgccagctttgctgcacatgttgcatgtttgacaagagattgttgtatacggtgtaacttgaatagcattaactgagttttcttagctggctttgaatagcatttaagtcatacatttgatttgtatactgctgtcacatgacatgagttttgtgcacctg

SEQ ID NO: 39188 - DNA, 1912 bp, Zea Mays
aattcccatcagggtccgtcacgaaccggtgggcggagtcttccagaggccaatattctgacacagcggaccccgtgggccgtggccgtctcgtttcccgtctcccgcatagaggttcccaaaccattctctttcgctttcgtctccgcaccctagggtttctgtgcctcgccagcgaagcgatgcagccgccgcaccaaccgccgatgaacgggcaacactcccagcctccgccgcaaggacccgtggtgcccatgcctccgcagcagcaggcgcccccgctgccgtactaccagcagcagcaggcgccgcagtactaccaacaggccctcccgcagccgtgggggcagcagcagcagtacgctgcaccgccgccgcagtacccgcctccgcctcagacgcagcattacgcgacaccaccgcagcagtacgcccctctgccgcagcagcagtacgctcctccaccgcagcagcagtacgctccttcgccatatggtaccacgccgggaagcggtgaagtcaggacgctgtggatcggagatcttcagcactggatggacgagaactacctccactacaacgcctttgcggccgtggcccagcagattgcttctgtgaaaattatacggaacaagcaaactgggcactcagaaggctatggttttattgagttttactctcgagctgctgcagaacatactctgatgaacttcaatgggcagatgatgccgaatgttgagatgacttttaagctgaactgggcttctgctagcactggtgataagcgtggagatagtggttctgatcgcacaatatttgttggtgatttggctcatgatgttactgactccatgttggaagatgtgttcagagctaagtacccttcagttagaggagctaatgttgttgttgataggatgactggatggcccaaaggatttggtttcgtgcgttttggagatctgaatgagcaggcacgtgctatgactgagatgaatggaatgttgttatctacaaggcaaatgaggattggtgctgcagctaacaagaagaatagggatgctcagcagacatatgcaactgacggatgtcatgccatctgcatttaaggcctggaattgtcttcagatgtctatgtaaccagtgcctcggttaggagcataccagagctctaaaggaaattcttcagagaatgatcctaacaatacaacagtcatgtgcagaggaagccatccgaatgctgaatgggagtcaggttggtgggcagaaagttcggctttcatggggccgtagtcctcaaaacagacaggcttctcagcatgatgccaacaaccagtataatgggaacagctattatggataccaacagccgggttatgaaggttatggctatggtgcttccagtgcacaagacccaagcatgcaaaactactacggatactctggttgtggtaactatgagcagcagcagccaacacaggaacagcagctgcagcagcctccaccaccacagcactgacgattgcttgcacacctctggagtgctatcggattagagtgatggtggagtcacggggcgctgcaatgagacatcctatatagatatgaaggtcatatagtcgcataggagtggttagactttcttggggaccagtgttaatcgatgatggcactccggatgtttcttctgtttgtcgttgagatcttgactgttgaagtgtgctctgttgatattaatgtcttcgtcagattgttaatttgcttgtttcagatgtcccagaaccatttgtacttagggagtgtttgaatgcactagacctaacagatagttggctaaaaaatttgctagtgaaattagctaaataataaatagctagctaactattagctaatttgctaaaaatagttatta

SEQ ID NO: 39189 - DNA, 2750 bp, Zea Mays
cgccgtgtgcgctccagtttccactgtgctccttctcgccgactccgccatgaccgcctcgccctacccgacgacgccgtggctgcggccaccgcctcctatggcatttctgagtctcctcctcctccttggctgcctctccccgtcgatctcactggcgggtgcggaggcggcgggggttctgagacaagtggttggtggggacgacggcgggacattcttcgagccgttcaacgtgacctacgaccaccgcgcgcttatccttggcgggaagcgcaggatgctcgtctctgcggggctccactacccgcgtgccacgcccgagatgtggccgagtttgattgcaaagtgcaaggagggcggcgtggatgcaattgagacatatgtgttttggaatgggcatgagccggccaaaggccagtattacttcgaaggaagatttgatattgtcaggtttgctaagctggttgcagctgaaggtctatttctttttctgcgaatcggcccatatgcttgtgctgaatggaatttcggtggtttcccagtttggttgcgcgatgtccctgggatagaattccgcactgacaatgaaccctacaaggctgaaatgcagatttttgtgacaaaaattgtagatatcatgaaagaggagaagctttattcttggcaaggtggtcccattatactgcagcagattgaaaatgaatacggtaacattcaaggccattatggtcaagcagggaagagatacatgctatgggcagctcagatggcacttgcacttgatactggtgttccttgggtaatgtgtaggcaaacagatgctccagaacaaattctcaatacttgcaatgccttttactgtgatgggttcaaaccaaattcctacaacaagccaacaatatggactgaggattgggatggatggtatgccgactggggcgaatcattgccacataggcctgctcaagacagtgcttttgctgttgctcgtttttatcaacgtggtggaagcttacaaaattattacatgtattttggtggaaccaattttgagcggacagctggtggtccacttcagataactagctatgattatgatgcaccaattgacgaatacggtatcttaagacaacctaagtgggggcatttgaaagacctacatgcagctattaaactttgtgaatcagctcttactgcagtagatggttcacctcattatgtaaaattagggcccatgcaggaggcacatgtgtattccagtgaaaatgtccacacaaatggaagcatttcaggaaattcacagttttgctcagcttttcttgccaacattgatgaacataaatatgcttcagtctggatttttggaaaatcttatagtctaccaccatggtctgtgagcatactaccagactgtgaaactgtggcttttaatacagccagggttggtacacaaacatcgtttttcaatgtcgaatctgggtcccccagctattcaagtaggcataaacctagaattctatcccttattggtgtcccctatctctcaactacttggtggacttttaaagaacctgttggcatttggggtgaaggcatctttactgctcaggggatattagagcacttaaacgtgacaaaagacatctctgactacctttcatatactaccaggtgaatgttatcctatatgctgttcaaaaaagtttgttacatcagccccgattgagaaccatctgtgcatgtctttattaactagataatgcttagttcatttgacattccaccaatgatttcaagtcgtctgactaatcgcgattagtcgggcaagtcggttttgttgatgcaaccaggaattacgacccgatctgctcgactaatcatccggtcgtccgactaatcgtcgactaagcgcgattagtcgtctaatttgggtggggatgactaggatctgtttttgcggtggactcctggttgggcccaatttgggtgggaacgactaatgggctggtaatagggcccattagtgttagggttatagtaaaactggctgctaccctctgcccctctccctgtcctaccagcgactgtttgattccagcagctgccctcttcttgttcctcaacggcggctgccctctccttgttcctcaatggttgctgcctccttggcggtggcggtggccagcagcctgcacagcggcaagatgagtacatcgtctgaagggtgaacatttctgaagaggatgttttatattggaattccaaaggttttcttccatcactaaccatagatcaaatccgcgatgtagcacgtgtatttgtaaatgggaagcttgcaggtagtaaagttggtcattgggtctcactgaatcaaccgcttcaattagttcaaggacttaatgagttgacattgttatcggagattgttggcttgcagaactatggtgctttcttggagaaggatggtgctggatttagaggtcaagtaaaactcactggcttgtcgaatggggatatcgaccttactaattctctttggacatatcagattggtttgaaaggtgagttttcaaggatctattctcctgagtatcaaggatctgctgagtggagtagcatgcagaatgatgacacagtttcacccttcacatggttcaagcctatgcatcacctaccgagcaaggcccaactggtttctcacattacccacctccttatgccctcacgactgcaaatgtttagcgagc

SEQ ID NO: 39190 - DNA, 2386 bp, Zea Mays
tggctgtagaaaaatatcaaccaggtgcagtgtatctgctgaacctgtgaatctgagtggtatgtgtgcatgtgagccacatagataagttcatgtattgctggcactctaggaaacactctccactgcatgctgaacatgtgtagggacaccttgcccatattcaggtacttatagggcatggatatgggaagcttccttactgtccttgagctctggattccctgcataagtaaggtggtccttgtgccatcaagatggtgtaacttcctctccccagtctctagccttgatctgaactagatctgagcacgccagccctctgcgtggtaaccattgtccacatcacagtggccagaactcctaccagaaggagtgaagattcaacctgaagtggtgactgaagaggaatctactccagtggctgctgatcaagtggaggagccatctaactgggtttaatagagggatctagaacctcttcaatgcaacaaaggtcatagttttgtgctgatgatgatggtgttaagtgccggtgggctcggccttcttataagtttaagtaactcttctatactttttattgaggatggtcacttgagctagcatatatttcaaacttatacttttgtaatcactccgatgaatataatgaaaaatttttgtaacctgtaaaatttggtaataagattttcgctgcaaaaatgttgatgtgtgtgatttgtgtttacttaatcacgtggttctggttgtaagtggtttatctggtgtccttggggcaatcggacggatcctgttaagttagctggtgcacagacatagcagtctgaggtctttgagacaaggacaggtgcatgtgggcccaataacttaggaggttctgccacacgttcgatcacaatcaatggctcagatcaatcctctcaacgggtatgccagggatctgatcgccgccgtacacccccacatcccatggcacacacggttttcccccaaccctttcttcttccctgggcaccacggattgaacacggcggccagggaacccaccatggcggacaccatggcagagcacgtgtcacgacgcaagctcgactccccgattcaaaagagcgacatgcagaggagaatgctacgaataacatggataggttgatcacctgcaatcggctgcagaggagcccgcccacggtgcgagcggaacccacggtggagcaccaactccggcgtgaaatcgcgggttccccgatcggcaatcccatctagcgaagcaccttgtgccatccatgcctctaatcaaagctcccagacccactggtggaatcccgagcggtagcgtgggcgagttccacggcggtggaaccacaacatcggcgcaaaggcgaccgaccaccacagtgcccaaaacgtcgattaaaccgagctacgcatagaggagacaatagcgaacgtgggggatgaggactcaccagagaaggagtctgcggagaggctgaccacggaggacagtgggttcgcggtctcccgtgaagaaatcccaagcctcgggcgccggttcaacgcggcgaggccacaataacttctccacgcacaggtggagcttcacggcacggcactggggcagcgacaacgacgagcccaccggcgatggcatagctcggttctttctctctctcttcgttctcaccatggaaatggcggcgccactagcttaacccacgccccttgttgaccgcgacccgcggatggctagggaagaggaggtataggggggtttggcccgcttttgtagccggtcgaggggagtccatgggcgcaggggtatcgggcggcgtaacaacatgcccgagatgcccggcgaggaagagaaactggggaaagggtgggtcccatgcgccagagaggaatggatcagctggcgcgcgcgcgactacgcgtgtagtgactggtacacaggccccatgcatcagagtacgtgagcgttggtcgtgtgtgcgtggctgagacgggcaggtggggcccgcgcgacggcgccttgcagcgcgattcaaagctgggctgcgcggagaaaggaattagttgggccgcgcgggaggtaaggtgggccggcaggtgaatcttggcccaaagtaggtgagttctttccttttttccagttttattttattttcaaatttcgaatttagaattcaaatttcaaatctgcaacaatccaaaaattactaatcataacaaaaatctattatcactttattttttttatccttacttaagttaatgattttaggtatgccactcatacatacaaaataggcatttaacaacataattcctagttggatagaatctcatagaaagaaatttttaaatacatatttgaacaagg

SEQ ID NO: 39191 - DNA, 2885 bp, Zea Mays
tacgccgctctgctcagttctcagtgctgcatgcaccgagcaagtgagctatagctaccgaccagcagcccagctaattcagtctctactagcagagctagtagccagctgcctgccactgactgatcatcgcgtcgaccagagcatggctcctaaggcgccggcgaataatggcgctgtcgtcgttgccggcggccatcacgggggcagcaccgacgtcggcggcgttgccgggggcgcgacgacgacgactgtgccgacgtctgtggcggcgaacggcaacggcaagcagcacggcacgaggaagcagaggaggcctgcagcggtagtcgtcagcccgatggacaagtactggacgcccgtcgacgacaaggaggcggcggaggccgtcgacgacggcggcgaggacgggcggcgcccgctcctgttccggacgtacaaggtcaagggaatcctcctgcacccctataggttgttgaccttgctgagattgattgcaatcatcctattcttcatatggcgtatccggcatccgcatgccgacggaatgtggctctggtggatatccattgtcggagatttctggtttggtgtcacttggttgctaaaccaagttgcgaagctcaaccctaccaagcgtgtcccagacctttccctcttgagacaacagttcgatctccctgatggcaactctaatctccctaggcttgatgtttttatcaacaccgtcgatcccataaacgagcctatgatatacaccatgaactctatcctgtccattcttgccgtagactacccaatcgataggactgctacctacctctcggatgatggagggtccataatccattacgagggcttgcttgagacagcaaatttcgcgacactctgggttccattttgccgaaaacatagcattgagccgagagcccctgagagctattttgctgtgaagtcgcgcccatacactggaaatgtaccagatgagtttgctgatgatcatagacgcatgtctaaggagtatgatgagttcaaggtgcgtttggatgcactttttactaaaatccctgaacgctcagatgcacacaatgcagaggccaaggaaggtgtaaaggcaacctggatggcagacggaacacagtggccaggaacatggtttgaccctgctgaaaaccacaagaaagggcaacatgctggaattgttaaggttatgttgaatcacccgggcgatgaacctcggtttggtggaccagcaagtgctgaaacccctctggacttcagtgccgttgacgtgcggctcccaatgctcgtctatatctcccgtgagaagagtccaagccatgaccaccaaaagaaagcaggcgccatgaacgtgcagctgcggatctctgcgcttctgaccaacgctcccttcatcatcaattttgatggtgaccactacgtcaacaactcacaggccttccgagctgcgatgtgcttcatgctggaccggcgggatggcgagaacaccgcttttgttcagttcccgcaacgctttgacgatgtcgacccaacagacagcaagtttggcagctcaatgctcttcatcaactccataccatcggctgcgaaccaagaatggtccatggcgtcaccaccggcacatgaggagtcggtcatggaagagctgaataatgtcatgaagtgcgcatatgaagagggcactgagttcggaaaggaaatcggctgggtgtacaacattgctacggaggacgtggtgaccggcttccgagtacaccggacagggtggcgatctatgtactgccgcatggagccggatgccttccgtggcactgcaccaatcaacctcacggagcgcctctgccagatcctgcgctggtcgggcggctcccttgaaatgttcttctcacactgcccgctccttgctggccgtcgactgaacttgatgcaacggatcgcctacaccaacatgacagcctacccaatctcatcggtcttccttgtgttctacctcctcttccccgtcatatggatcttccgtggcgagttctacatccagaagccgttcccgacatacgtgctgtacctcgtcgtcatcatagcaatgacagagctgatcggcatggtggagatcaagtgggcaggcctcacgctgctggactggatccgcaacgagcagttctacatcatcggggcgacagccgtgtacccgttagcgacgctgcacatcgtgctgaagctagtccttcgcgggaacggcgtttcgttcaagctgacggcgaagcaggctacgagcgccgtgaacgagaagtacgctgagatgtacgtggtgcagtggacgccactgctgatccccacaatagcggtgatcgccgtgaacgtcggcgcgatcggggcggcgatcggcaaggcggtcgtcggggggtggtcgctcctgcagatggccgacgcgtcccttggactggtgttcaacgcgtggatcctgctgctgatctacccgttcgcgctcggggtgatggggcggtggagcaagaggccctatatcctgttcgtcctgttcatgattgggttcgctgtagtggcggcggtggttgttgccatccatgctgcgcgcactggttctgttcggttccattccggacattcaggcggtgctagcttccctacaagctgggggttttagatcgcgttcatcattggttagtggcattggttgcaggttgttccattagctgagagcttcttcgctgtggagttcctacttgatgtaaatcgtgcattgattgtacatgtttgttcagtggatggtttgtaaggaacaaaaaatggtggtaaagtgaaagcacatttctgcctcgattttgacatgtaccggtacgtgagtg

SEQ ID NO: 39192 - DNA, 4423 bp, Zea Mays
gtgagacttaagcacctgccaggcatcaatcagcacgccacaagatgaggacgtgacggggggggtcgggagtgcggcacgcggagcactgtacatgtgcgactgcacgtcgcgcgcggcgcagcgcagcgcaggcacagagccactgaaccagtagccgtactctacagaagcaaggacatagagaattgacaagaaaaatcacgcaagggaggagagagagaaggggggagcatagcataggcatagcaagagcaaagctgaaaaagaggagcaccactcgtggggggttaaaaccccgagaacaaacttgggagtagcagcggccagccggaagcgagcggagaccgaggggagagggggtgaagaagcaacgagacgcagcgagcaagcgaaagcataccagagcaccaagcatagggacgcgcgcgcttctccagttctccctccctgccctgcaaggcggctgcaactgttccagctagcccctctcccagcctctgcgtcgtagacgtggtagtagcagccgcagcagcagaagcggcggcgagcatgctcttggcacccctccccggcgccgggcggatctgccggagggcggcggccggggcgcttggagcgcggcgctaaccgcgttcgaaggacctcgggatctgacgccgcgcctcccctaatcgatcgactccatcggtggcggcggcggccgaggcggcagcagccgggtctctcggctccgggacaagaagggaaagattgcgcttgcgcttgcttgggcgccggccgcgccggtggcggtaatcttcgagagccgcggtcgcggcgcgcggtgaagagaaaaaaaggtgtgtgtgtgtgagagagagaggaggctccctgccctctcgcggtgacttggcgaggagggggagggactgggaaagcgaatggttttcgggaaggcgctgtgatttggcctggaaaggaggaacctttccttcctcttcccgtcctttgccggctcttgtaccgccctcagatcggcgacccggttgtttcttcggcaacgggcggaaatgaggctctcgtcgtcgtccggcagcgtcctgccggctcagccgggctcgccggaagctgtggaggagcacaagtgcctgaactcggagttgtggcatgcttgtgccggcccgcttgtttccttgcccgcggtgggtagccgagttgtgtacttccctcagggccacagcgagcaggtagcagcatcaacaaacaaggaaatagagtctcagatccccaactatcctaatctgccgccacagcttatatgccaacttcataatgtgacgatgcatgctgatgcagagacagatgaggtatatgcacagatgacactacaaccactcaacccgcaagaactgaaggacccatatttacctgcagaattaggttcggccaataaacagccaacaaactatttctgcaaaacattaacagcaagtgataccagtacccatggtgggttctccgttccccgtcgagcagctgagaaagtgtttcctccactggatttcacccagcaacccccatgccaggagttgatggcaaaagatcttcatggcaatgagtggaaattccgtcacatctttcgtggccagccaaagcggcatcttctaactacaggttggagtgtctttgtaagtgcaaagagactcgttgctggcgactctgtcctttttatctggaatgacaataaccagcttctgctgggaattcgtcgtgcaaatcggccacaaactgtcatgccatcttcagtcttatcaagcgatagcatgcatatcggtcttcttgctgcagctgctcatgctgcttcgacaaatagccgatttacaattttttacaacccaagggcaagcccttcagagtttgtcataccactcgtaaagtatgttaaggctgtgtatcatacccgcatatctgtggggatgcgattcaggatgctttttgagacagaagagtctagcgttaggagatacatggggacaattaccggaatctgtgatcttgattctgttcggtggccaaattcacactggcgttctgttaaggttggctgggatgagtcaactgctggtgagcgacaaccaagggtgtcactatgggagattgaacccctgacaactttcccaatgtatccatctccttttccgctcaggctcaagcgtccatggccaacaggcttgccttctctgcatggtgggaaggatgatgacctggctaactctctcatgtggcttcgagataccgcaaatcctggttttcagtcgttaaattttggtggacttggtatgagcccttggatgcagccaaggctggatgctaccttacttggtctgcaacctgacatgtatcaggcgatggccacagctgcttttcaggatgcaacaaagcaggcatcgcccacaatgctgcagttccagcagccccagaacatagctggccgggcttccccgcttctttcaagtcagattttgcagcaagcacatcatcaatttcagcagcaaccgtaccttcaaaacatctctgagagcacaatccaagcacagggtcagtctgagttcctcaagcagcagatccaacgcagccagtcattcaatgagcagaagccccagatgcaacaccagcaagaatcacagcagcagcagcaaccacagtgtctgccagtcccccaacatcagcaaatgcaacaacagaatatgaccaactaccagtctatatctaatgcattatcaccgttttctcagctgtcgccagtttctcagtcttcacctatggcgctgcagactatattaccgttctcgcaggcacagagcttcacagacacgaatgtaggttcattgtctccatccaatggtaacaccatgcaaaacacactgaggccgttctcatcagaagcagtttctcacctcagtatgccgaggcccactgcgatacctgtcgcagacccatggtcgtcgaagcgtgtcgcggtggagtctctgcttccttctcggcctcaggtttcatcccagatggaacaattggaccctgcaccagctagtatacctcatagctctgcgttggcaccacttcccggaagagggtgcttggttgaccaagatgtgaactctgatcctcaaaatcatctcttgttcggtgttagtatagactcgcagtcactgctaatgcaagggggcattcctggtctccaaaacgggaatgattcagctgctataccttattccacttccaatttcctcagcccttctcagaatgactttcctctggaccatacactaaattcttcaggctgcttagatgattctgggtacgtcccgccatgttcagataattctgacaaagtgaaccgaccaccagcgaccttcgtgaaggtttacaaatctggaacctacgggaggtcgcttgatatcactaggtttagcagctatcacgagctccgtagggaactggggcgcctatttggccttgagggccagttggaagacccattgagatcaggctggcagcttgtattcgtcgaccgtgaggaggacgtccttctcgtgggcgacgacccttggcaggaattcgtgagcacggtgtcctgcataaagatcctctccccgcaggaggtgcagcagatggggaagcagggcctggagctcctgagctcggcccccgcgcggaggctcggtagcagctgtgacgactacgtcagcaggcaggagtcgagaagcctgagcaccgggatcgcgtccgtcggttcggtcgagttgggatgagcagcaagatagcgcgcacgcagcagcagcagcagcaggttacgcatcctcagcctcagggtaggtaggggactgaagggttggtctgcgacttgatgacccacgagctcctcgttgcgcgcttcgttcgcctccatgcgatggatagaagttcagcgcagaccaagccttagctctgcgagctatgtaccatctaataattctgtccgtgtcgtaccatgtcaactcctaagtagaagaattgaagaaactaccagcagccgctgtctggtatacacgctgaaacattttttttcttgtatggagaaatactaatcatctggatgtagccaggcctatgctctctaatggttgatcgggtaatacagcccctcgcacacagcaaactcacaagagaaacttccagttgctacattaagtttgggcagtaataaaaggtccgtcaaaaattaacttttttttttctcggcagcaacaagaagtccatacaaaattaacttattttttagtggctaaacggaggaggctgaaaatattttttttgttttggcggtatgtactaagacgttgtatttagtcattgaaaatagattgattttcggcagtctctatcgcagcaagaaagaaag

SEQ ID NO: 39193 - DNA, 104 bp, Zea Mays
ctggcaaaggaccgcctaaaaagggtggtgtgctctcgggtggcgcggacctgttcatgcagtggaggatccgtggggatggtagacatgcaaggtttatgaga

SEQ ID NO: 39194 - DNA, 1115 bp, Zea Mays
taaaatacctggcgcctgatcacggaaagggacggcaacaaatcgccgtgcgccagcggccagcgcacagccgagctccagagaggaggcggagctgcgggggacggggggagacggaggaggtcccggcgtcccgcgcctccccgattggacaacttaatgacccctagtccctagtagcaagtcggctttgtgcgcgcgtgctctgctgcccacccggccgccccatttgtttactgggtgtctgggtccagtccccgccccgaatcttttccctcctcccgcaccccaggccgcagcagcagcaccggcgcaccgccacccactcgccccgcctccgtgcccgcgcaactcgcgcctgcagcgtgtgggagatgtgatcggagcccggccgtcggttcgagtgttttcttctgcctctgggctgtggcgcggggaggaggcaagctggcggtgagatgggtcggtgcggaggaggaagcggagcaggagcaggagggggagctttgggcggctgtgctctcctcaccgccgccttggttatctcaacgctcgtgatccagggcgctggagttgcagtttacctcggtcgatttttggtggtccaagctgtcgaaacaggagagcttacctagtttacacttccctcgtctttttcagttaaatcgatggctgagtcatttgttccacattagagttaactttattggaacctttgatctgtttggaacgcagactagttctaggtggtactgtttgtgatttgtcgtgtgtccttatgtcataaacggcccatgcttaagtaaacgatgaagaatatccatttcagttcaaattctaagtaaacgatgaagaatatccatttcagttcaaattctaagtaaacgatgaggaatatccatttcagttcaaattctagatacagatctcgaactttacttggttacaaaaagaaagaatttatgcacctgaaatttgacatggttgatttgagatcagttatgtaggatgcatattagtttagttttaacgaataggaaaattgcaatgaatgtggcaatgttagggcttaactctgttacacacgtaagacagtggacaaaggcaaaattttg

SEQ ID NO: 39195 - DNA, 1506 bp, Zea Mays
gtgcagcgaaacttggccatctttagttccttcgcttgctccggctgttgcttatctagcctagccaagcaatatgttagttagatctgaagagaatgctttgagtaactgtttcagttgtgttctatgatttcaaaacaaaagaagcaaacaactagtggccctaacatgtttgcatcagcctctcctcatgtgggctagttgttcctttcctagcgacataaggtctacccccaagtgaaatcagggtcttcaagatagcttactgagatgtggggttttgcatcaaacgcttgggcagctgggctggagaagaggagttccccaaaccgcacttcctcgagtgctgcttattctgacgacgaagcatcctcgtgcacaagcagggaagaaggcctggagtgcccgatatgttgggagtctttcaacatagtggagaatgtgccttatgcgctatggtgcggacacaccatgtgcaagaactgcatcctagggcttcaatgggccgtcatcaaagtcccaaccgtgccgatccagctaccgttcttcatctgctgtccctggtgcaacctcctgtcgccccgcgtactttacaaggggaacctcacgttcccacgaaagaactatttcctcctctggatggtcgaggggatgaacggcgagcgggccagatcacgcccagctattcgcagcgagcagcatactccgtggctctcaagcagcagcagcgtggcaaatggaaatgcaggctgttcaaatcccactcgacgccacctcccgccaccatctgttgacacttcgcccaccaacgcaaatcatgccaactacggggggtcccctctgctgaacgcagggagggtacaagcttcgctgcgcaaatccctgtcgttcctggtccacctgactgccaagtttcccctggtgttcgtcttcctcctcatagtgctgtatgcgatcccagccagcgcagcagtcctgttactgtatatccttatcactgtgctgtttgcgcttccctcgttcctgatactgtattttgcatatccgagcctggactggcttgttagagagatctttgcctgagattttttgttcggaaaaaaaaatctcaatgctgttgttggggtctgtgtaactgaattctccctagattttgttgcaagtgttgaagttattgccaagttttggttttggacccatgccgacatgtgatagatatgtttacctcaagtctccatggtatggaaggtcctctgttgctgtgttgcattgcaacacatcagcgtgctctgtgctgctgacatctgttatgttggcttgtatcgcttgagtgcttggaatggcagggattgacgaagtgtgggggtatctgaaaagaaaagttctttttttttctggatttggtatggcttctcgaaatatatttgtgtcaagctgcctaaccactttgttatccttagaagtggggggtagtgacaactgttttctgaaacaaaactgtttaac

SEQ ID NO: 39196 - DNA, 4193 bp, Zea Mays
gtattaaattgttttatctctcccgagccagcccgttgctggctgcttgcttctcgcagagacagggagtgagtgaggcagaggaggcgtacctgcggaggcgggcagccgaggcccgcgcaattcgcgtccagcagggtgggtcgggctcgcggcgcctctattggcattcccgcggttgtgcgggcgggttggcggccagcgagatcggctgttgtttctggcggtttttgtgaggtgtttagtgttttgctgggtgtgactgtgagcgtggattggcgactgctggaggggtttggggatcgatttgaggtcgtcggagcggagatcccgaggggacctgcggtttcgttgtggcccgtgagttggattccggacgcagtgccgtccggcgggccgccgagacgatggcgtcggtggaggtgaggtcggtgcggaaatccacggccctgcgggcgcgcggcgggcccagcaagctgcagtcggcgcggtcgatgccgctcgactacaggtactcggacggtccctcggcggcgaacggcgccggtggcgggccggctgggaacggcgtcgggcgccgggcggttgcggtggaggcagggaaggaggagaaggaaggtgaagtggtgcggttggagggggacgacgcggactctccgtacagctccaatgtggtgacagcggaggaggaggcggggaatacaggtggaggaggagacgaggtggattcggcggccgcggcgacgccaaggcggttgtcgccaagggcagcagcgagccccacgcaagtcgacgcccggtggggtgacaccagctcgtacggcgctaagaagaagcatagagtgttttgtcagcttcgaaatggtgattgggcattatgcacagtacttgcaacctccggtgacgagtctgttctaaaggtttctgaagggaaagtactgagattgaaaacagagagccttcaacctgcaaatcctgaaattcttgatggagtggatgaccttatgcagctaagttatctaagtgaaccatcagtgctgtacaatctgcagtacagatactcccaggacatgatttatactaaagcaggtccagttttggtggctgtcaatcctttcaagaaagtttctctgtatggtaacgagtacattgatgcatatagaaataaatcaatggatagtccacatgtttatgcaatagcagatgcagcactttgtgaaatgaaaagagatgaagtcaaccaatctataattataagtggtgagagtggcgcaggaaaaacagaaactgcgaaaattgctatgcagtatctggcttctcttggaggtggaagtggcattgaatacgaaattcttcagaccaatccaatactcgaggcttttggcaatgcaaagacattgagaaatgataactcaagtcgttttggaaagcttatcgaaattcatttcagtaccactggaagaatatgtggtgccatgattcaaacatttttgcttgagaagtccagagttgtgcaatgtgcagttggtgaacgatcgtaccatatattttatcagctgtgtgctggtgcacctgcatctctaagagagaagttgaatttgaaaaaggtagatgagtacaaatatcttaaacagagctgttgctattcaattgcgggcgtggatgatgcccaaatgtttcgaactgtgacggaagctatggacatcgttcatatcagcaaagaggaccaagagaatgtttttgcaatggtctctgctgttctatggctgggggatgtctcgttcacagtaattgacaatgaaaatcatgttgaaatcattgcggatgaagcttcaaaaatggttgcagaacttcttggctgcagtattgaagatctcaatttagctttgacaaagcgccacatgaaagtaaataatgaaaacattgtccagaaacttacccttgctcaggcaactgacacaagagatgctctggccaaatcattgtatgccagtttgtttgaatggcttgtagaacaaattaataagtctctctcagttggcaagcgtcgaactgggagatctatcagtattcttgatatctatggctttgaatcatttgataagaacagttttgaacagttctgcatcaattatgctaatgaaaggttgcaacaacatttcaatcgtcatttatttaagcttgagcaagaggaatatgtggaggatggcatcgactgggcaaaggtcgactttgaggataatcaagattgtttgagtctatttgagaaaaaaccactggggttattgtctctgctggatgaggaatctactttccccaatgccacagatcttacttttgcaaacaagcttaagcaacatcttaactcgaattcttgcttcagaggagaaagagacaagggatttgctgtccgtcactatgcaggagaggtggcttatgatacttcgggttttctggagaagaatagagatttattgcacatggactcgattcagctccttgccaaatgcaaaacttttctgccaaaaatgtttgcatctaagatggtcaactgttccaacttatgcaaagactggaaagtacaacaccacactttattcgttgcattaaaccaaataatttacaacttcctgcaatttatgaacaaggacttgtgcttcaacaacttaaatgctgtggggttctcgaggttgtccggatttcaagatctgggtatccaacaagaatgactcaccagaagtttgctcggcggtatggctttcttcttcttgaggatgttgcatctcaagatccactcagtgtttcagttgcaattcttcatcagttcaacattttacctgagatgtatcaagttggctacacaaagttgttcttccgaactggacagattggcaaacttgaagatactcggaatcgtactctacacggtattctaagggttcaaagctgtttcagggggcatcaagcccgtcatcatgcgagagaacgaataagaggagttttggctcttcaaacattcattcgtggtgagaaagcacggcaaatttattcctctttgttgaggaaacatagagcagcagttattttgcagagtaacttgagatgttggcttgcaagaaggtatttcataaatgtccggaaggcctcagtgataatacagtctggtattcgtggcagtcttgttcgaagatgtaatggcaatattgatctaataaacgtgctaagagagtttgaatcaaaacaggaggcagagggtgaccaaattttgatcaaggcatcagtcctggccgagttacagaggcggatactaaaagccgaggccacagtacgtgaaaaggaggaagagaatgagacgcttcatcagcggcttcagcaatatgaaaaccgctggttagagtacgagcagaaaatgaaagctatggaggaaatgtggcagaagcaaatgcgttcgttgcagtcgagcctttccgtagcaaagaagagtcttgctctgcatgagacacctaggatgtcggactcatcagtggatcagagctgggaaagcaacgggaaccatgtcagcagcgggtctcagctggtgccacgcactggtgggcgcgaaatgagcgctggcctgagcgtcatcggccgcctagcagaagaattcgaacagcggagccaggtttttgctgatgacgccaagttcctggttgaggtcaagtccgggcaggcggatgccagcctaaacccagacatggagctccggaggctgaagcacaacttcgactcgtggaagaaagatttcagtggccgaataagggagacaaagatgatcctgaacaagctcgggaacggcaacgagtcatcgcccaactccgtgaagcggaaatggtggggcaggctgaacacctccaagttttcgtgagtttgttatgtatactgattggtaattcgtagatgtaccggtattttacacgccggtgtggttctagcttcctagagtttctattctacggggtgtcgtgacttgtgaaagtcgagtgtgttgggctggagttgtgttccgtggagggcgagttgtatagttcttccacaatggcttcctttgaggggggtcaaggactactgaattgtgatgtaattacttgctgaagtagttgtcgaagcgggaagattgtgacatcgctcactattccactatcctcgtgctttac

SEQ ID NO: 39197 - DNA, 1173 bp, Zea Mays
ccacttatccaggatcgaataccactagctcactcgaaggtgagacacagataaatacaataaagcataataccatacattaagaaagtatcattagtgattacattatcggagttttcagaaataataaccataaattttaatgcagtggaataactaacggagaaaaccgagcaacatggcgaagcctggccacgctactcctcctggtcttctcctgcggaagcagtaaccctctcgaccatctatcccggtggcagggatgaaggccaagtcacaccagcaactaaatcatccaaggagttcctgcaaaaattatgccataagcaaggctgagtatactaatactcagctagatttacctggtgtgaggagtctactcctctacctctagacatatagctgtttggctgaggggtttggtttgccaaaagcactagctgagtctaaaatcaagttttagcttttcaagttttagtatgatccttttagactagatgtgtacctagctaatcatacatggtatcaagcattttatcaatcaacatctttttgccagtcatcttatttccacttattactcaatgcagtacaatggatcaagcagtctcattagctgcgagaagcagacgattcgaatcgagtttttaaaccttgcaaggtaaacctaaacacacgacgtggcgaggcactccgtccccacacatatcaactgtccccatcgattctccgtcaacagaacagggctcaccgccttggcgtacaatgcctcactgaccctgactgtcgtcgtgcagtgaccgtacttgtaccaccataaccgaaatgggagaccacgtctcaggtcgagtgaggggtaaagtctgcgggcaggttcactcaggtactaggcttaccgacttaccatatttctcggcatgtgctcagtacgttcaaatgcttgacacaggtatccgcacgttaatccttattccaattttcgtctcataaacaacgcatccccatggatccgtgtccacagaccatcatcgttctgatataaaaatagatgcaaccaattcctgaccttgcgcgagtgctagaaaaatcacttgacttctaccgagatccctaaattagcaaagcagctactcgacctagcatactagtatccatctcaaagggaatcctgaa

SEQ ID NO: 39198 - DNA, 2840 bp, Zea Mays
ccatctcctctgtctccgcctcgtcgcttccgcccactcttcctcgccgctgcctcacggccccattgctccgagcgcggcgccggtcgcgatccgaccgggggtgcgcggcgccgaatggtgtgatcgaccccgtcgggaattgggatcgaggtcatgcagcgggctccggagcgccgccgcggcgccgggccgctcctgctgctggcgctgctcgtcgcattggcggccgcgcccagactcgtgcgcgcggtcaccgacgctaccgacgtctctgccataaacggactgtacatgtcactgggatcaccacttctacctggatggactggaaatggtggagacccgtgcggtgagagctggcagggtgttgtgtgtaccggctcttccataactggaataaccatgaatgctgcaaacttgggaggacagttgggaagtttaggaaacttcactgccatcaccagcttagagcttaacaacaataatattggtggaaccataccggaggacctacctgttacattgcagagtcttttcctctctgctaatcaacttactggaagcatcccaagttcactgtcaaaactcgaaaacttaacagccatgtcagtcaacggcaaccatctaaatggagacctaccagacacttttgattcactcaatagacttgtaaatttggatatttcttcgaacaacttgagtggtgtgttaccatcttcaatgaaaaacctggcatctttgacttcattgcacatgcaagataatcaactgtctgggacccttaacgttttgcaggatctcccactgaaagacttgaacatagagaataatcttttttctggaccggtgcctgcgagtttgcttaacataccaaacttcaaaaaggacgggaatccattcaataccagcatcgtcccatctgcatctccgccttcaacaggaccagctccaacaccagcagcatcaaaaccagctccaacaccagcacccaccacttcaaattcaacgcccccagcaccagcaccctcatttccttcaagatctcctcccccgcctaaaacaacctcaaactcttctgaaggatcaactacccgagatagcacttcaccatctaagaaacacagtacatcaaccctcaagattgttggctttgttcttgccggagtagtgctgtttattatcatagtcctcctagtattattttgtctatccaagtaccaagagagacggtcgagatatgatcataacagaagtcagcaggcaagggtgcatcatagggttgaaccgcaaatcaagccacctccagtgcaacaaagcaatgatcttaaaaaaggttcaggtgaggtacttgatagaaggggccatgaactaagttcatcaacggcagctctcgcaaagaaatctcctgaaaaccaaaaggagcatgtaattaattttgatcgaacagattcagatctgtttcctgtttctctaccaccaccacctcctccacctccattacccccaattgaaagagttattgcaaatcccattgttccaccagaaaagcgatatagtcctccaccaaagacaagtagctctacttctgccacatcattctctattgcatctcttcagcaatatacaaatagcttcagagaggagaatgtgataagagagagtagattaggaaaggtttacctagcagagcttcctgatggcaagttattggaggttttgaagattgacaatgctaatggaagaatatcagtagatgacttcctagaagaggttgaatgtatcttagatatcaagcatcctaacattcttgagttagtcggatactgtgctgaatatgggcagaggttacttgtgtacaatcactttagcagaacgacactagatgacacacttcatgatggagaggatactgaaagtgcactgtcatggaatgcccgcctccaggttgctcttggttctggaaaagccttagagtatctccatgctagcttccaacctccaattgtgcaccagaattttgaaccagctaatgtgctccttgacaaaaagttctcagtgtgtgttgctgaatgtggactggcagaattgatgccaccaagttcagtcactcagctgtcaggtcggatgcgtgcattactgaactacgaagcacctgagttgcaggattctggggtcgtttcagaaaggggtgatgtatacagctttggtgtagtgatgctggaacttcttactgggcgtaaaccatatgacagttcacgcccgcgtcatgagcaacatcttgttagatgggccagttctcagcttcatgacatagaatccctgtccaagatggtggacccatctatacgtggacaatgttctgagaaagcattgtcacgtttcgctgacataatcagccgctgtatccagcagcagccagaattcaggccaccaatgtctgaaattgtacaagacctagctagacttgtaaatgccaccggtgaggaatcagagtaacccccaaaaaaagcatggagccatggaaggcatacaatacaaacgtcgcgaccaaacatgatattatatatagcgacagtggcggagcctccgccaagcgccaaggcccggcctgatcgggcacgtgtccaggcttccgccgaggaacacttgggtgggctctcgatcggcctagcacacggatgtttggatgggtcaggcagtggtgtcgatttcaggccggctccgccactgtactgtatagcaaggtgtatatatagcaagaccccggattcttgtaataatagtcagggattcgttaaatttgttactctaaagctagtcatttacttgttcgcccg

SEQ ID NO: 39199 - DNA, 496 bp, Zea Mays
gggtcggaggcgagctccacggcgagcagagcaggggctgggtgcggcatgggagagcgagcttgagggacgcgaccattaattgggaagaactgaagggagctccatggaggtcgcgcggtcaggcgattttgagggaaggacgagcggggaaagcagacgaactcccgggctgaggccattgacgggcagagggagctcgggcgccgacgaaccagcaggggaagacgccatggggatgagagaggtccgcgcgcagagggtttcgcgagctgggcgagcagagggatggccggtagcgctgggaagaggccgagcgccatgaggaagaacctcggcgtgcaggattttatccagtgtttaagcggctgatgaaaatatcaacagaggagcggcgcaagaagataagaacgacggctgtgacctcaccggcggtgagcggctgggcggcaggatttttccggcggcttgagcgacgtggctggaagaagcaaga

SEQ ID NO: 39200 - DNA, 1618 bp, Zea Mays
gccctatcctctccctcgccctaacctcccgtcaatccggctacctgacatcagtctcctctcatgtattaagctttgaaatgagtctccttaattgacgattctggaattcggaggcctggaattcggaggcccaggaatcatgatgcagcaggctcaggcgcacacctcggcacttgcgggagcgccgtcggcgtcggcggtggcaccgacggtggctcacccgcacgatccggtgggcggggatgcgccgccgaagcaggtggctcaggcgatggagcggctgggccgtgctggccggttcatcgcggacatccggctcggcgcggaccgcctcctcgaggctcttttcgtctccggcgacgcgcccccgtacagcgtgcgccagcacgtcgacaggatggagcgtattatcgtcaaggaggatgccgccatgcgcctccactttcaggacctacgcgccctcggcaggcaattagaggagtctggagttcttaacggggcccttaaagctcaaggcaattcatggggcttgcacatgccactcgtttgtccagatggtgctgttgtagcttatgcttggaagcgtcaactagcaggtcaggctggtgcatctgctgtggacaggactagctctcaaggctttcactgaccagaaaagaagattctttcctcatctagaagatgaagttgttagccatctccatgatggtcaacctggtgacaccaaaaagtcaaagttgtttaccagcaatggatatctagaggaaaaatctttgtctgaaatactgaaaaatttagaacatgaagtacctaacataaaaatattcacatactggcatctggattggtcaaaaagagcttcatcattagcatctctgttggatgatgactttgtggatccatctaaagagctgaacctgcaaaatatggacaaatcgagatctgatgctctgacaactaccatagaccaagttgctgttattgaattgctggttccttcaatatttagagctgtagtgtcattgcatcctgctggatctactgatcctgatgcagtggcattcttctctcccactgagggaggaagctatcttcatgcaaggggcacatcggtacatcatgtgtttaagcatgtaaaagaacatgctgacaaggcattgcagtacttcatcaatgcggagccgagtaaagcactacctcttcttttgcgttggattgccagctatcagactctgtttacgaaggtttgcagcaaatgcagacggcttctgatgatggacaagtctttggctttgctgttgcctcctgtccaccgcccctatcaccagacttcaaatgttggaccagatcttcaagaggcctaccacattggatgttcctcctacgatggctagctgatgcttctaagatgttcctgacattgtcattgacatagtacgtgtacaacagtcctgtgtgaaacaatgttcttttttttttggaatgtatccaacccattaggtgacatatgtatagaaacgttactggttgcttaggtacttgaagttctacgctcttgctcaaattaacctacagattaattcagattaacaaaatccagaactggtccaaacaa

SEQ ID NO: 39201 - DNA, 1762 bp, Zea Mays
gttcgcacggagaatgccggacaaaagcaatggtgatgtagccgccgacgggtacaacaagtacaaggacgatgttaagctcataattgacaataacctggaggcatataggttctctatctcctggtccagacttataccaaatggaagaggtgctattaatccaaaagggatagagtactataacaatctcatagacgagctagttacacatggtgtccaagtccatgttatgatttaccagctggatctccctcagatcctggaagacgagtatggtggatggttaagtccaatggttgtgtaagatccagtaactttagatgttagggatattttcccaaaatgaacatatcttgatcatccatgctaccacaaaacgcagggaggatttcacggcatatgcagatgtgtgcttcagggagttcggtgacagggtttcacactggaccactctggatgaagtcaatgtggctgcaattgggtcctatgataatggacaaattgcaccgggaagatgttctgatccatttggaacaaaaaaatgtacagtggggaactcaagtgtggagccatatatagcagctcataacatgctactggcacatgcatcagctaccagactgtacagagaaaaataccaagctgtgcaaaaaggagttgttggtataaatatatatacaatgtggtcatacccactaacaaactccactgccgatttagaagcaactcaaagatttctggacttctattccggctggatactagaaccattggtgtttggagattatccaagcgtaatgaagaagaatgttggttctcgccttccgtcattcagtaaagttcaatctgaagccattcgtggcactctagatttcattggaataaaccactattattctttctatgtgaacgaccgccctttagaaaaaggcatccgtgacttctcactggacattgctgctgactatagaggttcgagaactgatccgccaataggtcagcatgccccaacatctattcccgctgatcccagaggattgcaacttttggtagagtacctgagtgaagcctatgggaaccttcccatctatatccaagagacaggttatgcaaccacaaacggcagcctccatgatactgacagggttgattacatgaagacccacataagcagcacattggctgctctaaggaatggggctaatgtgaaaggctacttcgcgtggtgcttcctggacgtcttcgagtacctgtcagggttcatgtcgcaatacggcctgtaccgtgttgatttcgaggacgaggcgctaccaaggcaagcaaggctatctgctcgctggtattctaaattcctagagaacaaggggatccatgtagaggacgagcttgatgatgcgggatcacacgttgagcaataagttttctacagcgacacattgatctgtacatcctctagcgagactattgaatactactgtgcgttgcaataagaacacttatattaaaaaaacaaattccatcaaaacctctgtccaggactccaggtaaacaccaccacaatattagggacacggtcctgccagaacaagggaccgtttgtacaactcaagcccatatctgctagagtgtgaggagaaatttcattatttgggtcttaattcggcttcctgtgatctttagggcctgttcgtttttcacggattcaagccctggaatagttcctagccggattacttctctaatttatataaattttgat

SEQ ID NO: 39202 - DNA, 3007 bp, Zea Mays
gttacgacctcccctccctaaccaaaggcctaggtataaaaaccgaggccctgcaactcttcccccctctatttccctctccgtagccacctcatcgccccaccagttctccatccgtcgccgtaagataggagagagaggaagagagtagtcgcgtccctcgaatcgggcattcgccggtgtggagatccaatgaaaagtgtgggaaggagccttggacacagacgcacgtcttcatcgcataatcgagcttcgagggtaaccggagcaaacagaattgctcaccagtgtggcatctccattgcggatccgccctttgtcgtggccgaagcgcatcacgacacgaatctaggtactaacacccccataccgtttgcgtcgttgtgtactacgagtaggtgttttcaatctagcgaagatggctctggcgcgactgtctgtgggctcgtgggggagcctccgccgttggcgggtgctgcagtcaccggcggtcgtcgggcgatggtggggatgcgatggtcgtcagattttaaacagggagctagaattagagggggataccgtttcgtcctgggcttggttgagtcgtccgatcctgatcggagggggggggggggggaattagatcagccttcataaatgttgggccatccgatccggatcccacggtgggttcaacatacccctttcgtaaaagccacgacctaccgtccagagttgatctagcgacccctacgcaacgataccccttcggctagtcaattttgttagagtccctcgaaaacagagaaatcaaccctccgtctgttgtcagtgcaatttagttgcattcatgccccggacatttatacaacaacccctgatctttaggatattaatgcacacaacccagagaatagataaaattgaataaaacagtatataaaatgatttagagtatagaaataattctagatccttgtttaattcatagttaatttattttaactcctttttggttcattccagttgcattaatctcatattaatattgtttatcatctaataactttattttgttatgagacataaattaaaattttgcacttaatttgttctatatctaacacttaaaccttcggaaaaataataactttataaccgtaactccaaatttagtggttctcaaacctgcgatctcgttacgacatgtagaacattattatgcagttgttattatgttttgtgtgatgttagttttgtctataccatgtttgtttgtattgctatgagtagcaacgaggttacgagaatctgaagaccaagttggtacttaggaatctcgagtctcaggcaagttatgcccttgatcacctttctttatcaaataatgttcatgttaatcattatgacatgctcaggttaatttgatgggacctaataggtttccctagcattgttatcccccaccttgcaaacagatgaactattgggtaaatttgctatttctctacctggttttgggaaattaatgttttattatgatcatgttccaattatgttgttgttttaattactgttcatgataagatcatcatgttaattggaacatggagaaccacccgggaaaacaatgctaccacaatggtggtatgggatgcccttgactgactaattaggaaagctagtgaaaaactaccttacccgaaaggggcaagggcggtagatgagctacgtatagggaggttctcgggtcaatcatgctacgatggtttttcggacgagggattcctatattgtccttctcagaaaccgtagcgaattttctgaagctagtggaactttgtaaaggccttgtagtggtaccctacctcatctcctcagcaaagatgaataggtagtcgtgatcccttggaaaatgggtaacacgatttgtgggtaaagatgtgcaacctctgcagagtgtaaaactggtatatcagccgtgctcacggtcatgagcggctcagacactcacatgattaatttatggaactaactttaatttgtcatatgcattgcattgtgggtgttgttattaatcttgatctcttatttaattgggtgggtatctacttatacgtagtaattgctaataaaattttgaccaactctaaaagcaatgctcagctgtaaccatctcctttggtaagcctcacacttcacatgagctcccacctttggtgtgtttatgcacattattccccataacttgttgagcgatgaacgtatgtgaaatcacccttgctgtactcacatccccccacctaggttaggaataggtactgcaggatgaggcacatgaaggatgctatgacgagttcgtgagtggtctaggccatcgtctccgagccaactatggttgctggattgttgtcttcatatgatttggtgaatttcgcgcctaggctaggtgtgacactctatctcagatgcgagcaaggagcataagcgcgagcctagccatacaacttcggtaggacaactcacaacatcacatctagaaacctccaggcccaactagaagaagagaggagggaacagatggacatggaggcgaggatgagggcggagccggaagcagagcgagtggctcgcttggaggatcaacagagaatggtggagatgttctagtacatgtagagccttggcgccgcacaaggttttgctccaccacctctgttgtttcctccagttgaccctgctcagttccatactcctgacaaccagcagcatcaaacaaccatcatggatcgccagcccatcgccgaaccagtccaaccacccacctcgctgatgatcttatgtttgttggtgttggtaatactttgtgagataacttggtctgaatttattgatgttggtaataatttgtgagatacttgagacctatgtttgtgagtgttggagacttatgtttatgaaacttgtttgatatggtgatatttgtgagatatatggtgttcgtgatacatgtgttgattctgtg

SEQ ID NO: 39203 - DNA, 2567 bp, Zea Mays
actcagtcgctcgctccctcgcttcgatccaccggcggcggctgaggtgctgagcggcgaggcagcgagcgccactgcgacctgcgtgctgctgtgctcctgcgcggctgcgcgccggtggacgaccgggccgtcggcgtggttccggctctccgcgcctgcgcggctgcgtcgcgacgagcagtgcatcggcacagtggcggtgcgccccccgcggcgaggcggcttcacggaccgcggttaccgagcgccgtcgcgccgaacgggcgcgggcggcaggcctcctgccggctgctggcgagcgctgctgcctgctgcaggccagggcgagcgggcgagacgctgagaccgcgtgggccgcgcttccctaagccagagcagccgagctcttcgtcgttcgtgattcgttgggccatcgccagcgacgagctgcaaccagaggtgaactggtgaagtgatgggcacggcgatcgtaagcgacgggggcggtgagggaagcgatggaaagtcggttgacgggtggcaggcagagaaggccgtcgcgggcaaccgtagggcactcgaggcccttcgggagctcgtggcttatcctttcctctacgcccgcgagtcccgtttgctcggcctcaagtggcccagagggttgctgctccatggcccccctggcaccggaaagacaagcctggttcgagctattgttcgagaatgcaacgcgcacctgacaacgatcaacccatattctgtacacaaagcccatgtgggagagggagaaaagttcctgcgtgaagctttttctgaagcatattctcaggctttgcggggtaaaccagctgtgatatttattgacgaacttgatgccatatgtccacgccgcaatagtaggagagagaatgagtcccgcattgttggccaacttcttactctcatggatggaaacaaaaaggcgtcaaagatgcttcctcacatagttgttgttgcatcgactaacagatgccgttgatcctgcattgagaagggcaggacgttttgactcagaggtagaggttgccgttcctacagttgaagaaaggctgctgattcttaagctttataccaaaaacctacatctggatgaaaaagtcgatcttcagactgttgctgcgttctgcaatggctatgttggagctgatttagaagcattgtgtcgagaagctgccaagcttgcatatcatagaatgttaaacttatgtgagggtgacaaagtacttaaactacttatggaagactgggaatgtgctagatctatggtgggaccaagcataacaagaggggtaaccaaagaaatttcaattgtttcgtgggatgatataggaggcttgaaagatctaaagaaagagcttcagaaagttgttgaatggcccatcaagcatgctgctgcattttctagacttggaataccaccagtccggggggtgctgttgcatggcccaccagggtgctccaagactactcttgccaaggctgcagcgcatgctgcccaagcttctttcttttctttgaggttcatcaggaaacaacattttattttacgaaaataacagttcactttccgttgtgtgaagaacatagaacttttagcccacagtatttaaaacagattaacataatttacttatttctgccagttgagttaatatcctgtacccagaagtcagcgaatgcttgaaaataatcaactaaaacatgttcagataaagatactctcatcaacactcactagcttttcacataaattcttataacagtggtgcagatttatattccaagtatgttggagaaggggaagctctgttgcgtagaacatttcagaaagctcgtcttgcttctcccagcattatattttttgatgaggctgatgccattgcccccaagagaactggccctggtgggaattctagtggcaatgccacagtcggagaaagacttttgtcgactttattgaccgaaatggatggtttagaactggctacgggaattatcgtattgggtgctacgaatcgcccaaatgcaattgatgctgctcttttgcgtccagggcgtttcgataaggtgctgtatgtcccgccaccagatgtggaagggcgacacgagatactacgcatccatacacggaaaatgaagttgggagaggatgtagatctttggaaggttgcagagtgtaccgagctattcaccggtgctgatcttgaaggcctttgcagggaagctggaatggcagcattgagggaagatatctcagcaagtttgatacatgacgctcacttccaagccgcacgaagttcattaagcccctctcttacaaaagcagtagttgatgagtactcaaaggtagatataaatgatccatcgagtaggaaacattgatatgttccttttctatttctttgttgcacactaggcgcaatacacatttgcaaccttgccaccaagacacacagatggagatagagagatctttttaagaatattctttttaaaccaatcctcttaccgtcagctctggatgttatttaaaaaaaatgccctca

SEQ ID NO: 39204 - DNA, 854 bp, Zea Mays
cgagaaataggggaaccagagcaaagaagggaccgccgaccgccggatacctgacgctggcgggcggcggcggcggcggcggcgaagacgtccgttgcggctgcgacgaatccaagtaaccggggcccttgccgaactggcaggcgagataggtcccccgattcaagcggagatggttcactgatttcccttccccgccgccaattcgatcgggctcgcggctcgccgtctctgctctccccaaccggcaccaagccagccaatggcgctcgaggaggcacagcggccactgtccgccggcgtggcctggcgcctaaccggaagctggctaggctccgaactggttcgaggcttcaagccgatccgcatctatccaggcagtacattggaggggaaataccagaagcttggagctctgccccgactttcttgatcggcttgccaactggcttgtattcatcaccgaaaaccatttcttgtcttgagtgtattggtaaataatttctgtcaacctcaagattttccttcagaggataagaaggtgaacaagaagctgacagccaagctgaccctatactcaggatgtgttgtgccttctggtggtgaaaccgtctctttaagcaactgaactgctttaagtataacagaagagctcagtgattttccctttagaaaatcctctaccttgctagctctgatggcatggtcagctccataagcaccgaacaccaagcatatatcctccatgatgttcttccctgaagctgcatcagttgaagtccttgccaagagagcagcattgacatatgaagcagcattgccaaatggccgaggcgctgcccggaatgtctcaa

SEQ ID NO: 39205 - DNA, 1335 bp, Zea Mays
ctgttccgcagaatccgagtccaatagctctcctccccagggctttcaacttctccaaaccccatctcgccgccgaggccgagcgagcagagcagaacaccacgtcggcggcttttccctgtctctccgctggatactacacccgccgccgcagcgccgatcctgtccgagtcaagcggagcgggggatcggattggttgcttccttccctccatctcatgttggtgcatctagaggactgccactaagcttttaagttggtatataatgggtggctgttgttgctgttcgtcgagaacatctgaagcagttagagcacgagcaccagttgatatatatcatcaacaaaatcttgaggagcaggagccattgtcttcaatttttgatggatcatctccagcctctgcaattgttgcagtagacacaaatctggatacttccacacctgacacatatcgagcgccgcctgcacccttgccttatgatgttattttggcagtcccaaataaccctggtttggagaagccagacactaagagcaaaactgatgaccaacaagagtccataaatgatcaggagtctttaaaggtggatgagtcatgtaagaaaagtgtcactgaagataaggctgatgaggaggatgtttgccctatctgccttgaagaatatgatgaagaaaatccccgttctataactaaatgcgagcatcatttccatctttgctgcattctcgaatggatggagcgaaaagatacttgcccagtttgtgaccagattactttggtggatgagatgttcgaataggtttggtaaccttggtggatcatcactcgaagctgttcgttactgagaaagtgcagcaactaatttacttttgatattgatccattccgggtggctcgcatggtaatgaattgagggggcaaaaattgaaaggatgaatgtcatgaaatgtatttacaacgcctcctttgtcatgcgttgtgtcatgctatatatatgccggcttgcgggttcattcagttcaaagtccaggactatccttttgcttttctgaattcagagtttcagacatctgctggttcttccaggttccggtcagctgtgtatatcatatattaggtggttgcaggtaaaaatggtctagagggtgggggttgctttgtacaatccacatggtatttaagcttcatgtatataatcttttctgtttctcttcgttttgttctgctgaatacttgcagatccttactgttctgataaaacttactgactcccaaatctgtgccagacaaaacgtgtttcaggaacataatacatctgatagcacttgtt

SEQ ID NO: 39206 - DNA, 1458 bp, Zea Mays
ctaaatttcaaacggaatccccatgacaaacgcaagaaacacgaaagcaagaaccggaaggaacagccacgccaatatacagagcgagccagcacacagtttttttttcatacggctggtctgcaattaggtgcctcgactgcttgctagccgccggattaatctttccctaccctaaggctcaggttttagtgggatatgatgaagctaaaaagtggacgacgaccgttctataaggatgttaagcttgtagactgccgttcaggctcaagtcttccacatttggctgctcaagcaaagtttgcagccatgaacatgaagactgaagatgtcaatcctcgtcgaccagttcaagtcagacgaagtagatgggctcttggtgatgtaaccgaggtgttggatcataattcgtggaggcttgggaagattacagaagtactgaagaatgactattttgtcatcaggctagtgggttgcatccaaccaagagaattccacatatcttgcttgaggattccacatgatcgcaagcagttgactgttggaggcagggatgaagaagcacaggacgcacaagacgcacaatggattacacagtacatattgaagtgtcgaaaatggaaaatgactatttgtattgctgctgcagctatggttccagcaaatcaggttgtgcaacatactggtaggaaagggtacactagtcaaaatgtgttggcaatctgtgacttcaacatgagattcactttcgtcgtcgcgggttggcatggatctgtacatgatatgagagtctttaaagatgcagttgacaaatatggcaacaagtttccccatccaccccaggcaagttttatcttgtggattcgggatatcccaacaggcagggttatctggcgccgtatagaggtacaaagtaccatcttcctgagtttcagcaaggtcctatgccaagaggtaaaaaagaggttttcaattttgcacactcttcgcttaggaatgtgatcgaaagaagctttggagtcttgaagaataagtggcggattttattacatttacctagttatcctatgcctaaacaaagcaagattataattgcgtgcatggcacttcataattttattagagaaaattcaacgacagatgatgattttgatttatgtgatgatgatgagaactatgttcccattacctctgaaggaccatctacgcagggaacaaatgagttgacaaccacaacagttgatgaagacataaatatgaaccattttagagattcgatagctgatgggttgtttgctagacaatagttttttctttaagttgttgtaagagaaatagtttgtttgctgtgctcgacaattggatctgttccaggcaattgtttgttcccattagattgtgatgagaaatcagtttgcgttgtaatacaaactttgattgttgagaaaacaatttgaa

SEQ ID NO: 39207 - DNA, 489 bp, Zea Mays
gacgcgcagatcccccgcgctcgtatcatcatgggcgagccgaaacgggcaagtcaaggccgggaaaacgcccggcgcgccacggctttccgttcccggcggggctctcgggtcgcacacacagtgggggcgacggcgacggcgacgggaacgtgcgtgacaacgtacccccgggccgccgggcgagacggcaaggaggagtcccgtccgcgcgtatatcccgtcacgtcaacatccgccccgcccgtacgcgcgtcgctgcacggccgcttcgctttcgggcgtgcgcgcgcacgcatcggcggcaccggggacacggccgcgaggaaaaatgagcccgatccgatcgagctcgtcgagtcgagtcgacctctgttgccttgcattgtttcgtcgtctgccgcttggcttttcgctaattaaacaacttttctgcctggctaaagaattacggcttttgttaagttgatgcatgcaaagctgccaggt

SEQ ID NO: 39208 - DNA, 1476 bp, Zea Mays
ttacccaactaaataactgaccttattaataactacttcaagttgcaagggatacccacaccttgatgaaaatcattacaaagatccaacttcattacatgttcatcaccacaggcatccaacttatgataagcaaactaactctaactaagactgactagactaagacactgaattaagcattattacagactccaactctgtcgatctatggatccaaatctatctgggtcctgcagtctggggtaccatactcgaagcgaccacggggcggtgaacggtaagggtgctgaatcccgataggggtgggagaaccaccatccagatagtggcgtgccacgcactcagcacgcaattccgcaacctccgcccgaaccttgccaaactcgtcaagggcgtggtccagctcggtgttgagcacgatgaccaggttgaccatgctgtttagcctgggattgccctcaccaatgggtgagacaatcacacccccagtgctgccggtcgaacggcgagggtagtatttcagttcaagggcatcagctaccctgctgaacaacaagcaatactaagaaactgcatgtcgtgctgcatcttgcatggccgcctcagcagcatgcctctcagtgatagaatagtgctctgagaaggcctctacaccgcggagatcatcatcccgaaggcgcaccaagcaagtagcctcccactggtccaggtataacccacgacgatgctggtagactacacaatggtactcgatggaccaagtatgtcggtcgaaagcccgatgtagcaaggtgtcgagagcgtcgtggaagtgacacccgtgagcggcatcgcgagtgatgggtctaccgatccacccctccagctccagctcctccgagagcttcgtgccatggcttgaacagcctccggcgtcgtcgtcgtctccgtctctgttagggtctcctccagcagccgggatgccctatggtggtgcagggggcatctctagctgagatgcagggtaaggcggcctcccagactccacctcctgctgaggcgtgggggaagagttctgctgctcctgctcctggtgtcggtgctcctggtgtcggcgctcctggtcctcgtgcaggcgacgatgcagtctctccaggtgactagactgacctggcaccatgagactgtgacagccctcccaagttatcgggcccacgtgcaccaatccttgccttaatggcctcgggtggctgtgcacgtgtaccaggtaacttaacaaggctatcgagttcaccaactggaactcatcatcccaaggatctcccacataacaggtatattacagtaatcacatttgatacacacacattggagatagagcggaagacttttataaagtacactttacattccagaactcaagttttacaaggtagaaagagatgtatttattacaagtcctgatagtacccaaagtgcataacttattacaat

SEQ ID NO: 39209 - DNA, 435 bp, Zea Mays
taacggagaaaaccgagtaacatggcgaagcctggccacgctactcctcctggtcctctcctgcggaagcaataaccctctcgaccatctatcccggtggcagggatgaaggcccagtcacaccatcaacaaatcatcctaaggagtacctgcaaaaatttgtgccacaagcaaggctgagtatactaatactcagctagacttacccggtgtgaggagtctactcctctacctctagacatgcagctgtttggctgaggggtttggtttgccaaaagcactagctgagtctaaaaacaagttttagcttttccagttttagtatgatcctttttaaactagatgtgagctatgcatacatggtatcaaacattttatcaatcaacatcttttgccagtcacctcatttccacttattactcaatgcagtacaaa

SEQ ID NO: 39210 - DNA, 3925 bp, Zea Mays
gcatggcccccgttatctgactggccggccgctccgattattcggtccgtgcgcgcttctcctcccgctagcgtacgtcctcccccaccccggaccgcctcaacgacggccggccgtgcggaagggagaggcgtggccattgcattgcccctcgtcaataatggcgcggcagatgcacgcgcgcacgcacgtcgccgttgctcccagcgttcagaggtcgttaggttttcatttgtaactccacaccgtgttagggcgatctggaggtgaatcgctgaaaaagtagcagaaacagcagccgcacacaggtgtccgccatgggttcctgtacctccaagtccgcgcttgatcacaggaggccggcgaggtactacaccagggggcggcgagtccacagccgccggtccatcatgccggaggcgccccagtcgcagcagctgggcgatgccagcagaggccgcatgaccggcttctccatgagcgagatcgtgcacgtggagacggccaaccggggcaagtcggagcactccaagacgttccacctcacgcagatggaatggcaccacagccagagggactctaaagggtgcagcaacgaagacgcctggttcgattctgtcagcatcctcgaagatgattctgacgacgaattcaagagcgtcgatggagacagcgacgaagacgaagagcaggcggagaagcagcaatacgcgagcgtgtccagcttcgccgacgcgctctctcgcatcggagacatatgccgcggcgtgcctttacccgacatccttgcgctgaaaggcgacggacgtcggagccagcagagcatgccgtcctccttcggcctcaaggcggtcctcatcaaggacaagagcgacgccgcagacgacgacgacgacgacggcgacggcggtggcggcaaggagacctccacgccgtcccgcctgcgcaagctgctgcagtccatcagcttcaacgagagggtgcagcagctgacgggcggcagccccgcgaagaagaagtccaccgtcattcgcctctcgtacaagacgacgtcgtcgtgcggcggggacgactacgaggacggcggcggcggcggaggcggcgaatgcggtagatctaagaagtacgttgttcgtccgaaggtagggcagacagtcccgtgcggaggagagaggccggcgacgggatgctggtcgcggatggacccgtccctcttcaagctcaggagcgacaccttcctaaaagacaagaagaaatgcgcggctccaaactacgctgcctactatccgataggcgttgacctgtttgcctgccccaagaaggtccatcacatcgcccagcacctggaccttccgcagatcaagacgcaccccaagatcccgtcgctcctcatcgtgaacatccagcgacggggaaggcttgagcctggtcctgtacttcagggtgtccgaatgctacgacaaggaggtttccgaacatttcaaggagtctatgatgaggtttttcgaggacgaaaccgagaaggtgaaagggttcacgtcagaatccactgtgagctacagagatcggctgaagatcatggccggcctggtcaacccggacgacctccagctgggctctacggagagaaagctcgtccaggcgtacaacgagaagccagtcctctcgcggccccagcacagcttctacgagggagaggactaccttgaggtggaccttgacatccaccggttcagctacattgctaggaaggggctggactcgttcagggcacgcctcaagaacggcatcctcgatctggggttaacgatccaggcccagaagcagtcggagctccctgagcaggtcctctgctgcgtcaggctgaacaagatcgatttcactgaccaagaagttccaacaatagtcaccgttgatgacaactgacgcatttgatcaaaatggtcatcacacgtgcgagctattattaactgctgcaaggctagatccatgggattcagaggcgacacaacaactgatgactccacgccttggtttctgcctaatatgttcgccgatctgcctacttttaagcacgggctttttcttgtcttccctgtaactataatataataatgtatattatatacaagacgatacaaccctgcgggtgttggtcatgttcctaacctttttgcacactccacttgctggttgcaatatgcctgcttccagatgcagaaagacattgaacctgacaatattcaaatgcccatgcatcagacggacatgtacatccataataggattttgacagaaattgcggcgggtgcgcctgttgtaagcttttgttccggacattccggtattaaaagcaaaggtaacctgtttccggaaaagcgaaacaaaataaaggatccagacaaatcagtagccatacatacctcgacgagacacagattatcatcagcaactgtacctttatatatcctgtagaaataacatttacgaagaacaggaaggaagccgtgtatctacaaaccatgtctcatttacaggtttttaatcgagtatatacacttgggcaggtgaaagttgtcatctactatagttctccaggggaacgactgttggcatttacaaccaatggccttaatgacaacataatatacgccacgcagccagcagggtgcatagaagaagctgaggatgtgttttgtaagtctgccattctgcgactactggatgctgaactctggaccctgtgtgctacgctggtggaacatgacccattggcattggcagcggcatggctactgttcctggctgctggaacatcatggctgtgcttcccttcgtacgttgttatgatggcatttgggtcttgggatgatctttcaatatgcttcttcacatcgcacccttgatacgtgcatttgtagtaactcctacatagtgcaaacaaggtaggtaggtgaacgatgaacagaaataaaattgtttctccatgcaaattccccaaacaaattatcatcagatagaaccgatgactaaatagatcaatatattatctatacttcatcattttgaattttcactgctattggtcaagccatatattttaattgtgttgtgttatttttaacaagtactctatccattcaaaattataagacgttttgcctttctaggtacattgcttttgctatatatttaggcatacattatagctaagtacatagcaaaaactataaatctacaaaagccgaaacatcttataattttgaatggagtatgtgtaaaggattaaggtaaaatgtacaatgactatattgcccatcaatcattgctatggttaagatgggtggcagtgtaagatgcatttgagttatttgacttatctgctccatttagggaaaacgccaaatggaattatatttggggttggacagagtaaaaaaattcaggtcttccagctagtgtctaccgtctagcgtccacaagtcccatttggcgaacatgcacaaacctcaaaataaagaactcaaaaatgctcaaaaagtaaaagtgataagttagcatacatgtttttttattctttctcttgtttggtatctgtcagagcgtatttgtagttcctaattggtgatgatttgaacatgaaatttgatattttgagcaaagtagttacataagtacatcaacaaatattcttatcagaactgttcatgcacgaggtttgttaagagatctaaatcagcacttttaacaagtcgctgagcccataaacctagtttatcctatccactttttaccaaggaactacagtacaataaaaatgttagactatgtgtgtgagtgtgtgtgggccggcaccactgttgggttgccggccattagggttagggttgagtccctataaatatgtgtaccccatctcctatca

SEQ ID NO: 39211 - DNA, 1215 bp, Zea Mays
tgtcggtcgcctcccctctagtcttctccctcaagcgcccagttcctcgtcctccccatctccttccttgccctctcctggccatggcactagttctcactcgcgcggccagtgaccactgaaacccaccgcccgcatgagcaaagatggcatctgggcgatgggacgaatctcgtgcggcggccatcctcgcgttcacgcctccccggggccatccctctcccttgcggagctccctccacgcgcgccctgcctcccatggcggccgtccggctgctcggtcgccatctccatagccgcgcctacccctctgtttcccatgcgccaccgctccggttccagctcgcccgagctccatgactcctgcgtttcctcagtcgcgcccaacttctcccgtgcgcgcgagctcctctgccggcgcgcccgtctcctatggcgcgttcctccagctccagtgtcgcgcccatcccctgctctccctctagctcgcggagctcccttcgctgcttcctggccgcgtcctctgatccgtcgtccctagcgtcggtcgagtccctccatcgcggcacccctctccctagttgagcttctctctctcccacagctccctgcgcgcgtcctgggttgcgtgcccaggcttctgctcagctgagctttctgctcgccgcgtgccctggcgttcgccatggccaccgcgtcgtggagtcctgtgcgctcggtcctgctcactccctgtgcgcgcgcccagccgaagtcccctgcgtgcagctcacgccctgctcgccactctgcttgtcgagctcgcccgtccacgtcgtgctctgttcccggtgcatggtcgtgcccctctgctcgccacgacgtgtcgaactcctgcaccaagtccttttcccagctcacccggccggattttactgcgcgcgccgttttccccagctcggattccgccagccaccgttgtcctatccgcgtgaacacgcgaccgtggtcgtgttcgtcgagttcgccaacgctctgttgccgattcgactgtcgtcgctgttgggtgcctcactgcgtgcccgccgagtgttgtctgttgtacctcatcactcgtgcttgccgctggctcgcgttaacgatcacgcgcctgctcgttgtcactgcggcgcactcgctcttcgtccatcgaacttcacgtgtgctcgcatttgtcgtcgagctgttgaacccgtc

SEQ ID NO: 39212 - DNA, 2549 bp, Zea Mays
cctttactagcgctcgctgttgctgtgcgctgtgcagggcgcatctatccgcatctccgcccccccccacggtggcatcgcctcgcctcgcgtcggatcaatccatcccctcgccctcgccttctgctcttcctcatcgggggcaggcggagccgcagagggaggagccgccggcgctaggaatccccaatccccaccaccggagcaacaggatggccgatagcggcggaatcagcgccgacaacgccgcggccgctaacgacgacgacgacaccaacacggcgcctttccccgacacggtccaggtcggaggatctcccgagtacaaggtcgagaggaagcttggcaaaggtggcttcggccatgtctttcttggccgacgtctgactgccgcccacgccgcacgctccgcggcgtccgctgcccaagaggttgccatcaagtttgagcacactagcagcaagggctgtacctacggccctccagctgaatggcaaatctacaccgctcttggaggcacacacggcgtgcccaaggtgcattataaaggtcgtcagggtgactactatgtcatgattatggatatgctggggcctagtttgtgggattcatggaattcattaggccaatccatgccatcggaaatggtggcttgcattgccatggagtccatttccatcttggaaagcatgcattctaaaggatatgtgcatggagacgtcaaacctgagaactttcttctggggcagccttcaacgcctcatgaaaagaaactttatcttgtggatcttggattagcaacaaagtggagagatactgctaatgggcagcatgttagttatgatcaacgtcctgatgcctttagaggaacagtcagatatgctagtgtccatgcacatttaggaagaaccgctagcaggagagatgatttggagtcacttgcctataggtgataataaatcatttttggtgtgcaagagaaagatgagtacctcacctgaggccctctgcggcatatgtcctcaacctttcaaggagtttcttgaggccgttgtcaacatgaagtttgatgaagagccaaactattccaagttgatttcattgtttgacagtttaattggaccaatcccttccattagaccaatcaatactgatggagcccaaaaggtagggcagaagcgtgccaggttgcttaatgatgacgacgaccatgtaaaaaagaagattcggctgggtgctcctgcaacacagtggatttcagtatacaattcaaggcaacctatgaagcagaggtaccactataatgtggctgatgcaaggttagcgcaacatgtggagaaaggaaatgaggatggtttgttgataagttcaatatcatcatgcgcaaatctttgggcaatcattatggatgcaggaactggcttctcagctcaagtttatgagctatcttcacactttcttcataaggagtggatcatggaacaatgggataaaagtttctacatcagttctgttgctggctccaacaatggaagttctattgtagtgatgtcaaaaggcacaccatatacacagcaatcttataaagtcagtgattcctttccatttaagtggataaacaagaaatggaaagaaggttttcatgtgactgcaatggcaacatcaggcaatcgatgggctatagtcatgtcccgcagtgctggattttctgagcaggttgtggagttggacttcttgtacccgagcgagggcatccatagacgctgggacaatggcttccgtattactgcaatggctgccacgatggatcagtctgcgctgatcctaagcaagccaaggcgtcgcccaagagacgagacacaagagactctgcggactacacagtttcccagtcaacatgtcaaggacaagtgggccaagaatctctaccttgctgggatatgctatgggcgaaccgtggcctaacatcgtccgttgctgacctagctgttgtttgatgtatattttgagttttttatcagctgctaccagcatgagccacaaggcatttgccttgtcgtaacccatggaaattggaaaggggatgaattccgatgtatgtgcccgaacttgattctagggttggtctcgtaagttaatcgggaaaggcgggtgcagacactactgatgagccgtaacgtacccgtcagatcccccagatacaataaaacgagtctgtaatgtggcttttgcatcgtattttctgcatcgtgttaaggagaattctgtttttttattcagtgaattgtgaagagtggaaaatatagagcaacaaatagtaagttaaatagtatttcagctacctgcagagcatcatctagctggaccatttccttctcttccagcagcccagtcttgtggaggtttggaatgcaatcgctcaagtatgtcagcacagaatatgtgacttgtgtctttagcgctcgtagcacctgaaattttggtttgagtaattactctatccaatttgatgtgatgtgatgtattatgagtctattacttaaatatgg

SEQ ID NO: 39213 - DNA, 2402 bp, Zea Mays
ccagattgcttggatcagccagtatagagggaacaggcgaatagcagagaagccaccatgtcatcagaggaagtggcaaagatggaggcggaaatggcacaaatgaggcgctgcagtagcccaggccaaggtggtgtgcctgtgacggtggtgtactacctgtgccgcagcggacggcacctggagcacccacacatgttggagatgcacctcgcctctccaaatcaagccctctacctcagagatgtgatctgtcgcctagacgaactgcgagggaagggcatggccaccatgtattcctggtcctgcaaaaggaggtacaagaccagattcgtgtggcatgatgtgatggaggatgatatgctgctccccgcccaggaaagcgagtatgttctcaagggatccctcttgcccctccgccactcaacaccacctatagttggagctgcaccaccaacaaaagatcatgaccagctgaatattgatacaaccattattccaaaggccccatgtgtcaaggcaaatccacatgaagagtcaccaactcattcgcaaaaaggctggactactaattcatcatcatctcctccaatggttgaggatgaagaaccaccacctgtagctctgcaccaagggtcacagccagcactatcatcaatatcaccatcatcttgttgcaccactggggatggagatgatgagacagcatcaccacatccaagctgttcaggcagaccctcctcccctaataagtcaacaacaaaaggatcctcaggtggcacactctatcccactccatctagccttgcgcttcacagcaagcagatgatgccagggtgctgctatgtcatcgcagcagcacaagacttggcgacacagacccaaggaatatcaacagggaaagagattcacaaggacactagttgcagtactgatagcacaccggccaaggcaaccatacctaccaacaacaagcagcgggacaatgcaggatatttctatagcagaagtggtaggagtgggactttggagtccttgataagggctgaggctcatggcagaagggtcgccactgctaagaggacccaagaagaggacgacgacaaagaagcagtgcagtcatttgccacaaagctgaaccctgccaacctgctgatgagacttgtggcttgtgggtcgaccatgtcagcaaggcagcatctccctgcctgcagtctcatgcgaacagcacacaagccccggtatttgacccaacatgttgagttcctgccttcatctccagtcttgtctccccttggcacgctcatcatgcgtcctagaagtgctgatgaagccagaggagcttcagactcaggggactgcaaccattgcagagggaaactgcttcaaactacagagaataggtgtgagtcaggaaaagtgatgtccaccattgttaggccctcctcacattgtgaccataacagtgtttctgagaaagaagtccccatagcaaatttggataatttggaggacggaagtaaacttatctcacaaaaaatcagaatggcaccatgtcagcaacacacaagtgggacatttgtaaccacagatgtaggtggcgaacaaaaatccaatacattgtcaagaagtacgagcaaaaagatgatcaatccatcatcacgaccttcaagagtatcattccacgacgaaagggagaaagtgatcaagattgaagaaaggcttgcgtctagagctcgtgtcataatccagtgtgcaccattaatcacagaaacttatatcagtgccaaatcagtgtaacagaggcagtatcctcatgtctttcccctctatttttttccttatttatagttcagcagttgttagaacttagaggtgtgcaattgtattggatttctggtcaaggtaataatcagatgtcaatttatgtgcctttagaggaattaccagtgtcgtcaatgcctattgtcatgaaaatactgcgtcctgaaatcaggaaaattgtttacactagcactgacactgcagcagtaattgcagtgtttcagttttctcttcattctcctgctcttgttagcctttcctcttccaataataccttaaagcaaaagagtcacaagctatcattattgtcagcgcctgtgcagaacagcctgacataaacgtccattactgaggaacttcatgcctgaatattattactacactctacttttttgccagaaacaggattgagtatcttgccaacaccaataaagctgtgtggggcagaaaatttcctcccaaggttgtactgtacagaagcataaatttgcacacaatttggttgcactgctgttacatttgagtcatggctactattgtacaggctacagtccattgatattacaaattactagtag

SEQ ID NO: 39214 - DNA, 1234 bp, Zea Mays
ggctttatcctagaaatccaatgtccggccacaacacgctgcgagtgtctcggtagcttcttccccattcacattcggccattctccaccgtccaaccaaccaccggcggcggcacaagggaagcgaagaggaatcaacgcgatgtctgcgaccacggcggcggtgcccttctggcgggcggccgggatgacctacatcggctactccaacatctgcgctgcgctggtacggaactgcctcaaggagcccttcaagtccgaggccgcgtcccgcgagaaggtccatttctccatctccaagtggacggatggcaaacaggagaagcccagtgagtaatctgcccgctccttcacccatgcgttcatgtccgccgtccttgaaagattcgacgcgatctgcctggatgttatgtggtacggtctaaggtaggatcctagggtttgcgatttagttcttaataaagccgagcatggatatagatctaggttgatctagtggttcactgacggtgtcctgacttctgatgatgatttgtgtcattttgtttcgcgtgctggtggcgtttgcatttcacggccaatcgtagctgctgatggcgtaaatctgatctggtgtggtgattgatcgagttggtaaaaaatgtgaagggtacaaggtaaatgattgattggggatgtcaccatagtcaacggtcagtactcatgctgtggccaacagatcgtgcattttgcactgcagaatactctgtttacagagtggagtttgtaatgggagataggatgggtaaggctgctagagataaccttaagaatcacattttcaggatttgtgcaagtgagtatgaacctgaattgtgttcagtttgcatagcttttagatatttcttcaacgctaacttggttctctctgcagctgtccgcacagaatccgatgaataaagctctggtgccatagtggcatagtccttgctacagatgatttgaagtgttgttgcaagtttccggaacatgctatttagctggcttgattttatagtcaatgctgaataataaatactttttacgacaattgtctttttcgttgctaattgcactcgccctacctgaatcagtcatgtgaacatcatggaatgcttcagttttgtacaaactaaatttgttgtgctgtccgacagattctatgtctggtccttaaaaataaaggaataatgaatgtagtgtttttgaaggcccc

SEQ ID NO: 39215 - DNA, 699 bp, Zea Mays
ctcatgtattctgttctgacaaatggacatatcgtcgcgtcacaatgagatggcatttttttttcttcttccgtcgtcgatgaatcaagtttggataattggattcgtggcgtaaccaatcccaataaagaattgcttcgtccagttcttcaacctaggtgacactgacacaaggcatggtcgggaattgatcgaggtttctgcacctgcagggctgcagcccacttgtccactccaatacaagagccgggacggcggggcgggcggatcggccatggcgcctccgaggcaaggggaggagcatgcgggcgccggcgccggcgctgcgggccccggcacacgtgatggcgcggatgttctcgcagctcgactgcgttgacctcggaagctgttccctcgtctgcaaggtaccctcagtgcagattagcctgcaggaggccatctcttatctgcgccgagacatccttgacagctccaggaccgtgggggatgaacaccgaagaggacttggaggaggccccaatctccctcatggtgtcaaagtactgggtgaccaggaccatgtccatgatgtccttggcagtggtgcctggaacgttctctgagaaggcgagcacactgtccctcagcccatccacaatggcctggcgctgccttgcaatacccacgccagccagcggacatccagctggcgcacac

SEQ ID NO: 39216 - DNA, 1012 bp, Zea Mays
gatagttcattagcctcctgccactttgtgccccccacgccatgatagtgcagggccacttaatcttgatgtcaatgacaagatgattacaggtgatcaacatgctattgggaaggaaacaacacgtcgtttgggaatgagtactaaatgtacccttcctcttctttactctgaacaaaataaggatgagtcacttgcttccttgccaattgatgaattgaccgagaaggctgatggcttatctagagtctttccagaacacagtgtaattaatagagttgtgttgacgggtcgagcaattttccaaaagatgaaggattacacacttggttttatgcttcttgcactgatatggaagtttgacttcccaccatttatggtacagatcattgccatcctcaatgatggttctattttgtcaccgaaggttcagtctttcctaagttcctgatgcactaggaaactgttctatgtccaaagccttgagaagactgtccaggatgattttcagaagctttcttccctgtaccttcaagtcagcacaatcagtcaggcccttaactctatgacgcggtctcgaaacctcgcaggctcgtagctggtcatttgtgtaccgtcctaggttcttgctgacctttgccttcttggtggcgcagctgctgagtgatctgagtctagtcccataccttactgtcgtatgtggtctttcctcatctcctcacattttgtggtgtttgcattaaccttaatctgtttttgtgatcttggggatttcgggttttagattggcgattggtcagtggtgtgctgtgtgcatggtgcatttgagctctctatgcatcagattgagcttttatatacaagtcatgatttgtgttttaggcttaaccctatgggataaagctaacgaagaatcactgctaaaatatgtttccattattgattgtagcatgattgtgtttaagaaatatgttcaaacttttgtgtcttcattatcaaatattttctcata

SEQ ID NO: 39217 - DNA, 857 bp, Zea Mays
agaaataagaaggatgacttgcttcgagcagctccattaagcgcatgccatagcgtacgccgagggcgataaataatatggtgcaaaatccagcattaatgtttgggagcccaagattcagcaggctaacaaatttggcttgtcctagctctggatctttgggggttcatttaaggaggatgtcaacagtatagaggctggttgatagaaatagaataatgcgtaccaggccacagggtgctagatgttgtgctctggttttattcagataaacaccaagatggctatcgcgactagcattctcaacatctcaaactacgcaggctcccaatgtgatatcagcatcttgatctagaagggcagcggatttctcgagggactacgacgggatgcctctagatgtacaaccccgactcccacttcttcctcttcctcatgtactggaccgattgcagcctagctggcgcgcttgggctactcaagatcctaatctacaaggtttatgtagatgggagtaccaccgtgacttgggagctaacttggataatgatctcttagttctcaagatcagttccaataacatgtggcactactccagtgatatgaccctccttattataactgccaacatataagttacctttcttacaatatattttagtccgctacagcgcccgatagggtgctattttttctagtttaattaaggctcccttggaacaatggatataaaagtactgtgtccatcctatgatataaggcactgtaaccaatttttagttttgttccatgatataagggcatgtacaagctagatgttataatggtgtttgggatagctccaggttctagctcca

SEQ ID NO: 39218 - DNA, 300 bp, Zea Mays
ctaaaatttaaaatgtacacagtataatgtaaaaggggctcctatactgtagcgatttagttcaatccctcctaaatttttttctggcgccatccctgcttttggttgttctatgaaggatcttcaatcttgaaacgagacggtcaggtgcaatagcttcaggcccctttacccgttgcgccttcctgctgttgatgctcttcatgactctatctccacacccctatggcaccgccatcttggacatcctggcctgacgcctctacagtcttatacatgcttccttaattcctatttgta

SEQ ID NO: 39219 - DNA, 3754 bp, Zea Mays
gctaggccttacatctctagccacacccacacctgtacctgtttgctgctgttttttctcccacgcgatccaaccgtttgtttacgccgggctaggtttctcgaccgtacggggacaggacatcagtgcaactgtgcaagcgaccgccaccgcattacccggaactgcccagatcttcgtcgaatcgtcgggccctttgctggcgacgagcaaccacagcttgcaatggcacaatagtgacatcttgggaaacaatgaaacgttttgtctatatcaatgatgattcgtgccggtattcctactgtgacaaccggatatccaataccaagtatactctgtggaattttctcccgaaaaatttatgggagcaattcaggcgtttcatgaatcagtattttctactaatagcctgccttcagttgtggtcccgtatcacccctgtcagccctgcaactacatggggtccacttatcatcatcttcattgtttctgcttcaaaagaggcttgggatgattacaataggtatctttctgacaagaaagcaaatgagaggaaaatatggttggtaaaggatggcgtccgcatacagatcaaagcacaggaggtacatgttggagatttagtgtggctccatgagaatgatgagataccatgtgatcttgttctcattggcacttctgatcgacaaggcatttgttatgttgagactgctgctttggatggtgaaactgacttgaaaacaagaaccattcctccaatttctgctaacttgtcagtagagcagctaggaaaagtcaagggtgtaattgagtgccccaacccagacaatgacatacggaggtttgatgctaacatgcgcttgttcctccctataattgacaatgaaaaaagtcctttgactatcaacaatacacttcttcagtcatgttaccttcgatacactgaatgggcttgtggagttgcagtttacacaggcaatgaaacaaaatctggaataagtaggggagctgcggagcccaagttcactgctgctgatgtaataatagacaagctcactattgcaatattcatgttccaagttgttgttgtacttgttctgggttattttgggaatacttggaaggacactcaggggcttaagcaatggtatcttatgtatcctatggaggtagagggcccatggtatgatttcttgattatcccgttacgctttgagctgttgtgctccataatgattccaatctccataaaggttactcttgatttggctaaaggtttgtatgcaaagtttattgactgggatgagcaaatgtttgattgggaaacaaatacacctgctcattcagctaacacagctattagcgaggacctcggacagattgaatatattttgagtgacaaaactgggacactcacagagaataaaatgatcttcaaacaatgctgcataagtgatactttgtatggaaatgacaacggagatgcattaaacgaagcaaagctgtttttcgtccactgacaattctctcaacttagatgtcagacttgtaaatgcggtctcaagtaatgatcctgatgtcatcaaatttctgttggttatggctctttgcaatacagtggtccctatcaaaagcaatgatggtactgtgtcatacaaagcacaatcccaagatgaggaagctttagttaacgctgcagcaaagctgaatatgatgctcatcagtaaagacaccattacagctgagatttgtttcaatgggtctaagttttggtatgagttgttggacattttggaattcacttctgatcgcaaaagaatgtctgtagtggtaaaggaaggggagactggtaagatccttcttttatcaaaaggtgctgatgaagctctcctgcctcgtgcctgtccaggacaacaaatacagagatatcttgaagcagtagaaatgtattctcagttgggattgcgaaccttatgtttggggtggcgtgatttaaaagaaaatgaatataaggaatggtccaaaaactttcaaaaggctagctgctcattggacaatagagagtttaaaattgctgaagtttgtaatagcttagagcaagaccttcaaattcttggtgttactgctatagaggatcgtcttcaggatggtgttcctgaaaccattaaattgttgaggaatgctggaattaatgtgtggatgctaaccggtgataagcaaaatacagcaattcagattggacttctctgtaacctcataacttctgggcccaatagtcaattgttatctatcagtgggaaaactgaagaggacgtgctaagaagcctagagagggcattatttattatgaaaaatacatctgaaacaaagggtcttgcatttgttttggatggttgggcacttgaattaattttgaagcattccaaggagtcttttactaggttggcgatgctgtcaaaaacagcaatatgctgtcgaatgacacctttgcagaaagcacagcttgttgctatcctaaaatccgttggctacctaactctagcaattggtgatggtggtaatgatgttagaatgattcaagaggctaacattggagtagggattagtggtagggaaggactgcaagctgcaagagctgctgattatagcattgggaagttcaagtttcttaagagattgatacttattcatgggcgttattcatacaatcgaacagcatttatttcacagtactccttctacaagtcacttcttatgtgctttattcagattctgtttgcctttttgtcggggctatctgggactagcttattcaactcaattagcttgatggcttataacgttttctatacaagtttacccgtcatgactataatctttgacaaggatatctctgaaacaacggttatgcagtacccccagattttactgcattctcaagctgggaggcttttaaatctcactacattttgcggatggtttgggcgctcgctatatcacgcactcgtcgttttcttcattacgatatgcgcctactcagatgagaaaagtgagatgcaggaactgtcaatggtagcactgtccggttgcatttggttacaggcttttgttgtgacaatggatacaaactcattcacttgcccgcaaatccttctcatctggggaaactttgtggccttctacatgatcaacttaatactcagtaccgtcccaagtctccaactgtacacaatcacgttccgcctgtgtagccaaccttcctactggatctccatggctctgacggttgcagtaggaatgggaccggtggtggctttcaggtacttgaagaacctgtatcagcctagcgccgttaacatactccagcaggtcgagcagcgcaatggatctatcagaacttctgggaatctggagtcggcgggagccaatctcactaatctactgactggctcacgtaaaaacagggattctaattatcgccctctgctttcagagtctgcggagtctgtaagtgcaagcggcagctaagaattgtctaggctttccgtactagcatgacagtcatacactcatacagacggcagaacagtgaactgtaacagaatcatgcttgtactaaaaaatatttcgtcggggtcaaagccaataattgttttgttggcctaaatttgatcatttttctcagtctgcgctgtggcaccgtctgtgctgtccgctgtcgcacgtagggatggtaataggatctaaattttac

SEQ ID NO: 39220 - DNA, 2854 bp, Zea Mays
tctagtatcaatcaaaatattcgggaaggattgcttgaagtattctatggagtttatgaaaaggatcctgacaaagtgcttcaagcaatggttcaaatgggtgtccttgttcctactggagatatgactgttgtcagaagaaccgctcaatttttccttaatagctttcaagagtgcctaacagcacaaaggaaggagagagaaatggcaaccgcagaactgggtttcaaaaagcaattaactaaggaggagaagtttgaaaagaggaagcagagacttgctgcaatcggagaggatcttttggcgattgctgctgatcaaccatttcgcttccctgccacatttacatttgtggtcagagcattctcagatggtactgggaaaggccttgatcctaggtttcatattacagagattgctaagccaaatgccaaggaattgctaagatttaatgacgctggtgttgaaatagttgtgaaggcaagtttcaacatttggtgtgtggagagacatgtgtattcctcctatgacgaattccttaggctccatgaagtgtatcaatttgtcttagtatttttattcgtggggatgcctgactcaaatgaactcatgttcaacactgagcaacctacttataattttggagcctataaaatttctaagctaaaaaaggtaataaaaaggaatgatattatagtcacatcatctgaacaacagtgaagggaagggagggatagatggtctgaatgcctataaatgtcgttcccttggtctgcttcttaaatttgaaaccaagatactatagtcaaatacttctaaacttgaagcctgtaaattggaatcaccaagttaaataagaacaggggtaactattcatagctcagatggttgtcatccaatacgtgcgctaaggcacagacaggtgaggttgcatattcaatccccaagacagtaaaccattgaggcatattaaaacacattttccatgaggtttcctaagtgatcctttaggtaaacagaaccatacctagctccatatgaaactatttcccgatttgaagtacacctaagttaaggttcatacattggagctctggcagtaaaacaatagtccttaccttgagacagcttagattagaatgaggtggatggtaatatggcatgagcaacataccacagttcatgcatggaggaaatcatttttactttctttcctagccatggtagttgtgttgctccttaccaaggcactacatggagcatcatatggttcatgatgtaaacatggttttagatctgtctatactcacactcaagaaccagccaaaatgtgatattccacaacctgagagaaatcaaaatgaaatcatgtacaacatagtacatatgatgatgtgcggtgatgcgggtgcatgtgtgttgtgtgtgtaggagaggagggcgcagcttgattcaatccatgtcaagtcagaggctgctgcgaggtttgcacatgcaagtagaatttagatggcatctaactgaataaatgatctccattatggactggttatattattttctgtgcgatcggatgggttaaagaaaagacgtgaaatggtattttccagtatggactgtataaatgtaattatattcctatgctggtcctgcttcgctttcatgtggatttatcttgcaaatggtatgtggatccgttccagaggcaatgagccttgcagccagtttgcagtataaaaaacccaattatgtccactgttggttcgacgcagcgtgtgccgaggatttctactgccaagcataagaaagtatttgaaatcaagaacttgcattcattcaatcataatgtgtttcctatcaagcataagtgtgtgtgttttgtttgatatctgctttaataggagattgttcttgtcaccccaaaaatgttcccattctactttcgggcaggtgaattgcagataaatggtctgttcgcaactggtgctctcgggcgactccatcactgagcaacccttcgccccggtggctgcggtgtcgcactggctgacacctgctcgcagttgcattacaagttttactgactatgtattttcaggtttattcaatttcagttgtaatgcttctgacagcagttgtatcagtcctcttgttcagcttccataataatgtactaaacttcagtttggtgtctatctcagtgtacctacactcagttggaaaacttcaaccacactgcaacaaggtttataaaaggtactgttactattgttaaaattagtcattttagctatccgcttctatttcaccgtgcttgcaggtttgctatgaggaaaaacaaatttatgggctcaaacaaagtgtgatagtgaaagtcattttgcttccagcttaagaaccaagccaagaaaacagatatcaactgtgacgccacactcaaaagcttgtttggtgagagggataaggttgggatgctggagatctctaagcttttgagccgtggcttcccgaaaatctccaagcttttgtggtccatggagccagggatggctctttggtaaaagacttcgttgtggatggcctcttttatggtccatgttaagtcccaagtcccactaggtggttaagcagaaaaatcttgtgatggcattaagactttcagactttgtttttgggtctgatgcatgtaaaaaggattcccagtgtttctgttgctcttgcgatcctgtgaggacacatatgagagaaatatttagtttgttgatggcaaatcttgtcttatgttcatgcctgtacctatctgatcaagcgttatgatatgatcccatgcgtggtactgtgttctttagagatg

SEQ ID NO: 39221 - DNA, 2472 bp, Zea Mays
atcagcttttatactcattccttcaccctctcccatctctcgcctcgcctccccacgcgagcgagcccaacacgcaaacggaacgcttccgcgcccctccgccttatccgatggcgtccctcaccaccaccgcccccgcggcttcgtccatatctccccacgccggatcgaagcggccgctcctcgcgggcgacgacgcgccctggcgggccaccgcggccacctccgcggggcaggggatccgacccgtcccgcgcatcaaccacgcctccgtcctccgcgtttccacgcaggaagactccgccgcctacgccctcgccatcatgaagcatccggatccgattggcgaggggctggctatggaggcgttcgcggaggcagccgggccggagtgcatcgtgcccggacagcaagcgcctctaaggcttatggggctcaaggtctggcccgttgatatagatatgaagttcctagagccatttggacgggaactacattcaatgaaaaaagtgagtctttagcattagacttgtttacatgttttcccttgatgaatcgctgtttgtttgagttatgaaacgctcagttataaactagttagaaataatatgtgctaggtcacgatataaccttgtatggttttagcaatcatcaggtgggacatctgttcagtgttttcctgtaatttacatgattcatggatgtgtagccattgacagacttgtttgcactaagttgagagagataagtaggatatgcagttatcaatgtattaatacaccattatgtcatgataaacacgagaaaaaaaaaactcggccggggagggaaagaccgccctcccggtattatattaagaagagaccgaaacatggtcccggccgagaaaatccccgaaccctggccccccatcactagcgggccgtcaccgcccactctgcaacggcccagccggagggtggcgcgcaggacgtaacccgggagcgggtggggcacaacgaggggatttttttaaccaagccagaaattcgcccccgagggggatcgaacccaggacctggaggtgctactcggaagccttaaccattacgctagaggccctttcgcataaacacgagaaacacagtaagcatcatactcttcctttatagtgcaaacttgctaagtgcagccatatgtaaattggttatgtccctcttgcctaatatttgagggcaaatatagtggttctaatggtatagggaatttgtccactattgacttattgagcatggtttgaaagctctacttatatagtccagcaaacttttatctgagtagtttgaagaaatcaagaggataattacttttctgtttaagatttcttactcaagacatagatcctagttcactggattcatttctgaaatgaatgtagttttagatgagactctcacttgtgtaaggccagggtagtgctagagcagtggtatgtgctgtccatttatctttgttggaagagacatcatataggacctggtcttgtacatgtaaccatgattccacacttttgtgtcaggcaggcaatgaagtagccattatgccagttcatgtcctcttagtagttagtggtgttggagaggggatttgctgttgttgggttcatggtcttcgtcttgttgactgtttagaccctgctctgtatcctcttagcttttggggagtatgtgcagatgcgcgagctgtttttgctaatcaattgtgcaataatcaaattgcttagatcatatgtgttcttatgctctgctcaaaaagagacctaagcgggagatagttgtattgttagaatgttagttactctgtgctgttgcgaagacgagaatctttgattcttgtcctcaatattgccttccttataaagttacttcatatatcatgctccctattctaatattattattctgcaattttgcagttcatggacaaatcgtgcagtgttatggactcatctatggcaaacaagtaggcacatggcacatcagttccgcccaatacagctgttgttgtatccacctgcttcctgaagttacaagacctgaaaaatagaagagacattggagagaagccacattcttttgcgtatcttgctcaccgtcacctgacgaacaaaatatgacatcgggagtgcagtaacgattagtgagtggtcctgtattgagcctgggtgcagcctctgccagtataagtgctctacgtgttatacatttttttatgtccatgaaacattgatccactgagaaaatatatcttcaggtgccaatctacgacaataccttctgttctgttgctagatcaaatttatttgttctcaggctcagggcacatgcgatggtgaagtcagaattcttgagttagcctttgtgaggcgtgttggttcttcggaagagttgagcttctttgtctccgtgttttcctgtaatttccagttaaatg

SEQ ID NO: 39222 - DNA, 1104 bp, Zea Mays
acataatctatttaaagatagtggacatcttcagtagcagctgccgtggccaccataagaatcctccttcagagccatatgtccttgagtggaggctgtgtgcaaggcgtgacagcgtgtcgtggtcaaggaccctaagctctagcgccaaattcatatcacatttgttctagaatgagatcatgaatggtccctggggttggcctggttcacgctccattctcagtgcgttttccgacatcgttcttcaagcaagcatgcgagctggctcctattttcactgagcttgtggattgtgtgagcttagatggggagtccttgcaagctgctttgtctagaacaaagcaggttcatgaatttaccgcaaggctgctagatattcatgataagatgatgttgataaataataaagaggtggttggcaatgcagtgatgctcggtgaaatcataaactacgtgcagtccctacaatgacaagttgagtttatgtccatgaaactggccaccgtgaatccccaggtggacttaaatagcctgcctaacgtcctccctaaagatgtacatcagtcttgtggtccgccacatttctcgctggagacctcagacgcttcgttgtcgtacctcagccagcctcaccatggaagccctcttggctgcatggacaaccagagttgtatgcatccacttgacacgacgttttgcctggcgataaatccgcagtatcatttcctcaacggtgttagcgatgcatcgtctcagttgcagctaatttgatgcttgtgtttatggaaaccaagaggtggcgctgatccattggaaacctggttgtgtatgaatgggtttccagctacttctattcttggagatagaaaccaacatgtttggtttttgtttttattcgctttagaacaactcatttttgtacgaaaagaggcatttagctataattgtttgttgtagtatgtttaccgcaggatagccgttccatgaaatacataaaaacctgatactgttgttatatttggtttagtcatgctcttatggaacctttaatgaggatttttctatatcaagatatcatcgtcatcgtcattattattgcat

SEQ ID NO: 39223 - DNA, 1007 bp, Zea Mays
tgcaaggtttcgctaaactacagacacaaagtttccagccaatctctatctcgcctttcctctctccctgataccttcctcacccgtcacgcgcgcacgaacgctcgccgccgccatcaacctcctcggcggtgcgggcatcaccaccatcgtcaacctggcggaggaggccaagctcgcatgcgagggggtcaaggcgcctgctacattgtgaggaagtcgtgtgacagcgtgcctatcggagacaaggctggacaacgaggaagacgttggtggggaagtggagaaccaagctctgtttgttgccttgccttctcttctctggttctccgtttgcacgcacgctcattctcgtggcacaactcggcgagccccgccgcctcctctctacgacatgtgcccagatctaccttcgccagttccttcaccagcgatgagcaccaacccggtatgtgcactcctcttcccttcgcgttgaatctgggtcctgccctccatctctgtccctaggtcaaatcaaatcgaccccatctatctcaattactgccatcgagagagagagagagagagccccaccgtcgagtggcaccgcctccaaaccctagccccttctttgcgcatggctatcgttgtcactgtcgggcccccaagacgcccgcctcctatgcagcacgcgccatgccgctctcctctataggtgagatggtatcgtccttgttcgctagggagtagctggaatgcacttagatttgggtctggaatatggctaccgattcctggatctggcttgtgttacagattgtgagcatgcggtagtaactgactgaacaagaaaaacacatgtattcagttgcagttggtttctcaagccattctctttcaaatggcactcatgtaacaaaacaactatgatgactttgttattgatggctatatctgtttttccttattactaattagggtcattgtccagttacgtagagatgaaagggcacctgaagttttag

SEQ ID NO: 39224 - DNA, 2320 bp, Zea Mays
cgacaaccaggcgtgggccgtgggcgcgtcgccgggcacggccaggtcgcctccgcagcaagccaagccaagccagcccaaccaaaacccgacggacggacacgcacggacataccagaacaaggcaagcgaacacatttctttcctttctatctccccccaccgctctcgctctcctcctcgctctagccgcgaccacgcgacgccgtgggcacacgcacaagcacacggacccccctcccccctacccgctgcctccgccgcggctcgccggagatggatggctccggcagctgggacgctatagactggaaccaaatcgaggatccgaggccgcggaggtcgggccaggccgtcaaggagagcatggacgacttcttgctcgaggacgaggaggtgctcgcgcagggccatggagttgttctactaaacaaccgtgatgctggtacactttcagttacaaatttccgtcttctctttgtgagccaagcaaaaaaatgtgtcatagagctgggtaccattccactgacgacaattgagaagctaaatgacgatgtgaaactccaacccttgccccacctctctgataagaaccacccccgtgaacttcttcaagtaattggcaaagacatgagaatcattgtgtttgcttttatccccagaacacagcagaaaaatgaagtgtttgatgctttgaggagatacactaaacctgctaatttgtgggatctatatgcattttcttgtgatccatccaccattaagcatgattctgagccaaagtggcgtctcttgagggaatactttcgtctttttaggagaagtttaccgctacagggagtcgaggaagtttctttgtgtaatgaatggtggaggctaactagagttaattctagttattcattgtgttcaacttacccctctgaactcattgtaccaagaagcataagtgatgaagatttatttcaagcctccccatttcgatcaggcaagcgcttgcctgttatttcatggtgtgaccctgggtctggagctgttctggcaaggtcatctcagccgatggtggggttgatgatgaactttagaaacaatgcggatgagaagcttgtctgtgctctcagcagcagaaccatcgatgagaaaggatctccaaggaaattgtacataattgatgcccggccaagagcaaatgctatagcaaatggggcaaagggagggggctcagaatcatcttctaactaccataaatctgaggttctgtttttaggaatacaaaacatccacaccatgagagagagtctttctcgccttagggactatgtggatgctcatggctcaatttcatcaaatgggagcccttcagctgtatctgttgttggagatcggaggaaccgtggatcaacctggggtggaggcaatctaaatagcatgacatcattttcttcaacactgggggaatggctaaaccatatccagaatattctggttggtgcttcatggattgctgcacaaatttcagaagaagcagcgtcagttcttgtacattgcagtgatggatgggaccgcacaacccagttggtttcacttgcttgtttattgcttgatccctattatcgaactttcagtggattccaggctcttgttgaaaaggattggttagcatttggtcatccatttgcagagagaatgggagttccaacagtagctgagaatggggggtcacagtatgagctactaaggcaaccttcgctcggaaatttaagcagttccccgagtaggaacactttagggccgccagggccatcctctaattctccagtgcaatcccagacatcaaacaacacttcaccaatattgttacagtggcttgattgtatctcacagttgttacgtctgtacccatctgcatttcagttttcatctaaattcctagttgattttatggattgtgtgctatcgtgtcgctttgggaacttcttgtgcaatagtgaacgagaaagggagcaatctggtgtcacaatctcctgtcgttgcatgtggtcacatttggctaatctgagagcttctggcggcagcttccatgagcactataatccattctatgacccagtaaatcataatggtgcactattgccccctgctgcagcacttgccccaacactctggccccagttttttttgaggtggacatgccccattgagtcacaaggtggtgatcttgaatcccagtggcatgctatgaataaaaaatatgcagatacaatgaaggtgtcgcatacttcaaattgttactgaatgtgaagataatttacaattagcg

SEQ ID NO: 39225 - DNA, 278 bp, Zea Mays
cttacccttcattcatagacctgagacaaactagggggtgcgagcgccgctttgtcaccataggagagaaaagagagccaccgcaattggggagcgcctacaccatccttgtgtctcgaaaaatcgaccagtggtgtttgcgggtgcgtgcagggtgtgttcgtggcgttgccgtggtcagtgtacatctgtggcgacgggaatttcacgccggaagacaggaaattgccaccgagccacatccctcgtcgccagggctctgtgtggctcgatagccg

SEQ ID NO: 39226 - DNA, 1647 bp, Zea Mays
agtaatgtggagtgtccttttgctccacaaaatgaaatgcattccttcagttgaatattttactgtttcgtcgttcccatagagtacttgcagacagcagagggttttttctggacaacaacagcagagggataaatgcgtttgatcaaacaccaccagaagaatggtttcaaatgaatgctgttcttcgtgtaagcctggggaacttcttgttctttgcaatattttctctcgtgatgattggtgtgaaagaccagaatgaccggcgagatgcctggcaccatggtggctggattgcaaagattgctgtatgggctgttctcattgttcttatgttctgtgtgccgaacattgtcattactatttacgaggtactttcgaagtttggatctggcttctttcttctagtacaggttgtgatgcttttagacttcacaaataattggaatgactcatgggttgagaaagaagagcggaaatgggaaatagctttgctggtagtgactgtggtttgctatctttctacattggccttctctggtgtgctcttcatgtggtttaatccatccggtcatgactgtggtctcaatgtgttctttatcgtcatgacactcatccttgcttttgcgtttgcaatagttgctttacatcctcaggtccatggaagcgttatgcctgcttctgtcatttctgtttactgcgcatacctgtgctacacgagtctctcgagtgaaccggatgactatgagtgcaatgggcttcacaggcattctaagcaggtttcaatgagtgctcttatactcgggatgctcactacggtgctctctgttgtgtactcagcagtccgtgctggatcctcgactacattcctttcaccgccatcatctcctagatctggagccaaaaacccgctactcggtgacgaggaggacggcaaaggcgatggcaaagaaagcgaaccgcgacccgtgagctactcctacaccttcttccacctcatcttcgcccttgcaagcatgtattcagccatgctcctgaccggctggacgagcgctgcatcagagagctccgagctgatggatgttggatggacgaccgtctgggtgcgcatctgcacggaatgggtcaccgccgggttgtacatctggaccctcatcgccccactgctcttcccagaccgtgatttctcctaggcacccacgcacccatagcctatgagttgtttggtggtgttagttgcgattgtgaatatgaataagccgaagctgggagctggtagggatctggtattgtctctgtatgctatctggcatgcctaatgtgatggcactggttagtacctgtttgtatggccttgtatagaatatatttcgaccgagtgtaggttgtggactttaaaagcagaaaaacaaaactgagcagaaaaacaaaactaagggtaaaatgaggaacactagcaaaactgaggataccagcttaaaaaccctatatcttaaggggtaagtacaaaaaataaagagacgtattttggttaagtaatatctcgattctctaagtctagatatgttccattcatacaattcatataaggtcttgttcggttaattcccttacccatggattggatgggattgaaaaaaataagaa

SEQ ID NO: 39227 - DNA, 462 bp, Zea Mays
gggcattccgatgcgaccgcactgagaattcttctcgagggagcaggcgaggaaggatcctgacaacttcttcaatttgagaatgctcacatgtcctgcaaccgagatggtggatggttcaagggtgctttactttgagcaggcattttggagatctccagaaaagccttttagacaatcctccagagattctacatggtaaagccctgtccgaaggagatgaaatgcgatgttgagttgagttcatatgcaattagggatgctgaagagtacaagaatttctgtgaccgtcaaaaggatcagaggccacaggcagaagaagtaattgcagtatgtcatttcgaacacaatcttacttttcagactgtttgtttctgaagtttcccccttcatttacttatgcctgttaatggctaaactctggagggacagctgcaaatgaaatgaaggaaatatttacaa

SEQ ID NO: 39228 - DNA, 2406 bp, Zea Mays
tcagcgaaatcgcgcgagacgaaagcgggaagctcttatctttcccaccaaatccaagcccatttgaggggccagccactccccgtcggatgccgccgccgccatgaccgtcacggccgccgcatggccggtatgcaccatctgctacgaggacctccgcccgctctccgaccagcacctccactgcctccccgcctgcggccacgtcttccacgccctctgcctggagcaatggctggagtactgccctgggggcaagaagaagcgcacctgccccgtctgcaagcagccctgcggcgccgcgcacccgccgacccgcctctacttcagctccaccggcacgtgcccgatccaggcctgcccctccccgggaagcgcctctgggggcgcggacccggaggcgctcgccgccgaggtcgcccggttggagcagaaggcggcgtcgctcggcaaggtggtcgaggagcagcgccagagcatcaacgatctcaagtccgaggctgcctggttgagggagcaggcggaggcgggagactttatgctgcaagccgcgaagaaggacaaagaatctgtccagatacttctgaatgcgaaaacagaggagttgtcgaggaagacatcagagtgcgggaggttgcaggagaagagccttgcattagccaaagagcttgcggcgctgaagctacatgaaccttcaggaggaagaaatcatgaagtttgcttcacttggtaaccagggaaacctgcagaatgctgttgatgttttgaagagatcacttgctattcggaacaagagctacaaggaattgatggtccagtgtaatgttttgggaagatcagagtctcgcatgcagcagaagcttgaaaaggccaaagaaattttaaagaagttaaaggcaagggtacaggaacttgagaaggaattagaagataaagaaaatggtctgttaagggacttgaggtcttcaaagaaatttaaagcagaccatataaaatctgggaatgtcacagctaatagtgctttcactagttcaagtcctggatatgaaaatcaaacaaacaagctcgatgaggtgatgcaagatccgtgcaacgacaagactcactttgaccggttaaaatctgaagctgggagtgttctgaatgcccaagacaacctggacaacaaggatgtagatgtgatagacctagaagccaatgattctgtttttggagatgaacagaaggctcagttttccgccaagccattcgggaccgatgatagcacaccgaattccgagaacaagtctagcctttgccaaaatgatgaccgacattccgtggcatctgaatgcacaaccgcacacgcagcaaatggaggacccttcctcaaacacagagaagcaactgtaaaatcaacctttatggcgaacattagggccaaactgcatattcctcgggagagtccttccgtgagaactaacgcgacaagttcaacgctggagagtgaaacattgacaattgatggcatctccaaacaagcaacgagattggcatctggcactggacctcagcagatccacaacttcaactctttttctgatgatttccaagcgccaggaattcctggcacggatggagcaaggagaagcattggcaaatggtgcaagggcccagcagatcccagttctgcgagtgggagcagaggcaacctgatcgccgtgggaccggatggccgaggaggcaaggtcaagatcctgagggaccttggccgaccccaggatagcaagtcccaagcgctgtggcccaaggcgcagaaggttgcaggcagaggtggccagtcccagatccatcagttctttggcaagagatgatcctgctactgaatgaatatgttgtgccgcatggagcctggttagctgaacctaaatcctgcatgcagctgtgtcggtatgcaatgcgtgctgtcgaacaactgaacgtgtatctctgttgtgcttgagctgatctacgtgtggatagttgtagagcacacctctggctcagcttggacatagccctggtttcatcacatggcagctggatgcagcagaaaagggaaacaagtttgttgaagagtctgatggtaggttctgggaggtggtgtgggcttgggagagcctacctacactacacgtcagctgtgttggatctaaccatccaatcataacaggacaccgggcatgtatggcgcttctagtttgtttgtttgtgaagtagtgcaagtgttgagcttctcgagtccctgaaaaggatgtttagtggacagctacaccagctcccgtctttttcttcaaagattttagctgccataactgatgtacttgttttgtatagtcatcattttacatttaaatatagacataaaaatcaagagttaaaacgaat

SEQ ID NO: 39229 - DNA, 3755 bp, Zea Mays
caaaaagtttctgccgacctcagcggacccgagggccaacgaagcccaaagcccacagacgacgctacggcctcgccttccgtttctgcacgttccttctctggaagccgaggcccgctcgctcgaagcggctgttgcgccgctcaatttcaatccggaggctgaagccacgggggagaagggcgcatggtttccgcagcgcgcgctgcatcccttctggccttgttgcggcctccggagcgcggatcttgacatcggcgacgacaacggcgaggaggaggatcttctcacggcactgcgaccctgcgagatgatattgtttggacccggtaatttatgatgcctcagcaattgaatggttgtgtgacgattgtcctccaaaacataatgaagaaacacaaaaggcagtgggtgctgttgggcctaccatgaacacaatggagtgtctggacctctcaatgggaaaagatggctgctctttttcacagaattgtgttgaaggcttcacccaaggaacaaagtctgactttttttcttcaatcaatgatgttgagacatcatatccatttgttaagggtagttcttgtcctacactaccgaatatggagcaaaaagatggtgtattggaaaatgcggaacaacctcatcttttggagatggttaatcttgatggtacaagccattcacttgtggaccctccattagaaatcaaagaacaaggagcggaagctggcttatttgcttcagttgaagatgtcgagcaaacccatcccattttaactgatgaaactagtcctatatggtcaagtgaggagcaagtagacggttcttgtcctgcatcggaaagccgggagcaacctgttcctttcaaggtggttatactcggaccatggcatgatgtgccaaatagcatcctaagatcaaggcctccttcaaactactcacagtccatgcaaggatcagatctatatgttggaaatgtggatgtattggatctttctaaggagcagttggactcgaggttaaaacctgaagaacaaggagcggaggatggcttatttgcctcagtggaatatgttgagcaaacacatcccaattttactgaggagaaagtagatggttctattcctacaccagcaagttcggagcaacctgatcagttggaggtggttagaccatgggatgatgcgccgaatagtaccctaaggtcaaagcctccatcaaactactcacagccaatgcaaggatcagatctagatgttaggaatatggatgccttggatccatctaaggagtggttggactcaaggttattgtcaaatacggtagagccatcaagttcctcaaatggaggaggcacatctgttgagaaagacaacattgaaaaaacagaacgcttgtcaggcattgacaccgtcacccctggactggataatgtccagggatcaaatccctcagcagagccatcaagttcctcaactggagaaggaaactcagctgttgaaaaacacagtgctgaaatgacagaatgcttgttaggcatgggaattttgaaccctgcactgcataatgtccaggtattgagtccctcgacaccaaaagaatgcttggtttctagcgcagacaagtcagatgtagcaaataggtcagatgaaattaatcacagtctcgatgattttaaccaaagtaatcccaagccagtgctgaagggaagagtctccaaaatgatgtgcccaagacttgcgtttcaactgccaaaagtgttgcctgtatgcgaacatcacaaaagggagatgtcattgccttccaagcatgttagtccacggaaagcaacaaaaagtagctttagaaagcaatatgaaggaccaaacagacatgtttcacgtcatactgaacatcagaaaaccaaactcgttatgaaggacagaaatacaggtcctgctcatatgagaagttgtaggccaacaaagcaaattgattgtacttgctcaagtgcttccttggattcatctacaaagactaaggaagtaaatgatgcagaaccaagatgttctaaatctgtaaaaacttttgagaatgtcatggccaagaaaagaaaacgacctattctatcatatgatgaagatgccaaggccatgcagatggaagtgaggatgcgcaggagacacagggaaagtggtgtgatgaagctgcgaagatccacagaaaattctgatgaagcgatgtgtccaggaaattcaaataatcaacttaccaatgatcatacgaaggcaaggaagcagagaagggccaacaaagacaataaaacaccaccagtgaacgctagtgttccatgcacacagattgatgctgcacgattagcatcagatcagcaaagctttatttgcacgcgacccattgatagaccttactggactggaatcatgaagattggccaggaatatatttcattggttgcacacctgtcaaatcaagcatgcaagaaggtgcaggaattatcgatgtcattaccaccactaatgaaagtaacaaagcattcaaagttgaaagcctggccagggaggtggaaggcatcggaacctactgctgaatgcgttggcttgtatttcttctcagataatatgagggaactggatcaacttgtgcattatctcaatgatcatagcttagtcctaaaatatgtcgttggctttgccaagctgctgatctccccgtctgttttcctaccagagcaatgccaaacgttccaagggaaacgctatctgtggggagtgttcaagcgcaggatgaatacggggagaatacatcatgtgaatgcaaagtgacaccctagtccaataaatccatgttgtgaagggtatcgctagctcaaagagacaacagttcgccaagcactgttgatgcctttttgagctgagaccgacccctgtgatcataagcagccccgcgagaactctcccctacccaggctatcgggccttgtcattgtgcggacgtctgaggtcggagcacttcatttgtttgggagctggaaaaatgaaggtgcactggttggtttctctgaacttgtgaaagggttagcgaaggaccgtactgtaatgttcatggcctggaggaatgatgcagcaagtaggatcagaaatcagaactagccagcgacaatcacgctccagcttctgaaacgttgctgtagccttttgttgatgttcaggactgggagctagattgtcacgatttgacactgaggacgttactgtgcctgcaagcctaacctaagatgtatcaagcatcaagtgctgctgctgctgctatggaaggtcttagccaaaattaaattatgtttctaagctctgcatgcatcttaacctgcgctaataggttttcttgatggcctcaatgggagcagcaggaacctactactttttatgcgcataaactggcacttcgcatgatgtacttgttcataagttggtcaaaaagtcggttccgtggggtaaatccattaaaaaagggtaaattttagcggagggagcagctacagttggcggggaacttgctttagaaaaaagttttagtagcttatatgccttgggagggttacaattttgaagacacattactaattagtgaacgtttggtatatgaggatatttatactttttttcacatccgaaaatatgaaattcagatggatacgacaactcaaggttccgctgataaaatcactaaacaaataccacatctagaacatttac

SEQ ID NO: 39230 - DNA, 427 bp, Zea Mays
ttcgtggctacggcaatgtgcggtcccccagtcggcgcgagtcgtcagtgaggaattagcgacggtcaaggcttcctccggtgcccgaggcttcccagaaaaactcccgttccccgaaggaccactcccaaccaacaccagccactgtgaagtcgtgtgagcgagtaatcacggcggcagatccagtctactccctcaccagctggtttcttcttgagtccagactccgtcgaacacatccatgaacgattcaaagcaacagttatatggtcgtggggtcacagcgagcggccaacagatcctgggcggggcgtcaacagaatctcggggattcccccggtgctttggcatgcccacgcgcagtgcggagtgcgccggtgacggccccaacaacgactggcacccgggtccatttgtcagcgagaag

SEQ ID NO: 39231 - DNA, 1306 bp, Zea Mays
catgtttttttcagaattttttgaaatattttttagtaggtttgtatggggtttgcacatttggtttgcattctatatgtctctgtttgtagcgtttgcttcagtgctaaggtgggactggaggcggggcggtggcgaatgcaacgggagattgagaagagagaggtgaaaataaataatagaatatctgataattagtatagggtagagatgtaagttaaatatgattgtggaagtttgtgagatagagtagaaaatctcgctgattatgatagaatattcggtaaagtgtgatagcctaacatcattctcacgtcttttagcacttaattcgtacaccattgaatatttaacttcgtaggtgcgattataattttgattaaagggatgtcaccagtgtgtcccgttctgttcttctgctgtgttccgtaacttccgttattcctattcttttccaacgcgactacacgtctacgcctctcctctgctttcccctctggcccttccgatggactactcgagtggcgcgacggagtcggggagggtgcgagcacgttggtgctactgccgctgcttccgccgttggtgccgctgcttctgcggctgctactgctgcaactgcttccccgacgagccccacgacgaccgccgcgccgcagcgtacgcttaggctcctggactctccactcgcagtcgcagcgccggccgtaatgcgaccaggaaagggatgacttcaattgacattcagctactagcctactatgctctgtttatgttctgaagtacacaaatgtgctgtatggactatggagtgggagagtcgcatataggcatatgagcagtatgagggaactggatttctgtcctcatgtacactaggcaaatggctaccttgttcttcaaatagatgttgaagaagatattacagcttcagagaatcagagctctcttttttggtgcttgtaatgttacaaagaagccccgacgatgatgtgaatcagagtagcacttcgtgcattctaatctgtgtactgtggttcgcgaaactaagattgaatgtgtcgagtgtttctgtgtgggcggttgtttgcctcttctgtactctgttgttcttcttctctgtttaatgaaataattcacagctctcctgcatgttatgttcgatcgagagagagagaaagagaaaaaaaatgtttgcacatagctgtgttgtgctatcatcttccatatttctgcaattctgctcctaactgggaatggttttccctgcggtgaatatgaattggccatttgggtgtgcgtggaa

SEQ ID NO: 39232 - DNA, 1379 bp, Zea Mays
cgcagctgcgaggctggtctccgctgttacgtctctgcccgcctctcccccacccctcctctggtccaagtccccccaccgcagcggccaccactccatccgagtctcttcgactccaagccgttccgctccccctgttccgcgcgacgccgatgcaccccaagctgccgcgggccgcgcgcaggctcctctgctgcggcggggccgccgcgtccccggaggaggacctattgctgtcaagaggttaaataacgcaaagaacggcacagaagccgaatttgcttcagaagtcgagatactgggaagaataagacacaaaaacctcctgagcttccgtggatactgtgcggacggacccgagcgcgttctggtgtacgacttcatggcaaactcaagcctgtatgcacatctccatggaccgcattccgcggagtgtctcctcgactggcggaggcgagcgtctatcgccatgggcaccgctcgggctctcttgtaccttcatcgccacgcaacgcctaagataatccacggaagcgtcaaggccaccaacgtgctgctggattcagacttccgggcgcacgctggcgatttcggtctggcaaggcttattcccgacgacggaacggaccacgaaaagatagccagcagcgagagccagcgaggctaccttgctcccgagtacgccgccatgtccggcaaaccaactgcaggctgcgatgtatacagcttcgggatcatactgctggagcttgcgagcggcagaaggccagtcgagaagtcgggttctggcaaggcttgtggaatccgaagctgggtgctcccgctcgcaaggcagggcaggtacgacgagattgcggactcaaagctgggcgacaagttctctggacctgagctgagaaggatggtgttggtcggtctagcgtgtacacgttcagaacctgaaaagagacccacgatgcttcaagtcgtgccgttgctgaaaggcgagtcgaaagaaacgcttgttaagcttgaaagggaggagttgttcagcccagactcgacgacggtgagttcgcagggaacaccgaccccagatgggagcacggactctgcgccgccgctgaagaaagataaagaactggttggggcgtgagttgcgatatattgctgttctaggagattgtagagtgcgtatttgtggtattgatgattagtctgtgcggtttgacgtgaatgggaattgtataggcattgtttttttctaagttttttttttctgtcccttttgagggagtaaggaagagccggcgggctggagtactctgttgctttgcagctttttggttcattatgcttcgtctatcgagcttgtcgccgagtctggcccctcccttgcc

SEQ ID NO: 39233 - DNA, 645 bp, Zea Mays
cccagaaccgatcaatcgattcaaaatcagttcctagcttctgtcctagcaactctgatatagttaaccagatattgctgaccatacaacaataaaaaaaaacaaatcggatattggtttattttttcaatgcagaaaacacattcacatccctgcaaaaaactgaacctcttacaaatcccgggacaacccctatagcaatgcgccaatgccattgtatgtaccttgtagtgtcgtgccggctgtctgggcatatgtgtagtcgtagctaaatgagccgagcgcgatgccacgaatatacgaagagatgcccagcgcgtttgtcctgcatcctggtagccgtttccttggcatcgacggattcgtacggcacccagacccagctagctgctcacttaattgcttggccttaatttcgttcattcatgcatatctgaacatgtaatttagcattgcatgtacagacaaggcagatagatagattggcgtgcagagcaatataatgcagggatgagggaggtatatgctctcagatatccaccattgctcggttacacccaaggagaaaccagcaagcacatgacattctaccccgctgtgtgctgctaattgatgacctgctgcacttcgctttcatccgcgtca

SEQ ID NO: 39234 - DNA, 2880 bp, Zea Mays
catatttatatccaggttgctttccttatataccgcccagtgatgcggctttttaagagcactaatggaggtgacacttgttggcctcttgatgataacgaggaaggagaatctgtatcatctgatgatcttatcttacatcttgactcgtttcaggaaccaatcatgtggtcagatcttcttaacgcagtccagtcaattttgccagcaaaagcttggaacagtctttcaccagacctatatgctgctttctggggcttaacactctatgatcttcactttccaaaagaccgttatgatacagaaatcaagaagctgcacgagaatctcaaacaattggaggacaactcagataattctagcattgcaatttcaagacgtaagaaggacaaggagagaatccaagatttacttgacagactgaacagtgaatctcagaagcaccagcagcacgttgcatctgtggtccaaaggttagctcgtgaaaaggataagtggttgagctccagtccggatgcaatgaaaatcaacatggaattcttgcagcgctgcatattcccacgatgtgtttttagtatgcaagatgcagtgtattgtgctacatttgtccaaacactacactcccttgggactcccttctttaacacagtcaatcatatcgatgttcttgtctgtaaaaccctacagccaatgatatgctgttgcacagaatttgaagctggcaggcttggaagattttttcatgatacgttgaagatggcctactattggaagagtgatgaatctgtctatgagcgtgaatgtgcgaacaaacctggttttgcagtgtacttcagatacccaaacagccagcgtgtgtcctacagtcagtttgttcgggttcattggaagtggagttcaagaatcaccaaagcacttaatcaatgtatggaatcaaaagaatacatggaaattcgaaatgcccttattgtccttacgaagatttctagtgtcttcccggtgattcgtaaaagtggtgtcaatcttgagaaacgggtggctaaactaaaaggggatgaaagagaagatcttaaagttctagccactggtgtagctgctgctttagctgctcgcaagagttcttggctatctgaagaagagtttggcgggggtcacattgatctgaagccagcaacagcaagatctgtgcttggaaaccagtcagcagatctctcgatggcaaaagatcaaaatgcccgtgcaaagtctgtagagaataggcatgaaaggtcagagggtgctatgaagcctgacgttcagcaaaagaagagcactgtggcttcaaatggatctgatattctaatacaatcttcctccgtacaagggaaatcttcagtggttgcacgtgcaatggatgagcctccaaaacctgtgtctgatgagggggttaaagtttctacaaaatctacttcagaatttgagttcttttgtgcaacagacaagggcaacacaaaagcgtgctggcaatgctgggaaggtaatgaagcatgatgttgcaaaggaagatgcaaaagctgggaaacctacaagctggaatgtaaatcaacaagtctccactgttgatagagaagtgtctcatgcagctgatgctgcccaagaaaccagtaccactattagcaatggtaacttgcatccagcgccgcataaggtttcatcatcttctcaaagaaatgcagttacacataatggagcagccaatccctctgttgagtctactgatatgattgactctcctgtgagacagcaaaaaagaccgccggttgaggagcaagatagatcaggtaaacggaggaagggagaaaatgaacccgatttgagtgaacaccatgtagacaaggaaaagagtttggactcacgtggtggagataagtttcgttcagtggatcatgagaagagtgctaatgaggaacaaaatttaagagcgggcaaaataaaagaaaaatctgatgataaatatgacagagatcctagggaaaaattagatcggggtgaaaggcgtcgtggggaagatgccattgagagatcaacagatagattgtcggacaggagagaacgttccattgaaaggatgcaagagagaggtacagataaagcccttgaaaaaggtagagaggatagaaataaggatgagaggaataaagttaaatatgctgaaccttcggtggaccggacacattcttctgatgaacgattccgagggcaaagtttgccaccgcccccacctcttcccgcaagttttgtaccccaatcagttggcgccaaccgacgtgaagaagatgctgaccgaaggggtgggagctccaggcatgttcaaaggtcatctcctaggcacgatgagaaagaaaggaggcagtcagaggagaatatttcgtcatttcaggatgatgggaagcacagaagagaggaagatattcgtgatagaaagcgtgaggacagggatactttatcaaacaaggtagatgacagggatagggaaaaggggacttctttgaaagaagacagtgatcctagtaatgtttctaaacggagaaagatcaagcgagaacagactttagaagctggggaatatgcaccttctgctccacagcctccctcccatggatctggcagctcacaattgtctgacatacgagaaagagaaaggaaaggggtaatttcacagcatcgtatttcacacgctgatgaccttcctaggacacatggcaaggacatgacaagcaagtcaagtcgtcgagagtctgaccaataggaataaggtgaaaaatcatacccagaaccataccattctgagctgttgggcggtacatcatcatcatccactggctgcagtagcacttgatg

SEQ ID NO: 39235 - DNA, 1242 bp, Zea Mays
gtcagtaactgtggagagcacgagaaagtggggcatctactttttttagactactgctctcggcctcctctccgctccattttcgcaattccttcgagctccgctccgaccacgtcagccttcaccttgccgtctccgttacgcgccgcgagcccgcgagcgtttggggagttttggagcggaggaggcaagggaggacggacagggaagtttggttgtggaaatggatgtggtggaatcctcgccgtcgtcgtcgccgatatcgtctccggccgggtcttcggatctcattaaggctggcacattcatttgtgagttcagcgggattatccttactcaccagcagtcagaggttgtggcagcaaacggcgattgcttggtgcgtccaagtaggtttcctccaaggtggttggattggggtgatatatctgatgtctaccctgattatgtggcgccagaccatccttctattcctgagttaaaatttgcaattgatgtgtcaagggcaaggaatgtggcatgctatttcagccacagttgcagtccaaacgtgtttgtccagtttgtgctgtttgatcattacaatgtgtcttacccccacctcatgatctttgccatggaaaacattccaccgttgagggagctaagcattgactatgggatggttgacgaatggattggacagttaactatgtagctggagtatctatttagaaggcagtaatctccttcttttacctttatttttgaagttttcattatgcttcactttgggatcatcaagccaactgctggctaaaattcctcagctgcagtggaggtttccaactagcataatgttcctctggcgttgaaagaggcttgcataaggtgaccaagctatcatcaacagaacatcagccgttcattgtatatgttgcctgataacctaggtgccttagccaattttctagatgatctcgcttttgaagtataatgtgtgctgctgtaggaagcttgtttggcgtggctggcgctgagtttcagccttaaccttcgtgttatgagttgtcgctgttggaactcattttctgtacatatatctgtaaattatctagctggaaatgtgcccgcttctgttgggaaatgttggtccatatgtggcaaagttatttggataccttgtggaattgaagattccgcggagccaggtttgtccgtaggtcattgcattaatgattttgtgaaattatttgtggtgaa

SEQ ID NO: 39236 - DNA, 2454 bp, Zea Mays
ccgtgctcccccgaatttttttcctctccccttccgagttccgacctcgtcgccccgcggctccagctcttcccgttcattccctcgcgccgaagcaactccggaatccgcctgcgcgccaaaaccctagccccagatcccgcgccgcgccgcgccgcccggtgcccagtcggcggcgcccgcgccggccattgccgctcgccgcattgggggcgcttacggcgtctcctccgctcccgaagcagagatctgggccgaggagacctggttgttcgtgggcggtgcaggggatggggcgcgggcggtgggcctcggggatccgcgcggcggcgctggtcctgctcgcggtcgcggctgccgccggagccgccgcgggggatcctgatcccgacgagctcgagcgcgcgtttccaatagtggagccagaccacgggcacacaaaacttcgtctctcagaacaaggtctagaagcaattcgaaggattgaaactcctattgctgttgttggtgtcattggtccatatcgatctggaaaatcttttctcctcaaccagcttctctccttatcttgtgataaaggttttggagttggtcatatgcgagatactaaaactaaaggtatttggatttggggtactcctgttgagatggatgttgatggttccaaagtttctgtcatttatctagacactgaaggatttgaaagtgttgggaaatcaaatgtgtatgatgataggatatttgctttggcaactgtcctaagttcggtgcttatctacaaccttcctgagacggtacgtgaagctgatatatctaggctttcatttgccattgaaattgctgaagaattctatggaagagtgaaggggcaagatgttgcttttgagccagcaaagcttctctggcttatccagagggatttcctccaaggaaaatctgttcaacaaatggtcaatgaagcccttcaacgggtgcctaatgataatggtgacaaatatattgatgaggtcaatcaaatacgagattcgttggcagttatggggaacaacagcactgcttttagcttgcctcagccgcatcttcaaagaacaaaattatgtgatatggaggacaaagaacttgaacccttatatgtaaaacggcgggagcaattaaagcagcttgtttcgtctattgtaaaaccaaaaattgtgcagggcagaactctaaatgggaaggactttgtgtctttcttgcagcagattcttgaggctttgaataaaggcgaaattccatcaacagggtctctagttgaaatttttaacaaagccattcttgatcgctgtctgaaggcgtacagggagaaaatggatggcttaggcttaccagtaccggtagacaaactgcagaaacttcatgagatggcaaatggtgatgctagaattctctttgataagcagcactttggcaaacatcatgctgctcagtcagctctcaagcttgaagatgatattaaaaaggatgtactttgtaggtgtacagaaacttacttctagctaatgaatatcaatcgtcaaagctgtgtgaagctcgcttttctgagtgtgaagataagatggatcaccttcaagtcttgaaacttccttcgatggcaaaattcaatgcaggctttactcactgcaaccaaagtttcgtaaaggaatgcgttggacctgcaaaagaaagctatgaacgtagaatgtcaaagatgggccgtcccaattgtcataatgctattatttggggttctttactggagatgcttcggtggtagaaggaagcggggaaggggttcgctcctcccattgtacaagaattcttataactcgagtcgtcgctcgagatcagactagttatacacgcaatgttgaagttattttcttttaaagaatggtacaaaatatctgcctgtagaagaggctaaactgccgaatgtggatcatctgcaagtgcttttggatgggcatgttttgaattttgatggtgccctgccaatgtatctccaattctttttggtggatgaagagaggcggtgaagctgctagtatgggggcggggcacctgcacaaagcctctgttgtaattcgtaccggggtactttttgtgtagctaggttatccttacatgtcacggtcccaattgattgattattgtttacgtccactgcaattttttttggcaagaattttgttttttaacgtcatagatagaaggtagctgttagagcgtgtaccgtgtcaatcatatgttaaaagttataatctggtggtggaatttggaaacgttccttgtttatactgttgttatacagtttatatccacatatatgctatacttctggctaggagctgtgttgtgtttatgttttgcattaagccagtggcactcagaactagcgagtggcagagcgtgctcttcgatggaaaccgaacttgc

SEQ ID NO: 39237 - DNA, 1954 bp, Zea Mays
caaaatttaaataataccgatcttttcggcttagaccggaccgacagaatgcctatagtcctatacttacagctgaccaggcgatcaatcacgcacgccgctggtcagcagtcagcagcaagccgcctcgtcgcctcgtcgggagtcgggagtctggtgagcgagctggtgatcaggtaccttggaggcctggcttgcttggacgctccattgcttcgacttcgaggtcgtcgcgggtttggatcctgtgtggagggggtaacaccgtgtagctcaactgtcccctagcgccgccgcgcgaaactccctaccggtccattttgtttgtagccattaagctcttcggaggtggagatctgggctgtcgtttccaggaccctggccgcgtcggctgtgatgggtcgaagcgccttggcggttcggttggcttcccttcttgcgtttggtttggtgctcgtctccgtcgaggccagcctcggggatgttgatccgcgctacagaacttgcgtgagggagtgtcaagctacagggattgttggggagaatgtcatcagccattactgtcgctatttttgcatgatgcagagagaaggggaacgacagtcacttggtctgagccctgttaaatatcatggaaagtggccattcttacgtgtttctgtgttccaggaacccctttcaactgcactatctgctgtcaacctactgatgcacttcactggctggctttcatttttccttctagtgaattacaaattgcctcttagaccccagaccaagagaacttattatgaatacactagcctgtggcatatctatgcaatcttatcaatgaacgcatggttttggagctcaattttccatactcgagacattgagttgactgagaaactggactattcttcagctgtggccttgcttggctactcgttgatcctttcattgctaagggctttcaatgtcaaggatgaggctagcagggtgatgtttgcagcccctattttggcattcgttacaacgcacatcttgtatcttaacttctacgagcttgactatggatggaacatgaaagtctgcgtggtgatggctgcggttcaacttctgacgtgggctgtttgggctggtgtaagccggcatccatcacggctgaaactctggacggttgtttttggaggagcactggtcatgcttcttgagctctacgacttccctccatacatggggtttgccgatgcccattcactgtggcatgcaagcaccattccactcacctatctctggtggagcttcatcaaggacgatgccaaattccgcacgtcaacactcagcaagaaggcaaagtagttaagcaaagcgcgacattcttagcatagggtcagagaggatcagattccgattccgtggtctgcacgggggacattttgggggcacacgtgttgtcggacatcatggaacctcggtacatttgccctccccaaaaaagacattcatcttcatccactcaggtttttggcccacaaaagtcaacatactctttagggcgcatgttctgcccttacgaattatctctttactgacctgaacgtgcatcctgtgattgaatcggcatcttatcattgtagtgttggtggggtttgggagattttgtcatcgccgaatcagttttgtgaaatcagacagaacaatgaacatcagtggtgtgtttcctattatgtgtggagttttgtaaattcctgaagcccattttgtatgagttttccaacgttacgaaaattcctgaacaatgaacacgtgctatgtttgaaacaagagggcacggtagctaactagctggcaggcagtggtgggctacgggtttaaactttaaaccgaggacagtcgaggatattttttttgatatgtcatattgtgtataattcgaccacatagatatatagttttcatcaattcggta

SEQ ID NO: 39238 - DNA, 3488 bp, Zea Mays
gggaggctctggcgggagtgtgttacgggcttacggccgcctcgtgctggtgacaggcgcggcgcgagatccgggctggaagggctggcgggtcccgttggtggcgccgtggcgtcggcgtgatctgagatgagattggacccggctgcgcggtattcgctgcggaggtagacggccatgacgaccaacaccaagcgcgcctacaagctccaggagtttgtggcgcactcgtccaatgttaactgcctcaagattgggaggaagacctcgcgggttcttgtcacaggaggagaggaccataaggtcaatctttgggctattgggaagcccaattcaatactgagcttatcaggtcacacaagtgctgtggagtcggttggttttgattccacggaagtgtttgtggctgcaggagcagccagtggaacaataaagctatgggatttggaggaggcaaagattgtccgcactcttactggacatagatcaaactgcatgtcagttgattttcatccgtttggggaattctttgcctctgggtcactggacactaatctgaagatatgggatataagaaggaagaattgcatccatacatacaaaggtcacacacgaggggtgaacactattagatttacacccgatgggcggtgggttgtgtctggtggcgaagataatatagtaaagctctgggatctgacagctggaaagttattacatgaattcaagtgtcatgagggtcagatccagtgcatagatttccacccccacgagttccttctggcaacaggttcagctgataaaactgtcaaattctgggatttggagacatttgaattgattggatctacaggacctgagacaacaggtgtccgatccatgacattcaatcctgatggaagatctttgttatgtgggctgcacgaaagcttaaaggttttctcttgggagccaataagatgccatgatactgtggacgtgggatggtctagacttgccgatttgaatgtccatgagggaaaacttcttggttgttctttcaatcaaagttgtgttggaatatgggttgttgatctgacgcgtcttgagccatatacaatgggtacttcaacaaaagtaaatggtcattctgaattgaagactgtttctagcggcactttgcctttacaaaatgatagtggttcaagggctaacatagggcgatcatcagtcttgcaaaatacagagaacaaccttaaaactacttcaggaagactgtcggcttcacagaactcagattctgcacccaaagaaactaactcggcaccttcaagcgggttgatcccaagcacaccacatagggctggagttggctcccataatagatctgttggaaattcagcttttcaatctggtggtaccaccttgaagagaagttcgttgaggaataacagtgcctctaatgttcacaatttcagtaaagctgatgtagtgcctgtcattgttcccagaactagctcaggaggggagttggctactgattctagaagcgatgctgctgatgtggcacccgttcttccgaaggtaaccagaagggttgaacctgctaccgattctagaaaagaaagtaatgatgtggaacttgttgttcctagagcaagctcaagaatggaaatagccgatttagcacccatttctagttccaagtcaggcagaaggttggagtctgcccctgattcgaaagaagaaagtgctgatacagcacctgttgttgtttccaatcccagggctaatgtaagaatggaaatagtctctgattctgcgcccgctctttcaaagtcaaacagaaagctagattctggcactaactcaaagaaagaaagtgctgatgcagtcattgtacccagaacaaattctagaatggaaatgatttctgattctaggagagaaccctctgctggaagaatatcaccattcagaatccagtcaagatatgctgagccacggaagctagcccatgccagaactgattcaaacaaagttgatagcagaagtaaaattactgaaacagaagacttcaattgccaaatatttcttccccgtagaaacagtgtttttcaaacaataagttctgaagaacctcgtgaagatgtaaagtgtggtccagttgacaggatgttcctagaatgcgcaaaccaggagacaactgctatatcgaagtttcaagagcaggaagagcaaggtcaagtgtctctaattgggaagggagggatcagccccctagtcatgaagaaccaacaacaagcagttctacactggctcctaccggccatccatattcatctagaggaagcaatcaagcttctgaagctccaatcatagctagtgatgaagatgttctatctcttatcatggagcgacatgatctatttttaagctcaactaagtctcggctgatgaaattgcagattattcatcaaatgtgggaaagaaatgacatcaggggtgtgctctctgcgatggacaggatgggtgatcatgctgtctgtgctgatatggctagcgttctcatggagaaaagtgaaacaatcacactagatttatgtacctctatcctgcctgtcgtcaccgatcttctggagagcaaaattgacagacacttagtcgtcgcattggaattgttggtgaagcttgtaaggacttttggtccaatgatacattcaacagtatcgtcaggtccttgtgttggtgtagaccttgaggcagagcaaaggagggagcgctgcaacttatgcttcatcgaattggagaaggccaaaaataagcttccatctctaacaagaagaaaaggggcggttgcaaatgctgcacaagaacttgctcttgtcttccaggaaatcatgagttgactgacgacacactagatatacacaattagatgggacatgcttcggcctctgatggcaacaagattggatatcagctgccatggagggtgctagctattcagtcttagcgacgtcatcaagctccaaggccacagcaccaacaaatgcattttgttgctgctgttcgtgccttttgtacacatgctaacacataatccatgtcatttgtgaagagaagctgccatggacagtgacttcatccacaatattatgtggatggcggcagctggagatgttaggccccgatcgaatggtgatcagcagatgagacttgcttgggcttttctggcactcgtagttctttgctgtctgtaacatctttctcatgtaccgttatcatgtgcatgtgcaacagtcaagtggttgcatttggtagtttatggttgtgctgtgtgttggtcgatttagtggtcgttgatgagtgaagcgagccatgtacatcatttttttttaagatttgatatcttctttttccttgatgactcctctcgttatacttgagtgaaaatgatatcttgtgtacttgccttgacagcttttcggaaattcccttttgtctgg

SEQ ID NO: 39239 - DNA, 2763 bp, Zea Mays
gtgtaggcccagcgtgtcagacactgaggctgttgcagccgtgattcccgagtcccgacgactcgcgcggtcgcgcccctcgccttctccgctggtcgactggtccggctggtcttccccctcggcatcgcactcgcacctcccaagcgtgcctgaatctcagacttgtccccccactgcctcggccatggctgtgcgagccacggtctcccgcttcccggccacgccggaggcgctggagtcgtgcgccgtccagtggggcgtcgccgtgacgcccttcgccgccgtcgacgagcgcggccagcccccgaccaccggcgccggcggggaccgcatcccacgctgcgagcactgctgggcgtacttgagcagccactgcgatctggagcgctggggctggacctgcgcgctctgcggcacgctcaacggattcgacgacgaggccgagcgacggttccagcgtcccgacgcctgccccgagctcaattcctctttcgttgacctcgagatcgcagtggatgaggcaggggctggaggagacggcgtgcaggcgctgcctgtttatgtggccgcagtggacctcgcatgctctgaagagttccttgaacttatcaagagtgcacttcttgcggccctagaagctcttattccgggctccttatttgggcttatgacattcagccacaagattgggttgtatgatgtccaaggtccgattccacttgtgaaaaatgtttttattcctccggacttggaagaagatggtctgcctgttgcccttgaagatgccatgcccctactttcttttttggctccagttgacacatgcaaggatcgaattgctgctgccctggagacactgcgacctacatcttcatgggagagaggggctgcttctgggcatgaagaggatgctgttttgcttggcggacgtggttttgggacagccatgtctgctttaattgagtacctaagttcaggatatggttctacttttgctttggctcgagtatttgcttttctgtctggtgctcctgattatggagctggtctgctagataccaggagatatggggagcaatatgctagtaaaggggtagacgctaaccttgcattgctccctgaacagatacctttctacagagacctactgttgctgttcagtcaggagtttgcatagacatatttgctgtaactgatgaatacacggatttggcttcactgaagtttttaagtattgaaagtggtggatatctatttctttatgcaaatgcagatgattcaacacttcctcaagacatataccgcttactaagtcgaccctacgcatttggttgtgttctaaggctgagaacatcttcagattttgaaccaggcaattcttatggacatttctttcctgaccctcagtatgaaagtgtgcaacacattatctgctgtgattcatttgccacttatgcatatgactttgagttttcccataacaacggtttctccaggcatacagatcctgctgttgtgcagatcgcttttcagtacagcgtgattgaacctgccaaggagacatcaggcgatggatcacaatcatctgcaagttataagttctctctaaagaggcggctgagaataagaacattgcagtaccgtccagctaggaatatcagtgaaatttatgacagtgtagatccagaggttgtactgcatatccttgttcataaggttattttagaatgcgtggataagggggttagagaaggcaggcatcaagttcatgcttggctatccctccttgcagcccggtataatcaggtcctgagttctgatgtgcgaactccactatcgagcatagacattgacttctcgcagtgcccgcagcttcaaacgatacctcaacttgtttttgcattgttgagaagtcctcttcttcgcttgcatgaagaaggtgtacacccagattacaggatatatctacaatgccttttcagtgcactggagccatcttctctagctaaagctatatatccggttttaatatcgtattcctcgcctgacaagcaagcattcccacgacacactctcagccgtgctgctctaatcatgagcgagagcccaatatttcttcttgacacatttaccaaccttatcgtttactattcctcaactgctgatccttcatttccttttcctccaccccgtgactgtcttttgagaacaacaatcaataaactgaagcaggacagatgtataaccccaaagcttacattcatccatggaggggaagatgattcaacattgtttgagagctatctcattgaagagcaagatgtcgatggatcaggtcttacaactggttcaggttttgtagccttccgtgagagcgttaggaatgttgcaggagagatcatccaggaagaaattggaagctagtttcagctagaagacccttttggtcccgctgcagagcgtataaactcggatgctttttaaccctaattaatatcgtagtagttaacttagatagccaaaatggagaaacaatgtcaaaataatatgaggggccacatgatttgtagttgcttctggcaataactgctttaggcttgattaatcagagaagcctttctggtacactggtaaaagggtcgagtacaccaatacaccgtgtgatcctggctgtctgattttttttggagaactcaaattttggtgtatattaatgctgctgtttattccgattaaattgaggccgttcgaaacctagag

SEQ ID NO: 39240 - DNA, 5450 bp, Zea Mays
ttcccctcgtgtgttcccggcggcctttcccctttcccctcccaaaaacctctcccaaacccttggaacctacgccgccgacgccgccctcgcagccaccaccgccgccctcgcagccaccgccgcagcaatgctccgatctcaggaccgccgacccttccgcccgccggatcgggctccacggcctccccacccccaccgcgaccagcacaaccacaacgaacaccggtaccagcctctctcccacccccacatcgaccgacgctacagcaatgaacaccggtatcagccccgcggccagcatcagcgcggttgccacgtgcagccgccccttcgcccgtcgcagttcgaggtattcctcgtccgcccgggccccgatttatccgcgccgaccgccattgaggtggaggccctcctcgcgggcctcccgtcgccggccccggccagcatatccgtccaatcctccggccgccatgccgcgcgcctcgtcttcacctccatcccggccgccgcggccgccgcgcgcgagctctgggcgctccgcctcgaggggctccacctcctcaccctggacctcccgcaccccgccctcgccgcccacgcctcgccgctcatcgcctcgctcttcgcctcccacgcctcccgccttcttgactctgacatcatggtcctctcggccgcccgctctgccgagcttgaggcgtccgtacgggatgtaaaacaacgtctgggctcgcctaatcgattccgcgacttccatcagctagacctcgagaagaagacactggagtctgagaaggaatttgtcgactccaaaattgcggagtacaaggaggcgatgtggtcgatacagcgggcaatgttgcgtggatcgggggacaaggaggagggtgtcgacttgtttgcggctgtagatgatggggaggtggactttgttaaggtgcatatgatgctgctgcgtgagtgccggaggcttaaggagggcctgccaatctatgcataccgcaggaggattcttaaccatattttcgccaaccaggtcatgatttaataggagaaacaggttctgggaagagcacacaattggttcagtttcttgctgactcaggtgttgctggtggtggttccatcatatgtactcaacctcgaaagcttgctgctatatctttagcacatagagtagatgaagaaagtaagggttgctatggggacagttctgtgttgtcatattcaaccttactaagttctcaaggttttggcactaagattatattcaccacggacagttgtcttttgcactactgcatgagtgatgtgaatctggatggcatttcgtatattattatcgatgaagctcacgaaagaagcttgaatactgatcttctgttagctatgatcaagaagaagctgcttgataggctggatttgcggctcattataatgtctgctactgctgatgctgacagacttgctgaatacttttatggctgtcaaatatttcatgttagaggacggacttttcctgttgaaattaaatatgtcccagatgtatcagctgaggcttccttgaatagtgtaccaagtatttcttctgttgcttcctctactgcttcctatgttactgatgttgtacaaatggtaaacatcatccacaagaatgaagaagagggtgctatacttgcttttttgacatctcaactggaagtagaatgggcctgtgaaacattcagtgatccaaatgctgtggtacttccgatgcatggcaagctttcttctttagaacagaatcttgtcttcaaaagctaccctggaaagagaaagattatcttctgcacaaatatagctgaaacatcattgaccataaaagatgtgaagtatgttgttgattgtggcttggccaaagaatacagatttgttcccactagtggtctcaatgtactgaaagtcaactggatttcccaaagctctgctaatcaacgtgctggccgtgctggtcgaactggagcagggaagtgttacaggctctaccctgaatctgattttggtatgatggaagtgcatcaagaacctgaaattcgtaaagttcatcttggcaccgctgttcttagaatacttgctttgggtgttacggatgtaaagtgttttgagtttattgatgccccagatcctgaggctatcgctatggctgtgaataatcttgaacaacttggtgctatagaatgtttagtcctagcctctgttatggcaaatgctagtagcatattttgtagagtgggtactaatgaggagaaatataaagctgaccgcctgaaagtccctttctgtcaccctgatggagaccttttcacctcacttgctgtttataagaagtgggagactgggtatggtaacaaaaatacatggtgctggcagaatagtatcaatgccaagaccctgaggaggtgccaggaaactatatctgaacttgaaaaatgtctaaagcatgagctaaacattatcgttccaagttactggagttggaaccctgagaagcctactatgcatgatacatcgctaaagaagattattctatcatctcttagaggtaatcttgctatgttttctggacatgagaatcttgggtataaggttatttcagcaggtcagcgtgtgcaacttcacccttcgtgctcattgttcatttatggcagcaaacctgaatgggtggtattttcagaaatcttgtcggccgtgaatcaatatttggtatgtgtaactgctgttggtcttaacgaagtgcttacagttcaccccatgtcttttattaagcaactggaggagagtaaattgcagaggaaagtgattactgggataggaaataaatcgctgagaagattttgtggtaaatctggccaaaatctgcagaatattatctcacttctgagaaaagattgcagagatgatcacataatggttgatttagacttcagtagcagtgaagttttattatttgctaaagaacatgacatggaaaaggtcttttgcaaggtcaattatgctttggaacttgaagctaaattgctgagagacgaatgtgacgagagaagacctggtagctctactattgcactatttggctctggtgctgaaatcaagcatttggaacttgggaagagatatctaacagtggaaattctgcatcaaaatgctcgtgttatagatgaaaaggaacttgtttgtttggtagattctcttgttcctggtatagcaaattttcataaaaccgggaattttcagacaaacttagatgaaacaaagtgggggaggtttacgttcctcaaaccggattatgctgaagatgctatttcaaaattgaacgggattgagtttcatggttccttactgaaggttagtcctgtaagcatttacagccactcagggctaccatttcctgcagtaagagctaaagtttcttggccacgtaaggcaagcaggggagttgcacttgtaacatgtgctagtggtgaagctgaatttattgtaaaggactgctttgcccttggagttggtggaaggtatgtcaactgtgaggttagtaataggtacgcaaactgtgtctttgtcacagggattccattgcatgtaacagagccagaattgtatgatgcttttcatagtacaacaactaggagaatccttgacatccgcttgcttagaggacagcccacagctagctcgtccgtttctgaatgtacagaagcactgatgagagcgatatcactattcatgccaaataggaactttccttgccaaaaattccgtgttcaagtgttccctccagaagagaaagacttaatgatgaaagctaccataacctttgatggaagttttcacagagaggctgcaagagcactggaccatcttcaaggaagtgttcttccttgttgtctaccttggcagataatccagtgcgagcatgtatttcatagtactgtctcctgtccgatgcgcatttacaatgttatcagccaagatgttggtgctctacttgagagcttccgtagccaaaaaggcgtggcatacaatttggagaagaatgagaatggaaatttccgtgttaagcttactgcaaatgccacaaaaacaatagcagatttgagaaggcctcttgagcttctgatgaagggaaaaataataaaccatcctgatctgatgttaagcacagttcaattgctatggtcccgtgatggtatggaacaattgagatcagttgaacgggagaccggcacttatattctgtatgacaggcaaagtctgaatattaaaatttttgggagcactgataatgtggctgcagcggaggaaaaattggttcacgcacttgtacagctccatgagaagaagcctcttgaggtttgtcttcgtggccggaacctcccaccaaacttgatgaaggaagtgattgtaaagtttggggctgatttagaaggactgaagaacgaggtccctgcagtagatcttcagttaaatacacgaaggcagacactttatgttcgaggcagcaaggaggataagcaaagggtggaagggatgatctctgaactgataacctctagtgaccataatgctcaactgtcgtcagagaatgcatgtcctatttgcctgtgcgagctagaagatccctttaagcttgaatcatgtggccatatgttctgtttagcttgcttggtggatcagtgtgaatctgccatgaaatcacaggatggcttccctcttcgttgcctcgaaagtgggtgcaataagctgttcctcctagctgatctgaggtctctgctgcctgacaagctggacgagctgttcagggcttccttgaatgcatttgttgcatctagcgcagggttataccgtttctgccccacaccggactgcacatcgatttaccaagtagctgctgcaggcgcacaaggcgacagaccctttgtctgtggggcttgctctgtggagacctgcaccaagtgccatctcgagtaccatcctttcatctcctgtgaggcatacaaagagtacaaggcagacccggatgcaactatgcttgaatggcgcaaagggaaggagaacgtgaagaactgcccttcatgtggatttacaattgagaagagtgaaggctgcaaccatgttgagtgcaggtgtggcagccacatttgttggaattgcctggagaacttcaagagcagtgaggagtgctatggccatctcagatccgtgcacttatcctatgcagatctgatgtaaatctgtacagattgtaatgaatcacgtggtctataatctggcaagctgaatttgccttccaacagtgattgtctgatcctaaccggttcccatctctacctgtgctgagaatattgtaggcgctttatcatttgttactacagcggggaatgctctagtgtgcatcggggacggctaac

SEQ ID NO: 39241 - DNA, 2720 bp, Zea Mays
ctcttgactatcagaaccaatagtagcaagatgatgtgctaccttgttacatattctaggagcaaacaacaccttaacatcattgaaacatgatctatctcataaacatgtacaggaggggcaacggtggtacacttcaccctctcatggcgcccctgggggcgattggcgccgccgccgccagccctggtcgcccgcatccggttcggggggtgctccgtcctttctccgcgggcggggctagcgctcctctccgtggtggcctcgggtcgtccctccacgcggcggactcggtgtccggtcctctgcccaaacctcttctagagccgtttacctgcgtggaggatgaggcattgaagtcgggcagcgttcggtcccgtcgtcgtgctactgatgactctgctgcgccgcgcgtgagtggaatgcctctccattccgctaccggggtcaacgatgggggatgggaggttgttcggccgcggttttggtggcgcaaggcattgaagaatcctgtgagatctccacgaaatcttcaactggatgtgaagggcaccaatcttttcaaattgaagctcaagggtaaatgctacaactgcctctcaccggctcatctcgctttctgctgctcggctcccacgcgctgttggcagtgcttacaatccgggcacaaggcgcgatattgcaaccaaaaagtcagccagagaacattcaatgctgctcaatgcttccctgaaccagccgtgctcgcatctaagagttccacctaccaggaggtgctgctaaagccagacaaactgcataagtatcaggatctgcctcatgtgaactcacttggtcatccgcccccatcgaccaaaaagtcctacctccaggctgttctggaagaccacggtatggaggcacgctaccctggtgaccctcgtgtgaggccagcgcgcgccttctgtgcggtctcggcgaccggctctattcgtcgccggagagatgagttgattgacacggccgtcgtctgctccttcgacggcaacagccacgaggttgacattctttccgcaggtgatatgctgagggagaagttcagcttacaacacggtcagtatcaactggtcaagcatttccctgagcaattctttatcatcttctcggaccctaggtcgaagcagtgggcgctggataggagatctgtctcatatcgtggtcgaattttccattttggggattggtctgaggacagctacgctagaaaaacaaaccttgaatttagagttaaagtccgggtcgaagggatctcggtgcactgttggggggaagatgtggcttcaaaggccttgggcaagagttgtgcaatccactatgtgcaagagcgcacaaggcgtagggagcgtaccaggtcttttgacctatgggcttggtgctctgacccgtgtgacattcctaaagaggtcttgcttacggttttagaaccagacagggaacttccacctatcagcacgcccttagctcttgttggtgctcagcaagatgcccctgctgatctgaaagctggacatgtttacactcttcgcaaccacattgaggtggtggaggatctctctttcctccgtgggaggggttccagggggggtccgcctaatcgcaagcagcgcatggagtttatttggagctatggcgccccagattcagtgggtgaaaaaagagaacgggtggaagctgttagaggaagagagattgcgcgacgggactggggtcatgatgatgatgatgatggggattttcagcgtagcaggcgctgcggcaaccgccgtcatcgcagcttgtctggttgggcgcgctcgtcgcgatgtcgagggggcatggacgactgttacagttccaatgacaagcagcggcacttaactccctttcgtcgccatggctgggagtcgaagctgtcttctcgctgggtacccaaggtgaaggtccgatctgtttcttttgcagaccccatcgttaccgctgtttggccgcaggaggataaatgtgggcaagctgaggatattggtgacaggtctggttcgatgggcgctgttattctggaacctgtgcgcagccctgctacaaccacatgcaagctggcgaggcatttctctaggcctttgaccaaggaacaaatggaggcaattatggagctggcaactctggggaaggaaaaggaagggatcaagaagaagggcagcaaggtgacgcccctcaaggctcctattatcgaggcttctgagatgctataagttgtaatttgagttgtgggggtagttctagtgcatcatgttgtgtcgctggtgtacttgcctgtgggtcgcccaggttcttttgctggctgtttcgtgtgccaggttgttgcctgggcagcggtgtttgtttctttggttggtattttcggtgtctctatctgtcttagtatctgttgtaagacgctggtcttttgcttctggaagcaagttacggatggtggaatcctggttggctcctgttcttctctcctatcctgtgttccccatgtgtgacaactttttaattagtggagctgttttggattaatgaatatcaactgttgtattctgtcctggaatgtgagggggctaaatgaccctgccaaaagagaaagtgtgaaacaattgatcctatcttctggcgcaactattgtttgtcttcaagaaacaaagattatgagctggacctgt

SEQ ID NO: 39242 - DNA, 1311 bp, Zea Mays
gaacaacacgcattcctacaatcggacaatcctactccaagcattgagggacacggaggcggcgccgttcggcactgcacgctcacgggctcgcgcattagtggatactctcccccggcgccacgaaatcgtccgctctcaccaccttccatcggtccctcacgatcttgccaagaatccaagatccgcctgcggtagctagcggtcctatcttgatccgatggtgtcaccgactccgggagggaaggatgcaagggagggtggcggcaaggcggagtggatgatctacgccttcgtggcgcgcggcaccgcggtgctggcggagtacacggagttcaccggcaacttccccgccatcgccgcgcaatgcctgcagcggctacccgccgggtcgtcctccgccggcaccggccctgacggccgtggcgatgcgccggcacggttcagctacgcctgtgaccgacacacattcaacttcctcttgtaccgcggctacgcctattgtgtagttgcggaggaatccgttccaaagaatgtctcagtggcatttcttgaaaggttaaaagatgacttcatgaagagatatggtggtggtaaagctgacacagctcttgcaaaatgtctaaataaagaatatggacaagttataaagcagcacattcaatatgttcttgatcattcagaggaactagataaaatgttaaaagtgcaagcccaagtttcagaagtgaaaaatataatgttagacagcatagaaaagacactgggccgtggagagaaattgagtgaactccaagacaagacttctgagctacatattcaggcccagcagttcaagaaacagggagtgaagattcgcaggaagacatggctacagaacatgaaaattaagttggtgattcttggaatccttttgctccttgtaatcatagtatgggtatctatttgtcagggctttgactgcaccaagcatgaaacataatagaaatgggttcttttaaaggcttcctcaacagctccttcaataaatctattaaacgacgggcttctctgctggattctctataaaaataggaagaagtcgtctcgagaaacctagcaaagctgagagcccaaaaaagaaggcttctcttgcgtcattcccttcccctgaaaatagaaagagttatgtttctaaccaaataaagcactctttcggacttcctaaaaataatgagaaagttattttctcatatgagatagagctggagttgtgatgcagagtcctaccaaagaagagggtctaagatcttaggccttgttccaatctcg

SEQ ID NO: 39243 - DNA, 3838 bp, Zea Mays
agagaggctgggactgggaggagcgcagggcgcgattacgcggacgctccagtctccaccctccagagcagacagcaagcgcccaagcgccatgatgttgccgccgccgccaccaccgtcctccttgcgcgaccttctctcgcgggagcgcgtcgacgaggacgaggcgccgcatctgtcgccgcgacgcgcctccgggcggtcacccccgcgccgcggggcgtcgtcgaggtcgtccaggcacacgtcgtcgccgccgctggccacgaccacgacaacgaccagggaggcggagggggaggccgccgccgccgacgcggtggtcgccgtgctgtccgcgtacgccgggaggctgctcagggacgcggaattcaggcgggcgctccgcgacaagtgcgccgcgtgcctcgcgcccgccgcgggcgcgggcgaggacgacgacgcggcggcaggccgccccgtgctggccaacctcgagctgggcatcgagagcatagagcgcctggccgcggacggctccgccgcgcagccacaggcgccgcgcgacgccaagatccggtcgctccgcaactccatccgcctcctcagcgtcgtcgcgtcgctccactcgccaccgccgccgccgcgccccggcgccgccgcgggggacggcggcggccgcacctgcggggtgcccaactcgcacctcgcagcctgcgcgcagctctacctcgccgtggtgtacaagatggagcgcaacgaccgcgtcgcggcgcgccacctcatgcaggtgttcgccgacgcgccgggcctcgcgcgcagggagctgctgccggacctctgggaccacgtgttcctgccccacctgctccacctcaaggtctggttcgccagggaggccgacgacctcgtcgctggccgggacgccgacgaccggcgcacgaggatgaaggccctgcagaggctctacagcgaccacatggacagcggcacggctcagttcgctgtgtactacaaggagtggctccagtcaggcgccgccgcgccgcctcccgtcccctcggtgccgttgccttcgacgcccaggagtttcgacgggcgcgagaagagctcggcttcggtgcacagaacctccatcaacagagacctgtataatgcggttttcgggacagctctcgctctcgggcaggaagacgtcaaggatacaaagctggacgatgggactggactagctctggatttggatgtcgaattggatcacgatgctgcgggcttcaagacacagaagcttgctcatgcaaactagcattggcatctatcttttagacaagtgacgagttgtggtcactgtttgcagctgacaatttaagtggtgccaaggagacagccgtttgatccacagtaaaatggggctccaggaaaagcactcccgctctcggaaagaaggcgccgctctagcagaaacagcacctgcgcagcggaaatcatactcctttcgactgttctcgtgccaaggcgatataagcaggaacgtgatcagccatcccaaagcagcgaagaaggaacccgtggtgtctgtcgagaaagagctggacagcagcgagctagctcctgctgtcgtgcctctgctggaacgagcggtttccgtggtatccagttcggacagcctgagtcagtgcgaggacgccgtgcacgaggtcgccagagcatgctcggcctgggacccgagcctcgtgaacctgctgtcgtgcgcctctttcatccaaggccttctcgaggtcacgctgacctccaaagacgacgccgtgctggagtcggccatgtcgatcatggggaagctggttctggggaacgaggtgatcagacagctcgtgctcaacgcggacccgcagctggaggttttcctgaggctcctgaggagcagcgagctgttcctcaaggcggccgtggtgctctacatgatgaagcctaaggccaagcagatgctgtccctggactgggtgccgctcgtgctgcacgtactggagtgcggcgacgaggtgcagtctctgttctccgtaagatgcgcccccaagatcgccgcgttctatttcctggaccagctgctcatggggttcgacgttgacagaaacgtcgagaacgcgaagcagatgatcgctctcggtgggctggacctcctgatcggcaggcttggcgctggcgacgctcgcgagagcaggcactgcatcgctctcctgaccacgtgcgttcaggccgatggcagctgcaggcactacttggctgatagtctcaagaaggagcctctcgttcagcttcttgctggaaatcagaggaaagccagtgccgcgtcccttaacctgatgagtgaactcgtctgccttaacagaacaagcaaaatcgtggagttcgtcaaggagctgaagaacagcgggtgcttgaacacgatgcacgttctgctggtctacctccagcaggctcctctcgtccagcacccgttagcagctaccatgctactccagctcgatctcctgggtgatccttcgcagtacagcgtgtacagggaggaggcgatcgaggccatcgtagccgctctggagcacagctcgcagagcaggaaggtccaggaacagtgcgcccgagctctcctaatcttggcagggcggttctcgtcttcaggagagcccgtagcagaagcgtggctgctaaagagagcgggcctagacgattccctctctgagtccttcaggagatcagaagtattcaaagataagagtgttcgagcggtatgtacgttcagttcaaatgcccgaaaaagactacgattaaatgttcgggtttttttccctaaccgacatgtttgcttgcactgatgatgacttaggaggaagagaagctagtggaagaacggcagaagaacctcgccttgatgctactgaagagcgggggcagaaggttcctcacggcgctgtcgagctgcatatccgatggaaccccgagcctcagccggtcgtgcctcgtcagcgtggcatggatgagcagctccctctcgccgctgcgcggatgcaacgacttccagcccctggcatgctccgtcctcgcgtctaagcttttggacagcttgagctacgacagagtcctggaggagagggtgctcgcttcgctgtcgcttctgaacgtcgtgagacacccaggtacgtacgtctgcaagactggtgacagccaagtgactgtaaaaagaagaagatgaattttgttttaagagcgactgtcctaatctgacagaatgcatggagaaggtcttcccgctgaagaaagaaaccatcgagtcactccaagatctcgcggaggtgacgtggactgcgaaggagctcctctttgcctgctgcagatgagatgcaagaccagatcgtcctcagcgatgaagaactagacaccagcatgtaattggaagtgattgttttgggagaagagtgatcgccactgctgtacacagattgtttcgtacttccgttgatatgtgaagccccacagatcctttccctcgtcatggactttggctttcgctgttgaattgaagcctgcacatggcttcctttcttcttcttctttagggcttgtttagattgccaggtatccatatcaatacacatccatgtgttgtacgttaacacacaacatactatattgagttggataatgatcatccaaataagtccttagttttacattatcctatacacgtggattgagttgaatatataatcacccaaatgtaagtcctcagtcgtagttcgttcccgtgataacatttttttgtctccagtgaaaataaggcctattggatctcccatcatcaatc

SEQ ID NO: 39244 - DNA, 747 bp, Zea Mays
tataggcacgggacacagcccttacaaaattacattcatgccctttacaattgataataattctatagtagtctatcgaggtctgaatagccttttcatctttaagtcggttccactctttgctgtcacgccgaagctttcctgctcacaccttcggctctgtatcaacctttgtattattccagtttacagcaacgccgacttgtccgagggtacctgctcacacattgtactccagaaatactgttaaatcctatttttgaggaccttcggatgccgaaggtccccaacacgcccgaaccaggggctcggactcgacctcggccacggaagacagattcgacctcagcttcggaggagcttccacatcgcccaacctagggcgcagaccagacacgtcaacaggaggcgccatcatcaccctaccccgagctgactcgggccacggggaacaagaccggcgtcccatctggctcgctccgccagataggcaatgatggcgccccgtatactctgtgacgacggcagctctcagcccccttacggaagcaagaggacgtcagcaaggactcaacagctccgacagctgtccctccgccaggctccagcactcctccgacggccacgacatcacaccagctgggtgccaaaatctctccggctgccacgacggcatgtacttagggcgctagctctcctctgctagacacgtagcactctgctatgccccccattgtacacctggat

SEQ ID NO: 39245 - DNA, 1317 bp, Zea Mays
cgttcacggttcatccctctgtccagagcatcattccgaattcccaacgaatccggacacgccgtgaagtgaagcccctcgtcgcttctcgtagtctcgcatccaccgctccaccgtctccatccacgcgcccgcgcgcggcccggcaacgggagccaaggaaaccgaagccccgatggcgagcttcttccgggacgcgcgcctcccgcagcagcgcgtcgtggagggcgtcccgttcccggcggtgctggtcccgagcgcccccgcgggcggcggcctcgacgagttcctggcggccgtgcgctccgagagggcgtcccggctggagccgctggtgcggcacgcgggggccctgctgctgcgcgggttccccgcgacgacggccgcggacttcgaccgcgccgtcgacgccttcgggtacgaggagctgccgtacgtcggcggcgccgcgccgcggaccaacgtcgtgggccgggtgttcaccgccaacgagtcgccgcccgatcagaagatccccttccaccacgagatggcccagtggagccaaagagtggcggggagacaccgatcgtactgagccattacgtctacaagaggatgcaggaagaattccccgaattcgtggagaaactggagaaggaggggctggtatatacaagggttctgggggagggcgatgacccgtcttcgccaatcggccgtggatggcagtcgacatttctcactaaagataaagccgttgctgaggaaagggccgccaagctcgggatgaagctggaatggaccggcgacggcgtgaggacggtcatggggcccatcccggcggtgaagtgggacgagagccgggggcggaaggtctggttcaacagcatggtggccgcctacacggggtggaaggacgcccggaacgacccggtgaaggcggtgaccttcggcgacggctcgcccctgcccgccgacgtcgtcgccgcgtgcggccgggtcctggaggaggagtgcgtggccgtgccgtggcggcgcggcgacatcctcctcctcgacaactgggccgtcctgcactcccggcgctccttcgagccaccgcgccgcatccttgcctcgctctgtaaatgatgtatgtatgtatgtaagtgccccgccatggtatgggttttttacttggcagtggaactaattctggatgggcgcggatttgctgctccgacgagcgatgaacgcctgaaactgagaataatttcacacgctggagagagcggtgtttagaaattccatagtgaagaaaaccgttcacccgttatgccacgtcgcctttccgtc

SEQ ID NO: 39246 - DNA, 1994 bp, Zea Mays
tttcaattctccctttctgatggaagggctcgcccctaaaattgtgacgacatatcgagttttggacgtgcaggttcgctgggctgcaactggtgttctccttcacgtcgttgcgcgtgacgagggttggcgaggcgaggaagcgtgctcttgatcccgagtttaaagagggcgggcaacataattggaagcaagttttgtcaaatagcggtattgcaagtatctcggttgtgttgatagcattagtcatcagagggatagataggtgtttagattcaaaagagtcaactcttgttactgctcttattgatggtgttatctgacattatgcttgctataatggagatacatggtcatctgagctcgacattctttgtaaagctaagccacaaattatcacaacattcaagagtgcggaaggctaccattggtggtgtaaccatagatgggcttcttgtagcagcagctggattcttgattgggcttgcatttgtgctgataagatttttcaccactcaatgtgctcctgatgtattctggaaccagctgctagctatacccttggcacagctgccgccctatgtagaagtttgatcgattccttcttgagcgcaacagttcagtatagtgggttctacagtgttcgcaaaaaggtaaagccaacaaagttcaatatttaaaataactcgatgtgtccagggtttgcaagacaagattaagcagctctaagattaagatagttgccatcgatcttgccacaatttttacttgagctgagcagataacaagcggcttggggtattgatatttatttttctgtcttgtttaatctgtttgttcaattaatttcaaaacagttagtgcttcagaatctcataacagattctgaatacttcctttgtcaaagctttcacttgtctgaagcctgctggaatgccacagcgggacaggagcatggggatgagcaggcgcaagatgactgcaagtggcgccggatcccgacgttcggcgactggaacctgcgggacgacatgcccgtcacccaatacttgcaagcagggacttcttcatcgttgtgccgccggcagagaaggacgacgacgaggatctgttcaaggtgccccagtgttcctgccaagccctacaactacaagaaggctatataaattcaagtaggaatgcaggatggggtgcattcaactcatgcaggtggcaggttaatggaagtggccaattctgtggcgtggctgagatgattggacctgtcgatttcgacagaagtgttgattactggcagcaggataagtggagtggccagttccctgtgaagtggcacataattaaggatgtaccgaacaatcttctgcggcacatcattcttgagaacaatgacaataaacctgtcacaaatagcagggacacacaggaggttcaattaggttggcatgatgctggtacctatgacaagaacattatcgagtggcccaagtgcagtggcgctaatggtagcttgagattcaaagtcgagttgaagcatggggccaatgctgatcttgtgaatgctatgaagctgatcccgccttcaacgacgtccgaaccccatccgcgatccatgtctgccgcgccatcctcgcccttccatctcagcgcccccattcgtgcttgaaggaaggcccattcgtgttggaacgaatcctcgctcaaaatccatgcgcatccgatgaggatccagagctgccctgctgcccttccatcctctttgtccctttccatcgtcggcgatccacttctatcggcggcgcccccttctagccccttccatagttgtgcttaggtacttctctctatttgtgaaatctagggttcttagtgtacgattgtcaatatctctataaaagaatagattagtgtacgattgtcgatatattgtttgttttcatgtaattgttgtgcactcgcgttttattaataatttgtgagtcgtcgcaacgcac

SEQ ID NO: 39247 - DNA, 1310 bp, Zea Mays
gtcaggggtacgtctatctcccctccagacctccacacgccgcgatggcctccgccgaaatccccaactccagccctgatgccaccaaccccgccgccgccgccgccaccgccaccgccactgccaccggccccgacatctcctcttcgccgccactcccgccgcggaagcgccgcctttcgccttcctcatctcccacgcgctccgcgtcacgctctcggtcgccccgctcccgctccccgcgcggccgccgctcccgctcccgcagccggagccggagccggagccgcagccgcagcccgcagtacccgcccgacggcaagcggcagcggcacaacgaccttaccgtggaggcgtgccgcgacttcctgcgcgataggtgcacccgctccgacctcgagtgcagatacgcgcaccctcacaactcagcttccgtcgaccggcaattgctgagatcaattggtatggaagatccaaatgtgaagacgatctgcagagattttacacgtgggaagtgttcaaggtcagcaaatgagtgccgattcttgcaccattcatctgttgaagatgctgcaattgtttgccaagattttttgcgtggacaatgcaatcgcatagcatgtaggtactctcatgtagtagcacatccggtgccaccaatgagccatgttcctatgccataccctgagatgctttacatgccaccaccaccaccaccacctcttggagtaccaatgatggggcctccgccttcaccatttgctgataataagaacagggttgaagtttgtagggacttcttgaagaacatgtgcaatagagaatcctgccggtttttacaccctgggacacatacagcggctgcgagcgccaatgttgaagtatgccgtgattttaaacgaggagaatgcaatcgacctgcctgtcgctttttgcatccatatacaagttgaagttttctgttagctaaagtaaagtaaattgtaccttgttttcctcttcataatacaaatggctgccaaatacatatagatgaaagaacgctcccctaagaacacatagttatagagttaacttcaacgtcaacttgtggatcttttgtccattcaaaccagctagagcaaaatagattttaattttggtaatttttgtcatttgggtaaattaaggtattttcaatgaaatgcaacttttatctgatctgaacaggcatgcgaatgatcatgttggttctctaagatttccaattggctaagatagcatgcacttgttgaagtgatccactgtttgaccagcttcattatctttta

SEQ ID NO: 39248 - DNA, 1436 bp, Zea Mays
agcccaccctcggtgtctccgttcttccacgagtgttggtggtcaccaaagcttcatcttggcatcaggaagctgcagtgtggtgaagatgatgaaacctggtgagagaagcagggagagggatgctgatttccactattcgggtcacgacgatgagaaggacaggtacttcttcaaggttctggttggcgatttccgtgaacgactggccgtccctgacaaattcatgcagcacttcaccagagggctagtcacaagcagtgttacgctagaatcacgctgcggacgcagtttccatgtccaagtggctgagaatctgggcaaggtggtccttcaagcggggtggaaggagttcgtcgctgcgcatggcttgagcatgggggacgtcctggttttcaagcacgacgggactcctcggctgaaggttttcatgttcgaccatagctgctgcgagaaagtgccgccgccatgccctgtcaagatcaagcgagagcatcatgtctgtggcggagagagaagggagacgcaccctgaagttccaagcagcagctgtggagatgcttccatgacttttgtcaccgctagctcgtcgtcagcctccccctccgacgacgcgtcaggagagtggatattatctccagaagaccagaaaccacgttacgttccaggttacatcctcccaaatggaacctacctcacctgtgtgcagatgcagaaactgaaagaaagagtccgagctaggacttctactatccccatctacggatgcaccgtgaggaagagcaacattcgtaggggatctcagaatatggccataccaagagcatatgctgatgtatacctaccattcgaggaccgaacgctgacgctccaacgctgcggcgagagctgggaggtgcagtgtcggattcagaagggcagacgcggatgcaaaaggctcgcgcaagggtggaggcagtttgctcacgacaacaagctgcagctgggagacctctgcctcttcgagctacttgagaacaccagcaagtacacgatggatgtgcatgtcgttcgcgcggaatgaaaattgcatgcacaggcagctgacgctcttggcgccagcatagcttttgcagcaacatgtggatggtggtagcagatgcatgcttgcccatcctctctggttgggcaattggttaactcgtgtgtgccgccgcctaagttcaggcttcagagtgtttaacttgtgacccatattatgctccagcaatcgtttgaggacagaggtcatcacgatttgatttgtctcaatgattcgggtccaacaagcgaaataaaaaagggcaggaaaacaacgatgactcgggcaaatctaagcatgtggatcatgtaaaataggagacatgatattgtagatgacacagtaaatgacactgtttatagagcgaatacttata

SEQ ID NO: 39249 - DNA, 764 bp, Zea Mays
cggacgaattgcttgtcaagttccgaaagggcgcacgggaagttgcagatgaacctgctcccgagaagcctgcccctgcgaagcaagggggctccaatgacagggatctcgctcttgcaagggtggaaacagagaagaggaactctttgatcaaagcttgggaagagaatgagaagacaaaagctgagaacaaggctgctaagaaagtatccgctattctttcatgggaaaacacaaagaaagcaaacatagaagctgaactgaagaagattgaggaacaactggaaaagaagaaggctgaatatgcagagaagatgaagaacaaggttgcaatgatacacaaggaagccgaagagaagcgagcgatggtggaggcaaaacgcggtgaggaggtcctgaaggccgaggagatggctgccaagtaccgggccaccggccacgctcctaagaagctcatcggttgcttcggagcctaagaaaccttccaagtcagaccgagcagaaagtgaaaaacgtcagccagtgattgcttggtcctctcgctctatcaagtgtgtagtgtgtcttcgaaagtttgtaaagcctactgctgctgctgtatatactgatatcgcttccaaggcaggcgtttggtggtgtacatgttgaatgcttgacgagaaacattcttgtgtgtagttaagaggtcacgctgttgttgttgttgttgacattcaagcagacattttgttttcttctggtttttaaatcataataagaaaaaa

SEQ ID NO: 39250 - DNA, 1401 bp, Zea Mays
ccacgatgcactcttagttatctgtacattttataatagtatatccactcaaatcaatgacatatttcaaatggattggagtttattaagaacatcctctttttcctttaactcctacacgttagagattatgaatgccagccaacccaatgggcttgtcgttcctgatgcaacggtgcatcctgttaattcaacatccgatgttattgagttaatgagaataggacatgcaaacagagcagtgggttcgacaatgttgaatgaaagaagcagcagatctcacagtattgttaccatacacattcgaggtgtagatttgaaaacaggagctactctgtgtggtgcactacatcttgttgatcttgctgggagtgagagagtggaccgatcttctgttacaggcaatagacttaaagaagcacaacacataaacaaatctttgtccgctcttggagacgtcatattttctctaccgcagaagaatgctcatgtaccctaccggaacagcaaacttacacaagtcctacagagttctttgggcggccatgcaaaaaccttgatgtttgtgcagatcaacccagatgtctcatcttattcggagactttaagtactttgaagtttgctgaaagggtttctggagtggagctaggtgcctcaaaggcgaataaagaaggcaaagatattagagaatttatggaacagctctcactgctcaaacataaaatggcaaagaaagatgacgaaattaacagattacaacaactcaagacgcaaactccaagggtcaggactgcaaaacgtgcagattccccattgaaacattcgtcgtcgtccccaggcatatctaatttaggaagcaaaatccaacatagaaggacagtatcaagtggaaaggcaatgagcattgccagtagagctgggtctgataccttctctgacaccagtgacaggcactctgaatctggttctatgcagtctgttgatgatatcctaccacgtagggggattatgggtcttccgaagctctctattggtgaaatgggtcagaattctgctgaccctgagcttgtttgctttgactatgctgattcagaagagagattaagtgatatatcagatagtggtctttccatgggtacagagacggatgtttcagtaagcagtatagttgagttgacacgttttcaggagcaggaaaacatacctagcactctgaaagaacaagagagtgcacgaaaaattccaaatgatcagttgtccaaggtggccacccgagttcagaagacaacagtacccaaactagctcaaacttccttgtggcctaaactaagagatcctccagcccttagatccccaggaactcctccgcatgcggtaccttcgacgaaagtagagcaaca

SEQ ID NO: 39251 - DNA, 2302 bp, Zea Mays
caaacaagtacgaggagtcgaggactgcagctgccccaccaaacgccgacctgccgggacatggcagctgcggcgccggccgcgggcaagggaaaacgaaagcgccacctctccgaggacgacgtctgcctcctccaaaggtacaatccggggacgatcctgacggcgctgcaggaggtggcgcagcatgcggagggccggatcatcgactggagggcggtggtggcgaagtcggccacggggatcacctccgcccgcgagtaccagatgctctggcgctacttagcatatcaccacgacctaaacgagagcatcgaagccggtgacctgcctctgggcgatgacagtgacctggaattggagcttgaacccaatcccagcgagaccaaggaagctttatctgaggcctctgcattggccaaggcgctaatatccagatcttcacgtgagcaagcctcgggtcatcgcattaatttggatgttcctgcgctgaacactcaaaatgaaaagatagtgcgggttccatctaagcagcttgctcagagtcatcgtgtaacaaatgttacatgtcctgtttccaatccaaaacagttatctcatatagtaccctctcctactcatttggatccaaatggagcttctaaaaagagaaaaaaggcaaaagcttggtctaaagaggaggatgcagacctagcagctggtgtgcagaagtatggtgaaggaaattgggaggtcattttgcataaatgtaactttgataatacaagaacgcctgatcagttatctcagagatgggcactaaaacgcccaggaggatcaaccaagcctgctagcactaaacacgcctctgttggctcagaagaaagatcagcaactatcaaggcacttcatttggctgtcggtcctatgcctgtatcatctgcactaagatcaggacgtgaacaaagcattcagcataagtctacagcgtttgctcctaagatgccacaagtaagatctgcagtaaccccttcactggcaccggcactggcgctgccagtccaacctctgcgtgtggcagctgaagttcagtctccgcttcgtcatgggcaacaagctcctggccaagttaatcaatcagggccacctgctggagcggaaactaagaaggcattgggtaccacactagcacctgtcccatgcgacagcgaggaaaatgaggatggctctgaattttgtgcgattacgttagatgacttattccctgaagatgcaaagcagccggaaactgtggataccaaggcaaagcaaccagaaaccacgggtcccaaggcaaagcagccagaaaatgcagatcccaaggcaatgcatcaagaaaccatggatcccaaatcaaagcagccagatacactaaaggttgggatattagatcccaaagataaagacatgctagagttcgatcaatatgttgcttctcaaggagcacacttaaacacggatgatctgaataaaagcaagtgtaccaacagtgcttcccaagcccaaggtcttgttggcagccagaagaacccactgaaactgactcctgtggacgggaaagctaaccctgtaactgcggctgggagaggtaagcctgtagctgctggagtggcatcaaccggaaagaaggctacaatccctatctcacatttggcagcagggaccccacgcggcatagttgacacagtcaatgccaacgccccaattagaagaacactaacaaggagggcagccgcccttgtccccgctggttgccaagctcctcccccgaagcatgccatagacgcgaaaggctgccaaatgacgaatagcattgccacgtttgtcagttctggagtaccagccagcagccaggctagcacgcccgcgaaagatgctaacaaagcaagcccaccgtccagcagctgccagcccaagccggatagtgtggcggtgaacggtgctatcagggccgtgaagagtgttgctaagaaggggaatctgccagcagcagcagccaggcaatagacaggaccctgaataacacggtaaattttgtagtaatacccgtaggacttttgcgcgtcgattgtaccttggaatgtgaatattagtcgttttgcgtgtcattcttttcaccttgcatttgggtgatttttgtctggtattcctgctgggcatcgctaacgtaacttgaaagacgttctcgtctagttcccttgtgaagtgtgatgcttgtgtgtgtgtgtctacttgcgcccgaggcgatggtgccgccatctttgtgcctgtctgtctgggcagg

SEQ ID NO: 39252 - DNA, 228 bp, Zea Mays
acgcgcgcatggagagagaaggggagaggagatccaagggagaagacgactgcgacttaatagttaacatgaaagaaacataccagagagaactcaccggagaacaccggagaaacatgccagagactcgttggcggcatggggaggctccagtgctgtgcggtcgtcgacacgagcggggcggcgaaggcgatgtgatgtgtgggctatttcggtcctagggcatcg

SEQ ID NO: 39253 - DNA, 881 bp, Zea Mays
ggcattggtcggacccgcgtggttctcccgtgtcctctctctctagtgtcgacgagtgggcgaacgccgccaccgccttacgccagtcgccaggcgctcaggttttcatcttcgggcccttcaccggcgaccagcacccaacagttacatgtgcatcaggctttgatgattgctgtacaaggatgatatggcctcccgcccaaagctgtctggtattcagaagcaggttttggcgctgtacaggggattccttcggacagcacgccttaaggcccctgaagaacgccgcaggatcgagtctgttgtctttgcagagttccgtgacaacgcaaggagtgttgaccgtaggaactttgtacacatagagtacttgttgaggagagggaagaagcagcttgagcagctcaagaatcctgatattactggactcgctacccttgtagtaaagaaatgagcaacagttgtcgaaatttacaggtccattcattgccagaacaaagtatcatcatgataccggtgtttctaatgtgaagatttggaacctgccactgatggtgtccaaataaaataaatatgaccacagattacagatttgatatccagggactttctaatcagcctattagaatctgaagataaatcttgtagcacctgtccggtgacccatagtaatattattttactcttgctgtaagcagaggttaacactaaaaaaagtattgtgattggtctgaactttttgtgcggtataaagcatgtgattcagctcaacttgacttttccaactttaccgagcatatacaattgtgattaatatagaggctcttaaggtgtttaaatgtgctatttacaaaaaaaaatcgtagagtcgtctatgaatt

SEQ ID NO: 39254 - DNA, 2013 bp, Zea Mays
  misc_feature (2012)..(2013): n is a, c, g, or t
tctccctctcgaagcgacgcagaaccgctcgccagtgtcgcagtcgcctcctgtccctctcctctctctttgccgctgccctcctctaagcatctccctctcctactccctcctctcaaagcacttgttggccccccaccgccgcatctgcatcccataatcgcctacgccatcgccgccgccttcgggtccttctcgctcagcctcgactgctcgctcatcttcaccgaggcgctcctcacccccgccatcccctccgtgtcggcgtgcgccggcggcatcttgcccagtctcagccgatttatccttcggtctgttagggccttatcaaaccgccgccacggcgaactcgcgccgctgccatgttcgcctcgcgcacccaccatctcctcaacaacgttcaaaccgccaaccacgacatcctcctccacaacccgacctctcacgcatcccaacttggtgcggcgtaaacgcgcagcagcacttcgcctcggtcgaccacggcctgcccccaggcgttgacatccagatccatctcgctccgatctacattcgagaagtttgtctctggcatcgattccccaatccgaatcattgccgacgtcttctttgggtggacggtcgaagtcacgcgcacgcacatcccacacttgttcctccccggcggtgcattcagcaacaccgtcttcttctccgtgtcggagcacctcgggccataggggcagacccgtgaacgacattcttttggcgtgtcacgacctcctgtcgcaagctcgatgctctccccatcgacacgtgagccccttggagggagccccgacctagattttactgagagtttctcctcatcaacctagatctcagtttctctggactttactgagcactcaacattgtgttttttggttgctggtaaattgctcatttactgctatagttgattagtaaatataccggtattagtatttatatagttactggttacttgtaatacaaacatttttcattgaagcgcgtatatggtttgtaaaataccagaacaaggtcagtacttttatcattggcgagtatcttttatgtgagtaatatttttatttccatgtttatctacttagttctcgtggcatgctgccttttcagtattggacaatgctaatggagttacaactccaaggacaggaaggtatagtgcagatggagcaggtggtgatgcttctgtagagcttacacggccgtgcaggcacgcagctgccgcgcttggtgatttgatatttgtgtatgacggtttacgtggaggtcaaggaattccatccttgtgtttgcatggacctagaaaatgcagatttaagaatgatgcgagtgatggaggcctatcaggtcaaggaatttcatcctgatgtttgcaaggacccagaaattgcagatttaagaatgagcgagcgatggaggtctatcagagactacagtgttgtgttgtgttggttcactgtaccacaaacaatattgaagaggactgatgaagagcgcaaagtttatagcatagtcgaagattttgaattgcaattcaaggagaaagaggattgctaaaggatgaccttcaaaacaaaaaaaagctcattaaagaacatgggcattatgaaagcacaataggatccaaagaggtaggtccctttttgtcacttatttaatattcctgaataacctgtgttcggtctgaaagagcacataattgcactcctatttttaatccttacatgattactgcataactgtttatcagtttgtggtctacaggtatcaggctcgctcgcaccacagatatctttgagttattttttactgcattgcgactaattttaggcctccaatttgacaaacagaattaagtagcttatgtatcccttgtttcttgtttcctcagtatatatacacactttccaatatgacgcaggtagcattgttgtagaattgcggttcacggaaacacaaggctagcgcttttgtgcaacaann

SEQ ID NO: 39255 - DNA, 1599 bp, Zea Mays
tgcttctttataccgttttagttcaaacaagtgattcagtaaagcacatgatattgaactggcactttctatgtatagcatcccattttgagatcttactttattatgtctatgatttcttatcacaaatgaatacacatatggtatgccatggcattatttgtggcctcacgaattaatatgggataacaaaagtttagcctgctgaccaaagtaatcaaaatgcaattgctttatctttaatgtatcagacacgtgtccaagcatctacactctcatttcccgagctcatttcaaagcttccacaaattggacttcgaggattgtatcgaggttctatcccagcaattctcggccagttttcaagccatggtttgaggacaggaatctttgaagcaagcaagcttgtattaattaatgtcgctccaacacttccagagattcaagtgcaatcaattgcatccttctgcagcacagtcttagggactgcagtccgtatcccttgtgaggttcttaagcagcgattgcaggctggaatattcgacaatgtaggggaggcgattgttggcaccatgcgacgagatggcccaaagggattttttcgtggcactggggccacactgtgtcgcgaggttcctttctatgttgctggaatgtgcctctatgcagaagctaagaaggcagcacagcatgttttgaggagagacttggaagcatgggaagtagtggcagttggagcattgtctggaggacttgcggcaatagtgaccactccctttgacgtgatgaagactaggatgatgactgcccctccaggcacaccagtgtctatgcagatgataatcttgtccatccttggaaacgagggtccacttgggctctttaagggcgcgatcccccgcttcttctggattgctcctcttggagcaatgaactttgcaggctatgagcttgccaagaaggcaatgataaaagatgagaaaaattccagtgagtcaacacgagagatcttgccaagaaagcagtgatcaaccatgcaacttttttattttatttttgggtccatgttgcagagaagcaacagaacatctgcctttttttgatattgggaattacattcccgtagggccttgagatggctgtatagtatacattacatgagaaaagtgctagaggacagaggcacatgctggagctgttgttcttttgctggataggacagctcacttgttttgttatccgacgatgatccatagccttccttgttaaacacgatgtaaatttgctcttgtagttaccctgaggacatttggctttcgacccaattgttttggtgttcgaaatggaatgatagagccatgacgaaactaaagaagaaaggacaagcgttcccaccaaagaggtttaggatttagaaatggcaatgggacttgatttcctgcgggaattcctctattataagtgaacgggaaagctattctaccaacgggtggacggggacagaaaactcttctaccgacgggtggacggggacacaaaactcttctaccgacgggtggatggggatggaaagtttcttactccacgtggatgtaaacg

SEQ ID NO: 39256 - DNA, 319 bp, Zea Mays
agtcttcgcccgaagtggatagcgaagaagcttcgtccaagagcacgaataatgaagatgcacgtcgaggcggaagtgctatcaaatcattctatttctttgtttaggtatgttgctaccattcataccaaaattgtgcttagtagtccatgtaaattaggactcttgtactcacttgttctcacattagctatgccttcttcattaaagttcttccttgtaccttaccatagacttaagcaatatgcattgtactcgttaatcttcttctgtagtcgaactattgatgttctcagtcatagaaatcacattcaacaat

SEQ ID NO: 39257 - DNA, 336 bp, Zea Mays
gcacagcatggagactcagggggctggggcgagttcgtcaaggagcagaggggctggggcaccatggggaagaacctcggcgcgcagagctccacggcgagccaggcgagcagaaggaaccagcagcgggcgagacctgggacagggaggaggaagcggctgggatgggcgcgtagagcagcagggcaaggccgcggtcaggcgagatccgaacagagaagctccggccaggggcgagcgatcggccggcgatggagcaggcggccatgggaagggcagaggaagcgccgacagaggagggggacgctagcagcaaaaaatcagaggagggagagg

SEQ ID NO: 39258 - DNA, 2226 bp, Zea Mays
atgcctgactcaccggagctagtcgtgagggcgctcgggaagcgcctggcgcagccgcgcttaggcaaggacgcccttatcaagctcctcaagcaagctgaaagtgcattatcagagtttagtcaatcatcctctctgcaggatcctcttcatgctctgagcaaatctcttgtccagaccactttactcaaccataaggataaggatgtcaagcttcttgtttctgtttgtttaatcgaagttatgcgtgttcttgcacctgatccaccttttagtgatgaaatacttaaggaaatatttaagctatttatcagcatatttgcggaccttgctgaaactagcagtccatttcttactagaaggatgaaaattttggaaaatgttgctgcacttagatgttctatgatcatgctcaacattggctgcgaggacttgattcttgatatggtcaaaattttcttctccacagtgaaatggttatttggtaagattcttgatcctatcacggctgtgaaatgcgtaggaatgcatggtcttcaaaagagtgtgcaccaagctatgctatcaatgatgacacaaatattgaatgagaaagttactcagtctcttgtagatgtgattttacgcaatttagtaaaagatgacaagggagcatcccacaagctagcttttaacatcattgaaaattgtgctgacaaattggagcctatcattcacagttttttgtcctcatgcatttttaacaaggacatgcctgttactgaacttaggagattatatcataaaattattcttgaaatattccagtgtgcaccccagatccttttcgctgtcattccgagcttgacgcatgaacttcttagtgaccaagttgatataaggctggaggcagttcaccttattgggaggcttcttgccctatctaatcttcagtttggtcaagaaaacaagatggtttttatagaatttctaaggagattctctgacaaatctgcagaagttagaattgccgcaattgatgcagccaaagcgtgctatatggatgtgtctagggatgaagcacaacatatactttcatcacttgaagggaggttactagattttgatgagaaagtgaggatccgagctgttcacacagtctgtgatttagccaaatcaaaccttagctcttctgctaaactgatattacatgcagctgagagactacgtgacaaaaaagcatccgttagaaaaaatgtaatgcacaagttgttggagctgtatcgggattactgtgagaaatgctcaaaaggaactgccacagtcaacactcattatgaacaaatcccagctaaacttatagttctttgtttcgataatgatattgaatccttcaggccacagaatatggagcttatatttgctgaagaactctttccattctctctttctccaaaagagagggcgacccattggattgcgttcttttcttatttcaaaccagaacatattaaggctttgaacatcattttttctcagaagagacggttacaactggagatgcaaacatatttatcacttcgagcaaggaaggaggaatcatcagaagaaatgcagaagagaatccgtgcggcattcagaaagatggcaacatcctttccagatatttccaaagctgaagagtgctttgaaaatttgcaccagatgaaagataataacatatttaaggatttggatgaactaataaatgagggaaccagttttgcaaaaggccgcgtgaccagagatatgtttctcaagagaatcgggcagaaacacccaatttacacattttccagagtgctgtctataaaatgtttgcattcaatatttaatcaggagatgatctgtgccatcctcgaatctcttttgtcccgcggaaatgaattaattgattatgttgagtctgcttgtgatctattactggtaattgcaatggtgtttccatcattattccgaggctcagaggagtacttgcttaagttgttcttagaagaaccaattctgataaatgtgaagactctccagatgttggcacatttggcaaaatctacacactgtttgtctactaattttagcaatgttgtgtacccattattggagcaaaagtgcattgaaggtactcgtgctgaatcaaaatacgcaatcactgcaattgctgcactccactcagatgataagaaatttgctaaattatttaaggtaggc

SEQ ID NO: 39259 - DNA, 3065 bp, Zea Mays
gggacacggctcgctaggcgaatggatccaatttctggtgaatcttccgtacttctaattcctgaaatatgagaagattctttttctttgggtcctccgctgcaaatgctggcgacgaaaacgggacaccgggcagtgatagcgggactacgcataaaaagacactggtggcagatgtgggcaacgaaagttctggttcctgcagcacaaggttgtcaagatccagaagccgtggtcaaaagcggaataaggaggaaccagccaatccgaagcagctcaggaggtccatgtcattctcgtctccggccacaaacacttgcttagacgaacgatgctttagtttctctggtgatgttccatgcactttgtatgatggatttgatgcacctcagaatgtcaaagatgttgcccccaacatatggtcaccagaaggaaatccagttttgagagaatatgcaataaatatcccaaaagatcattcttccatggaaaacgattctcctcgttcaagatgttgttcatgctcggcagggcactctcctgttagctctcccattgctcttcgatgcaggtcaacaagactaagcaatctattaagcaagaatgaagtactagatcgatacattgatagagggcatgaagatgcaatggtaaatgagaaacagaggcagtatccctccgccgcatctatggtttctactttgggaaggccacctcgaccccaatcaacagtaccatccataccaaaatcaatgaaagggaatacagagtgctacccagatgtagacataaaagaagactgcctttggcaagttgctcaagagggtacaagagataactgcaagattacaactatgtgcgatgcaggtagaaaccacgtaagcatgccagatgcttttgagagagacagtgctacatctgttgtagatatttgtgaagatttgcaagaagtgagacctccaaatgttatttgcccctccgcttgtcctatttcaggggagcaagaaaccaatgacatgttgctgcaaagagctaaagaagttgagtcaaggttcattgttcattgtggagatgaatatgaattcaacattatcagagataagcgaatgagctcaaatgacatgtttcagttgatccagcagttgacagaagataggaaacagttaacgcatgaactgtcttcacatataagagcacacgttgcagaaagatctgctgccaaacagcaatacaaacaatcaaagaaagaactagataccagaactaggaggttggagaaggagaagagtgaaagacaaactacactggagagagagatggacagaaggtcacatgattggtctgtcaaactatcaagatttcaatctgaagaagagagactacatgaacgggtgagagaacttgcagagcagaatgtgtcatttcaaagagaagttgcctttcttgaagcaaataaggctgaagcttcaaccaaagttgctagtttggaattgcaaaacaacaaattaaatgacgatctagagaaacttagaaacgagcatgagaagctccataattcctcagtagataaggatgctcgttttgctgaggttgttgaggaaagggaccacaccagggaatacttgaaggacaaggagggagagaacaaagcattgcacaaagtgattgccagactacaaacaacatgtaatgaacaggaaagagcaatcacaagtctaagacagggatgcaaagctcaattagacaagaaatttgttgagtgtgacagtgataaaatgaggaaattgcgaatggaactgattagactgacaggggtggagcaaaagttgagatgtgaaattcgttcttgtcatcttgaagttgggtccctcagacaagagaacattgcactcttaaatcgtttacaagttgttggaaatggagcacccttctcaattcgccttgaccaagagcttcaggctagagtggacaacctgcaggtgcaaggcttgtcattgcttaataagaccagccaactttgcaccaaattgttggatttgatgaaacacaagaaacttgaaaatgagtctttcagtggcaatgatgtgttgatagtcagtaattacacttttgagtaccaaagcatcaaaggaggaattgaaagtttgaagcgaagtttgaagacaataaattctgtactgaatgaaaagcaaagtgtaaaagaaaaatctggtgagactgcagctagaggtagttcttccagggagcaaacggatgattttggactcaagctgaaagaagaggctatgctcagtagagtattaaaggaggcactcttgtcaaaggaacttgacaatgggcaattggagtctgatctgtcatcttcacttcgtatccaagatgttatgagaaatgagacccagagagttcaggatgaactttcttgcatcacccacaaggctaagcagttagagcttcaggtatccaagaaggatgaagcgatcaatgagctccaacaggacttgcaggaatctgccaaggagcttgcgtctctacgcggaacactgaaaacagtgactgaggagagggacctttcctggcaggaatccaagcagctcagacgaaacatcaacatcatgcagaacgaggtcgtgtcactgaagaagaagattgaagccttggacgaagacatactcctcaaggaagggcagataacaatactgcaggatagcatcgacaagccgttcgacatcatttgcagccctaggtccatgagagagtttgacatggagtgaagagtgcggcgaagaacattgtccttttcagatatgatgtgcatttcgtgaaagacagagaggtgcttgtgaatacgtcggcgttcatacgattccgcagtgtcttcgtgcggtatatcgtagtggcttgttttggaactcattgctcggtttacaccatttgtaaagcgtgcataacttgagatatgatatgggtagtccttgtccaattaccatcacttgccccaaaggttgtttcgtgtgctgtcatgttcttgatgaatgttggagcagtggatgcatgctgtcaag

SEQ ID NO: 39260 - DNA, 295 bp, Zea Mays
gtattgagctttagctaaggagggtagagcgtgtgtatagtttatcgattccgtgatgtggcagctagatctaattagactggaagaacgcgatcgttgtacttagtaatatcccagcatctggtgattgcgtttaaatgttatttgtgcctcgtcactaggtattcgattcattatcgtgtagccaaaactaggctaattatgtttaaagtgtatgatttgttgtttgtgatgtttgtgttaggttcgtttaatttaaagaagcgtaattattgcgattaattgtacgtcgata

SEQ ID NO: 39261 - DNA, 2311 bp, Zea Mays
ttgcaacacacgggtacgcacctaataaaaagataatactacaattactcgggcgcaaatgtgtttgtttaaaaataaaggaaaacaacaccatcccacccaaggccagcgcatgggcagaaaggaaggagaaggaaaaaaaacccgccctcccctcccgcaccgcaccccagcaaggcaggcaggcaggccagccagaatcacacgacacacgcatacagttttagtttgttcaactacacacgcaaatcggaatcgaaaccctatctcggatccgatggctcgttcgccgccgccttcttcgtcggccggcggcgcgcagtacgcgcagcagttcctcaacacggcgctctcccagcggggcccgtccgcgctgccgtacgccgaggacgtcaagtggctcatccgcaaccacctggtagcgctggccgaggccttcccctccctccatcccaaggccgccctcttcacccacaacgacggccgcgccgctcacctcctccaggccgacggcaccatccccatccaccacgccggtgcctcctacaacctccccgccgtcatctggctgcccgagccctacccgcgctccccgccgctcgtcttcctctccccgacccgagacatggtcatcaagccccaccaccgcctcgtcgacagctccggcctcgtcgccaacgcgccctacctccgctcctgggtcttcccctcctccaacctcgtcgacctcgtccgatccctctcgcacctattcggcctcgacccgcccctcttcaccaggaaccctcctgccgccgcacaggctccgccaccgaatccctcgccgacccagcccccaccacggctcgccgcctccccttccccctcctacagcaggcttgggggtgccgccggcttcccggcgtcgccccagctcgccccccgcccgccccccacggaggaccccgccgaggtcttcaagcgcaacgccgtcgccaagctcgtcgacatggcctacgccgacgccgccgcactgcgcaccgcacgggaggctgaggtcgacgccctcttcgccgtccaggccgagctgcggcacaggggaggcatcgtcgctcaaggtgtgcgcaacatgggggaggagatggaagcgctcgagcggcgcctgcaggacgtcatgatggccaccgatgttgtggaggactgggtcaggcagaacaacaggagaggcagcaaccaagccaccgaggacgacgaagccatcgagccggcggatgtgctgtccaggcagatgatccagtgcacagcggcagatttggcgctcgaggacaccatctacgcgctcgacaaggcaatccaggaaggatccgtgccctttgacggctacctcaggagcgtgcgtgcactgtcccgtgagcagtttttccaccgcgccctatctgccaaggtgcatagcgcgcagcagcaggctaaggttgctagcatggcagcacgggcgccaccgcagtacgcatcatagggatcatgggaaggggaagatgattcaatgctgcctgtcacatttacttagtaagactggatggatatgaaaggacttgtctctataatagcttgagtttgaagaaacatttggatgtcttgttcttctttggagacaaacccacttctatctgtttatgatatgaaatttcatgggcctgcttgttccccatgcgctaactctgcagcgcagtgcaaccatgatgtaattcaaccgtcagctgattaacatagtacatggattcatgttcacctttggaaggttaggtttccattctttcattttcaggggcaactatgtgaatgctgggaactttcaagttgatcagttccgagtcctggattattttcagaagtgttctatcttaaaatggaatatgattacatactatctctgttggaattgaaggctgattgctttagtttagccctttttctcctcatttgtcttggccccgagctagatccccagggaaggatatgatgctagcatgtcaccattgtcttgtaagtagattataaacaatgcaataacctgtatggtattttgtgctgaagaattgtaacatcaacttgggggcgtcgtcagaaacattgccttatggctggagccatgcagaaatataagggagcggaccagatgtgttggagtattttaggacagaagaaggctggtgatgtgtccaaaccattctggatttgaccatgtctttagaaatttatggcgtgtttgatttgaagaatgagttagtccatcatcttctcattcatcactttcttgtttggtttgtggaat

SEQ ID NO: 39262 - DNA, 5845 bp, Zea Mays
aaaccaaataagcgaatgcccaacaaaattcttcacctgctgcttccgtcgtcgtcttcgattcgagcggcggcgcggctgtgaagtaagcgggcgagacgagacgagggatcaacctcgatggggaagcagaagggccgcgcgtccagcagcggcatggcggcgtcgctggtaccgcacgcccatggcgccgtccccaccgtcggtttcggcggctaccatggcgccgtccgtgttgagcccgctgcgccctccgacccagacgccccgattcgccttaccccagatgtggatggtgaagtactccagaacctaaagaggctgggaaggaaagatgcaacaacaaagatcaaggccttatctactctctctatactctttggacaaaaaccttgtgaggaagttgtgcagattgttccacaatgggcatttgagtacaagaggctgctacttgactataacagagaagttcgccgtgctactcatgaggccatgtctagcctcatcacagcagttaggaaaggtatagcaccgcacctgaagtctttaatgggtccttggtggttttctcaatttgatcctgctcctgaggttgctcaagctgcccgacgttcgttcgaggcagcattcccacagtcagatagaagactggatgcattaatgttatgtgtgaaggaaacatttctttacctaaatgagaacttgaagctaacaccacaagctttgtctgacaaggctataccaatggatgaactggaagatatgcatcagagggtaatgtcatcatcactgttagctatggcaactcttatagaaattttactaggagtgaaattgcaaagttgtgatggtgagagtaccaatactgaaaacaaaaatatgtcaaaagttaggtcaactgtactttcttctgctgaagctgcattttgtatgcataaatgttttcttgacgtcctcaagtcaaaaagttctgttatacggtcagctacatactcactgcttacaagttacatcaaacatgttcctcatgtttttgacgaagaaaccatgaagaaactttccccaactctacttggtgcattccatgagaaggatgcgtcatgccactcttctatgtgggatacaattcttgttttctctagaaagtttccagaggcttggtcatattgtaatattcacaaagttgtcctcagtcgggtttggcatttcctacaaaatggatgttatgggtccaaacaagtttcatatcctcttctagttcagtttttggactctatgccacctaaagcagtcatgggacaacaatttgtttttgattttttgcataatctttgggctggaaggaaccagaggcagttatcagctgctgatagtttggctttctgtggtgcctttaaacagagttttttgtggcttctaaaaaatgcatcaagatattctactggagattcttcagatgatgtacccatcaagcttataactgatgtacttgccaaaatagtttggcgtgactaccttttattgtctggagacacaattggtggcggtgttctcttatctcgtaaaacttcaggatacagaaaatcatttacttaatatttcttgtcagtcgctgttaagtgactgtttggacataattcaacaaggagagaagctttccaagtttcagaatcatgtagaacaacttgtgtcgttctttctatctttggatcaaattgttgtatgcaaaggtgaattatggccactggaaaggttagcaaaaccattggttgagcaatctttgccagctattaagttcatggacactccatgccttgttaaacttctttcagttttggttgaaatatttgggcccacccccttattttttaagacttgtaaggaaaatgatgaaaagttggatatcaagtcttatctggagtttttcaatgatgaattgctcccttggtgtttggatggaaaatatagcacctgtaactcaaagattgatttgttactttccttatttcaagatgaatccttctttgaccaatggtgttccatcatcaaatgtacgacaactgaacaaaagcagtccgttgatgataagacctcaaatattctgggacgatatgaattgcttacactgttacttcagaaaatcagagaaaagattgctggggggaagctaagaaatttgcaggaaaatggttatcttctgcaacatttgcgtcttgatatattagattctactgcagcttctgtcctctgtgatttgcctgcttcagattgccaagttagttttatatgtgctgcacttggtggcgcagatcaagaggaccaaatctgcttcctttctcctgagacagtttgtaaaattctcggatccattttaaagaatttggcattggtactcaaaacatcaacttttgaatgggcaaggttagcacattctttgttgcctgctgaacctgagcacttgatggttccagaagaaaattcctcaataattaacttcgagatggctcggattgcctttaaagttcttcagggtagcttgttttcactttggagacttgaggaaaattctgtatttccttctattctggctgctctttttgtcattgaatgggaatgtagcatgtctttagctcttgatgaagagaagtgtttggaaagtaatatagaagatacggaagttggtgtttctatgtgcagcagttcaaaaggttgtttggaggaggaaatgcatttgaaggttaaccttgcagaaagcatacatgttttttgccaaagcttaagtccatccttttgggataatcttcactcatgcacattgaatagattggcaactattctacctcagtgtgtcagaaacttggaaagtttttttgatgttttattatctgagggggaacattggccgctctggttgatgccatctttacaaaatggacatttatctgtgaaggtccagctggatccagatattacagatgaaattgaactcaaacacgagcgatttgttgcctttgttgataggcttattctcaaacttggctttagtgaagtggttttaggtattccaggaaatatacagtctgccacatcacaatcaattgatatcacttcacctgtctcttccttgtccagagtatgggtggctggtgaggtcctttgcacttggacatggaaagggggctgtgcattgaaaacattcttacctttgctggttcagtacatgaaagacgagtcatatcttgagatcaacattgtgccattgttgcttgatacactgttaggtggcgcccttatgcatgatagtggtccgtgggtactgtttaatgcttggcatctttctgacaacgagatcgataaaattcaagatcgttttcttcgtgctcttgtggctttgttatttactattaatacaaatgattgtctctggagagaatctgatgcacttgtattttttgagcaactgctgagcaatctttttattggctcatcagttaatagaaaatgcctgaagattctaccctatgttatgacctccatcataaaacagttctcagccttgaacaacggagattcttcgtatgctgatttggtgcggaaaagcatacagagttggcttgatgcaaccatttcttgtctgtcatcaagctcaagggaggtacctgtgcaagatattgaggactggatgcaagtggtgttgtcttgcttcccattgaggataactggaggagcccgggaattggtagctgtggttgagcgagagatcagtgatacagaaagatcactgatgttgactctgtttcagaaataccagattttctatggtagtacagcttcatcattggtcactagtggaactgccgtatcaacgacagttgaattactgggagtgaaactgacagctgttttggttggttattgctggagcaaccttaaggagaatgattggcattttgtgttccgcatggtattcaaatgcattgaatcgtctgttttgcttgtggaagaaatgactgatggcataaatgatgccacaataaaccaggtatcaagtgaagatgccttggagaagcttaaattagtggttggcactacagataagttaacattaagccttgcagaatctgctttggttacaatgtgtcagctcaaccatctttgtaatatccaagaagcagaaaactcccagtgtgtacagcttattaaatcaggggactatgctgagagtaatgacaagatggtagagagtgtcctccgtttgttcttggcctctggtgtttcagaggcaatcacaaaatcttgcagtgaagaggcttcgtctgtcataggttctagtcgccatgcttatttgcacttttgggaacttgtggcatcattcataaaaaatgctccactgcaaagtagaaagtctgcacttgagtccatggaactgtggggactgaccaagggttcagtcagtggactatattcgattcttttctcctcacaaccaatatttcacttacaacttgcagctttctctctacttctctctgagcccttctgtcaactttcactggttaaaaattattcaatgggagaaagttgctcatctgctcagcaatctggcacaagccaaagtgctgagttgatgccagattcagacaagacagtgcatctaagagaggaactttcagacttaatcgagttcccaacatctgaacttctcaaaactgatctgacagctcgagatagggttgatgtattcattgcctggtcattgttgctgtcccacctgcaaacactaccagcatcttccagtatcaagggagatgtgcttcaatacatacaagaaaagcatatcccagtaaaggccgctgcaccgaatgggaagaaaaaggataccgagctagcgcctgaagcagaagctgctgccaaagcttcgaagaatgccatagctacttgttctttgcttccgtacttggagtctctttggcccatcgggactttgcagatggcctcacttgcaggctcactgtacgggatgatgattaggctgctgccttcttttgtgcgcacatggtttactaccttgagagaccgttcattgtcatactcaatcgagtccttcaccaaacaatggtgcagccctcctcttcttctagatgagttttctcaggttaaggagtccgtatacggcgatgagaatttctcggttagcgtcaacaggtcggctttcgagatcgttgctacatacaaaaaggaggagacaggaatcgaccttgtcatacgcctcccgagctgttaccctctgcgccacgttgatgtcgaatgcacgagaagtttgggtatcagtgaagtcaagtgcagaaaatggctgctttcgctcacgtcattcgtccgcagccagaatggcgcgatagcagaggcgatccgcacgtggaagagcaatttcgacaaggagtttgagggcgtggaggagtgcccaatctgttacagcattctccacaccagcaaccacaacctgccgcggctggcgtgcaagacgtgcaagcacaagttccacggcgcctgcctctacaagtggttctccacgtccaacaaatcgacttgcccgctgtgccagactccgttctagtcctagctctagacacatgcttgtttgttggcaccacaccgttcgatccttcgatgtaaatggcgtgtgtacgcagcgcagtgttcagcgttttggctgttaaatactctcgaaacaggacgggacctgcagagactgagttcagaggtcttataatctacaattaccgtggattcgctagattatttttaggttaattgaacatgaaaatgtctaaattcttaacactta

SEQ ID NO: 39263 - DNA, 3583 bp, Zea Mays
ttctggtacaaccgaacaggcccttagtcgttgaccgtctcgctcgcctccccgtccgctccgctcccgtgctttcccctttgctcgctcgcggacctccgtcccggactccgactcccggcggcgctctcgcgccagcaagctcgaatctgcacgccgccgccgccgccgccgccgccccacgcccacggcgcctagaaccagggtctttctggtgtgcaggggtgggcgcttggcttctgagaacatgtaacgggtgttgatacgaaaataggttcctggaatagcgggttcattagcagtttggcacaactttgaagctgcaggggatttcaaatgccctttgtcatcaggtccacggttccactgagccagaggattttttattgtattttcaacttccctgaggatgtttgacagtactcaaaaagctcaatacatggatgggcacagagagaggtttattaggctggatgagtcaagtcctaggtcatctgtaccttctgaagtgggaggcaggagtacattgaggtccagcatgcctgggtttggttatggtccatttaatgcactaaggtctttcttgtctgggggctctggaagactgaagtcacttagacagtcacttacttctggtgctcctaagacagcttttgcggaagatcttaaatcatataagagaactatatttgatccccaggacaaacttcttttccgaatgaactgggttttcttctcgtcttgtctttttgctgttgcagtggacccactattcttcttcctacccatcatcaacgattcaaactgcattggtattgataaaaagttggcagtgacatcaacaataatacgtacggttattgattttgtctaccttatacgcgtgtgtcttcaattccgcactgcttatgttgctccatcttcacgcgtgtttgggactggtgagcttgtgattgatccgatgctaattgcaaagcgatacattaaaagttactttgcaatggactttgttgcattgctaccacttccacagattgttgtatggagatacctccatattccagatggcccagatgtactgactacgaaaactgcactggtttgggttgttttgatccaatacattccaaggttgcttcgaatattccctgtgatcacagatttgaaaaggacagctggtgtttttattgaaactgcttgggctggtgctgcttattatcttctatggtttatgctggctgggcataatgttggtactttatggtactttttaaccatagaacgtgaagatgattgctggcatctatactgtgacgatcccaactttggcttgggatgtaatagcagctacttgtattgcaataatcatcatcatggcagctatgatagttggcttacgaataatagtgcccaagtattcaacatgtgcaatggcggtcaagacaatcctttcaactttggcatttatgagcaagcactggtctctaaaatacttagtccaggaaatttcatctcaaaattatgttattgcttctggtggggattgcaaaatctaagtacacttggtcaagggcttttgacaagcacataccctggagaagtcctgttctctatagcaatatgtgtccttggactaattctttttgctctcctcattggtaacatgcagagctacctacaatctgttgctatacgccttgaagagatgagagttaagaaacgcgatgctgagcagtggatgcatcaccgttcactgccactggacatcagacatagggtgaggaagtatgaacgttatcggtggttggaaaccaggggagtagacgaagaaactttggttcaaactcttccaaaagatcttaggagggatatcaagcggcatctttgtttgggcttagtgaaaagggtgcctttgtttgaaaatatggatgaacgattgttggatgcaatatgtgagcggttaagacctgcactctacacagaaaatgagttcattttgagggaaggtgacccggtggatgagatgcactttattcttcatggttgtttggagagtgtaaccactgatggtggacggagtgggttctttaacaaggttcagctaaaggaagggtcgttctgtggcgatgagttgctcacttgggcattggatcccaagtcagctgctaattttccagtttcgagcaggactgtccaggcactcaccgaggttgaggcgtttgccctatgtgcagaagagctgaaattcgtggccagtcagttcaggaggctgcacagcaggcaagtgcaacacacattccgattctattcccagcagtggaggacttgggcagcctgcttcatccaagcagcatggcgccgctactacaagaggaagatggcagagcagcggcgcaaagaagaagaggcggcaagccggccaagtagtagccaccctagccttggggcgactatctatgcatctcgtttcgctgccaacgccatgcgaggggttcacaggctaagaagcaaggctgtccctaccattgtcaggctaccgaaacccccagaaccagattttggtgtcgatgatgctgactaacgagacaatcacactgtactcgcttgtaattgtactttacctcatctgtagattctgtacaagattcaacgacagctgaagaagatagtgtctgtaaaggtttgtaaccacgcacagacagaccataacggaggtatatcctgcttgacgtctatggaaatgcaaatctacttccttaaaacctgaagtgttttggagccacctccgcgcttccggggtacgggcgtacggcatcagtgtcacctgcggacgagtggcgggatcggatctaaaaaatttatccactggagttgtgggagatgtcgtgtctggtgccctctccctccgtcccgtgctgcactgcgctttcttctttgtgattgcttcgctcgcctcctccaccaccagacaccagcccaaactacctcgccagctccctctgcctccccctccctcctcccgtcgccgcagcacgcagctccgccggttttcacggcttggagcagatctgccacgccaccgccgcgtagaccaacttggtggagggatcccgtccgaatctgattcctattctccagctcgaccgctgtagcgagaggagagagagaaaggagcagtggcgacgaggtctatggcatcgatggcagcgtacctggcctggctcggcgggcggcgcagaagaagtgggtgcacctgctttaccacacggcgctcaacttccaccgccacctcttctaccaggaaatcagttcccccaatcctcccctcttcgcctcccttttgatctcgatctgccttcctgctcgcggacgggactggccttgtgttgtctctcccgcgcaggcgtcagatctcctcgacaagtttgagaccaactgccacgtggtttctttaggggtattcactgaaggcgacagctgatcgtcattcatagattgcaagcaataggggaaagtcacttcatccaaataatgctgtgtcgaggaagctccaacattcggtgtagcatcggtgaaataattg

SEQ ID NO: 39264 - DNA, 4868 bp, Zea Mays
cctccctctcccagtttctccccctccctatctctctgtccctgcttgcattgctcgtgttgacgcgcctgcaagtacgagacagcgagcgggaggaagaagaaacaaaaaggccggcccccgatgctagctcgccgcaagagcactaccaccacgccaatccattgaggcggcttcgttagcgtagcggcggccggcggtggaagctaagtgtaaagcggccgcctgctcggggggataaaagctacaacgggcagcggcaggaggaggcgtcgtctcgaggactgcgcgcaatgcccctgtcgcggcacacggtcgggaacgagtacgcgctgggtggccgcgacctctaccgcgcggccgaccagcacgacccggaggacgtcctcgatggcgtcgccatggccggactcgtcggcgtcctccgccagctcggcgacctcgccgagtttgctgcacaggtgttccacggcctgtacgacgaggtgatgagcacgtccgcgcgagggcacggcctcatgctccgggtgcagcagctggaggcagagctgccgctgctggagagagactcctgccagagagactacctgcatgtcgcttctaacaggggtgtcgattggcgttcgaatccgagggtcgaccaaggggttgtcacgagaggcgacacgcctcgcttcatcatggagtcaatcaagcagtgtcgcggaccacccaagctcttcatgctcgacaagtatgatatcggcggcgagggggcgtgcttgaagagatacaccgacccgtctttcttcaggacggattccgcatgttccaccttgccgcatgaggaaggaattcgagatgaaagaagacctcccaaagccatggagatcaggcctaaccttgagaatgcccagattttccagccccctaacgcagccgacaatgtctccaagctggagactgatccatctgctgaagctatggatgaagtgcccacaaaccgcagacggctgaagtaccgccaactaaatggatctgtattccaaagcttcagaccacttatgctgaatctgtatgaaaagccttcgtcagaggagaaactcgtcacaggtggccactcaaaagtgcgtatatctgtgaatggttcacctgaatcggatactgaagagagagataccatggtagacacgtccgtcaacatgggcaaaggcaaggtcgctgttcgcaagaacagaccagtttctgaagaagcactgtcacgttcttcagatgctcggtcagctggaagcagcaagggctacaactccgaattggatgtctacgtggacgcattaaccacggtggactctgaagcggagacagactcggaacacaggggccatggacaatgtacctttgatcggatggattcagacaatagattctccaatgctcaaaacgccatgacatcgaggaacagcaacttcgacaagaaagataggccagatgttccctcagcaaatagagatatgagtaaccagcatgaagaagccacggtctccacacaaaacaccaaaccagtggttgttggcgaacatgagaggaccagctcgttagaggaactgcttggccaagaaaaacctgcttcttgggatcatgagaggactagctccttggaggaattgctcaccgaagatttcaatgctccagaatctggagcaagagagcaggctactgaagagcagagctgcaatggcagtgccaccggtgctgtatcaaatggcacacaagatattactaagaagaccaaggaagtcaaggagaactctaacattgcaactatttccttcaagaaaatagcaagcaagaggtccagatatgtcggcagcatggctgcaaaagttggcattctgccaaggaaactctccaagaagcatgaccctttctctgattccctccggtgcatggcgaagcaactccttgaactgaagtacgatggcactaaagatagcgacttatatgactttgaagcaaacagtgtgggatgtgatgtcaagtatcagggaatttctgaccctcctgttgaaattaaggagagtgacgtgcacaaatttctgccagattcatcctatgatgatgtgggttcaagaaaatgcccgcaggaagaaatgaaccatgggcaggagcatgatgctccacctactgacagtccacatgattcagtccctgatgaaggaaacggatttcaggaccccaacatgatctacttggcaagcatcatcacatcttccagttcccaagaggaagaaggatgtgcaagtacttcactgcatgagaattcatctatggcagtgctcaaccatattttggagcatgctcaagagaagtttgaggaacatcttgacaaggatgtgaatgaggacattcatacagaagtcatttctgaaaattcatctggcaagtgtgaagacttgaaagaagtcagcatttactcagagcaggtgaatgtggaagatatggaggaaagcaataaatctgatgtatatgtgttggatgatgaaacagccgagtacatagaagagcaagtagtttcagatggtatgaactcttcaccggtttcatccaagcaatcagatgatccctgccggataactccactcgccctcgcagatgaagatgatacagtggcatgtaaggtcatcgatagccctgaagtggatcatattacattatcagaaacattcacggacattgatctacctaatgtggtaaatgagtcagtaatcagcagcgaacatgccatgccagaaaatgaacagtactatttccatccagaaactacttttggacaagatctgtgtctcgacaacaatgaaattgtaggggaaaatggggaagttccactatgcagctcaaccactgtggctataactcctgaaccaactgtaaacagagagatagaacatgagtttcatcaagctgtgtatcaggaaccatcgaattcattcaatagcagtaaagtttttggagatccactagcttctgactccagagatgttgcaccgtcagtcatctcgagctttgattggatgcttaatggtgcaatgcagcagtcattcaatgtctttccttctcatccaactaatggaaatgaacaagaaaatggttcttctgaagatgcgccaccacttcctcctcttccaccgatgcagtggagaacaaacaagatacagacatgctcatcaccgttatctgcaaagatcgggagaccaccaaggccaaaacctccagcaaaacaacaagaaagtgaagctgctcatattcttcaggagaacaatctccacaaaggcttgagtttgcagaatgaagtagcgcaggcaactatttctagtgatcatgagacaaatcaactccttaacatggattttcatgaaaaccatcaccaggaaggagatgaatatcatgcccaggattccaatccatttccctcgtcagaagctgaatgtttggcagaaattgattcagtaaaaagtgaaaatctgcacccattgcagctacctgagcttatagttgttccggaagaggcatggtcagagtttggtaatataaaattcatgccagaacaagaaggaaaactccaactaaacaacggactttctggtttggcagcacaaaagaccagcgggaagcctgatttgtttgcatattataaggaaaaggaattatcatttgcaggtagtgacaaagttgcaaattcagaagaaaacaaaccaaatggtgctgttaaacatatgcaaaatctggacttgccagcacaacagaaaaacgacaaaaatgattgtgatcgcaaggcagaggagttttcctctgcattagaggatgaatcatcaaaatcaccaactcatacagtgccaaaaccacctagataccctctacttcctgttacttctcatgacagaagcatgctaagaaaggtaccaactttggttcagccttcgagtaagcttgcagatgagaagaacacactattggaacagataaagaacaagcctgttcttgcaaagagaccaaatgtaatgggtggtccaaaaactaacttacaagtggtggccattctagagagagcccatgcgattcgccaggctgttgctgatgacgatgacgacgatagctggagtgagtagctggctcttccccaaagcgatttcggctcctgatgtttcagaagtgattgcatcgatcagacctttgtgtccctgttcttgcatggagcaaaagatgaaatagagccaagttaccacaggttttcatgccaagacaattggcatggaccaggtgatgcccatggatgggcaggaacggtagaagcaacgttgcaactgcaaacgtagtgtgtctctacttgtactatctgtgaagtttcgaagtgcgtcaatgtttattacctttcgatgcgcctcttgaaagtttcatgtgcttggtgaggattgttaggttgtatatgcctcctaggactagtgtcatttttgtaacttggtgagtgtacagaaagaagcatgatttttgagttgttctggacatctgaagcagatagagcaagcaactgaattgtatatgcctcctaggttgtatatgactgtacagatctctgaatccgacagttggccgcctaagctgagtttcaggaaacagatggtgcagcagtgcaggtaggggtggtaatagactctaaattttatactgcaaaatttaagaatcaaattggattagaattaggctctatttctatttaattttaaactaaaattatttaaaggctcaaactttgttgtgaataaacatttaaatcgtgatctatcaccactcctacgcaccaaatctgaattgtacatgaagatgctgggtct

SEQ ID NO: 39265 - DNA, 352 bp, Zea Mays
gccgtcgtcgtatctcgtgtccgccgtcgatctggggcgagtatatggtccgggagaatcgccgggacacgagcgaactaatactccctccaatttgacgatgtgatgagcggggcgggcagaattgatcgccggagcgtcaactccgccacggtcccacgctacgccatcgccagatcgaacaccactctgataacggtgagaatcttccccatataattcgctatgcctttccgtacatatagtgtcgttcgccgtagtgattggccggcgggggcgggcgttggccgaacgccggtgaggctcaccgctgttgatggctgggcaccgccgtggcatcgtcgggctgaag

SEQ ID NO: 39266 - DNA, 1354 bp, Zea Mays
ggcttctcttcttctccagccgctcaccagccttgtcgtcgaacgccccagctccttcctctccctctcgattctctgttgaccggtgccctgctcgaatttccgcccgccaagctcccagccgagctcttgcgctgggtttctctccctggtgtgctcgcccgtaccgcacgtccatcttcctgttcctggacgggcccatcctttcctcttctctctccttcgccatacctgactcgtcgaacctcgcgcgtccctgcgtcctcgcatgccgcgcgccgtgctctgcctctccccaagctcctttcgctgctcgctcggatcttgccctggtcctgctggtcgcttctcccctacgcatcttcaagctcagtcgcccgtctctactctatggcgcgccctccagctccattttgctcggtcgtgctccctaccaagctctctcatggcaccctgagcttctgcgcgagctcgccggtgaagctctagttcctgctcgattgtcgttctctcttgcgcgccgcggattttccccgagctccctcgccgtggccctctgctcgattcgctatagcttatccaagctccccatagcgcccggatttccctactgcccgtgcgcacgttctgcttcctgcgcgcaactgcgagctccgctctatcgctcggtccataacgaagctcgcgtcgttcgttgtgctgtcgcgccatcgcctcggtctggccgacggccaggacctctcaatactcagctccctaatcatccacaacacgtcccgttttctttgtcttgtcatcgtcgttcagtcgcctcgccctcgcgtcgttcatcgttaggcacaatctgctctagctcgtggacgtcgtatcctggctctggtcgctagatgtcgcaccttccctgtactgactgtcatcacgtataggcctagacaccacctctacctacacgagctcgactggatccccatcttcgcgaattcgccgtcgatatccagctcgctctaatgtcgccctcccttctgtcatcccctgctcaaccccacctcgccagctcgctccagacataatcccgtcgtcgttctgtgtgtcgggtgaagatgaagctagccgagtaatattcaccgagtgcgcgacaaaaagctcgaaccagtcgtcaatcgcctcgacaacaaccacattcaagactccaccgttccaataattttgccgcatcgtccttcaaatctgagtcctcgtccgtaggatcgtcgttgacctcgcaacttcagctcgagttaattatggtaagttgatttattattcccgtcaactaaataaatggtaggattaaatagaagaattgattgcgatg

SEQ ID NO: 39267 - DNA, 1585 bp, Zea Mays
catttcattatcagacatagattagatgactttggaattgtccttgaagtgccattatgctgcttcaatccagcaaattcaaacttcgaactgggtagaggaagcaatttcagtgattggaggccacagcttgtccctagtctgaaaagcacccgtgtaatccaagtagcatgtggtggatatcattctttagctttgactgatgaaggcaaagttctctcttgggggcatggtgggcatggtcaacttgggcatcccacccttcaaaatcatagagtcccacttgccatcaaagctttatcagatgagcgaattgtccatatagcctgtggaggatcaacctctgctgctatatcagagaaaggtgacttgtacatgtggggaaatgcaagagactgccagctaggcatccctggtctgccagaagttcagccactcccagtcaaggtgattttcctcagagacgatgatgaagggttgggcccttctcgtgtcatctccgttgcaataggagcctcccatgccatgtgcttggtctccacgcaacaaaccgagaagtagggcagtctgggtttctgctttgtgaaggcacttatgtttcggtattcatacgtctgagtcagttcgaagcggaccctgttctcttttgatttgatccagctgttcctgttggtggaaactggaatccctgctcggttaagctgaacacatctggaagaaagaataaaaaaactgccacacgctgatagaaagcaggaaaggccccctgtggctggctccgggtaggcatagctgtagtagattcgaatccttgaatttcatctgtggaagttcttatgagtgtagacattgttcttgctttttctgtagcactgtaatacgagggacgaaactgcgagaagcgcggatgtaagacatgcgcccttgtgcgttctcaccaaagatttgtagattctgtctgtagttgagatggctagaattttgtagcgctaattttattgtgactctgtcaggaggcctggcctgattttagttgctgttcaataaaggcaaccgttggtgttttattccttatcattcgtttgtagaatctcggaggcaaatatcttgagtagttgagccgcgatgtaaactcggcctgggggaaaaaagaagaagagaaaaccatagctgcaagtctgcaagcgtgcagccctgtcccagccaaccaatcgcagattcgatgcttgaatctcactgtacagcgtacactgtgcgtgtgaaaattcaccttcctcaggcagggtgctctcagctctgcccaggctgatttgggtcctcttcgtgcgaatcagatcgccactatgtgggctcgtcagatcgcacgcctgccctgcccaagtgggcaaattcaggggtcaagccttgcgtgcgcaccgccgccatcctccttccaccttcgctgtcagtcaagcgacctccccgagcccgattggatttagcgtcgtccttcagctcccaacacaaccgaattgtagtaggtcctcctattatggctggaagggagttagttggcaaggataagcaagtgcttagtagaggtttg

SEQ ID NO: 39268 - DNA, 2967 bp, Zea Mays
cctcgacctcacccccgcccgcggaaatctcgcccgcgagatccctctgcccacacaccgccccctctgctctccgtcgatggaagggcgccattaacacaccgcgatcctcgctaccgcccccacgaggccataccatgccctcgccccctcccagatcttcgaagaggccgccaccccgcccctgttcttggcccctcgtcggcgtcggcctcatcgcggcacgggctgcactccttcgccccgctcacggccgcggtgcttggccacctctgggcctccggggtggcggtgctcccgggcctgacagagctagagttggtgcgcaccaaggctgagatgtggtttgcgttcccgcccgacctccgtgccgtcctcgccgcgggcctgccgtcggggcccgggttcccggactggcagtcgcgcgtggggctgcggtccgcattcgacctgcccatcgcggcggcgtcgctacagatcgcgcggggcgagctgtggccgcgctgctagggcgtgcgccccgccgaccccaaccacgcgctatggtctgcttcatctatggcgtggttcctgttttgcctgcctcttgctcctatttgaccaccatgcgcgccgcgaggaccaccactaggtggagcgtgtctccgtggtcttcttcaccgaccacgaggctgctgagaccctaggggggctcgacctggacatcatcgcagtgctccccaccgtcaggtgccatcgtcggtcgaggtccgtgactaagtgtgacgtgtacctgggcgagttcgcgcacagggagcggctcaagcagttgtctctcttccagatcccctacctcctctttgttccctcggcttagccaccaccttggccggtgctccttgcacgtcgggataggaggatgccgaccaagttctagatgaagagcaactgatttgcttcccttggatggattccactgttgagccattcaaaatttgagatgcggattaatttttacaattcatgttttcagatttaccttccaattttcttagtaataataataatgtataggtagtgcaccatgttttgattctaatctatcttgggtcacctgttttataccgaggtaacacctgttttataccgagataattagtatgtattctgagcttcaatcattgttctttatggtgagattcaatgtctccagttaattcattttgtaaattttaggttacagaatgtctctcgagtgtgctagagatgctttgctgcaaaagaccatggacaacaaagaaaatacaagtgaattattttcccgatctcgtgataagctcagagttgatctcatgaatatttctatgactactcttagttgaaaaatactttcccaagacaaggagtactttactaaacttgtgattgatgttgtcttgaggcttaaggtgtacaaatggtttaatgaaagttggttatcatttacattgaactatgatatcttcatctataaaattttactcttcaaaaaggtagcacccacttggaatctattgaaattctgaagatacatggagaatctcttaaggactgggatgtgccaactgccgagacttgcacacgtcacaaattaaagctgtttgcattgccggctaaccaagctccagggtataaacttcataattagacattctagatcttagttggccgacttgatcataagccactacccaaagcaaaaaaaagtatattattgaagatgcaactctcccctatatttgagagaagatgaaggatatatcagtgtgtttggtaccctgtagctcctcgtcgacctggtgcaacagcttaagctcaggaagaatgctttacaaatccgaatataagttcagtacgatagtgcaaatagagagcatcaggtactccttaggttcctattgacgtttaattgtcctaatgaggttgatccatgttctattacgaattgtatgtgtgctattttcccacaattttctaatcaaaatattcagcacaaaaggatgacctcgtatatgggatattcaattaattgtccatgaaatttgacaaaattagaaaaatgaaaaatatagcaggcctgtagatctgagcaaatgatatgaagtaaatgttgttactttctcaaaacgtagatgagctttttttgcaaggactttagttgaaaattggaaaatctaacatgcctgtagatctgagaagacgatatgaagtacatgttgttactttcacaaaatgtagatgagcttttttgcaaggacttcagttgttatgttgctcctcattaacactaaaacttaacctgcccgggttacaattatacatctcaatccagatcagccttttcattgttctggttctgctcatttatcctttctagtcacataaattcttgccatttgacaccagcactaaagaagatagggagagttcaatgcatgatgtttgttttgttgacactggaagaggcgactaattgaggcggttgtcattgccaccggtgtgcacacattctttgtcaaggccgcatatcttgtcgattcaacaaaccaagttggtcattttcagaagctgttcatgctatcggtttggaaagaacatgtggaaagccaatctcggatcttgcttccttcagggattgtctccatcctcttgatagcgatctatattggttatttccgaagaagaatcaagaagcaattcaacattcatgcaagtgtggtaccagattgagatatgtctgttagtttgtaacaatataaacttgttagttatgtgtcagagaaaacatagtaacaatgatttgtgctctatttctacccgtcattgtgtcctatctcaatggtgacttctttgtacacaactgtgtggtctctctatgtcctaataaatacatgcatcatcaatgaacttaatggatattgtcaatacagtgttctacaattgtcgctg

SEQ ID NO: 39269 - DNA, 3331 bp, Zea Mays
ctcgcggccccactcgccagtggcacaacaacctgatcgagccgaagccgagttcctcgctcccccaaaatcccccaagcagctctgcagctgcccctcacaacttcattcccaaatccgccgcaacgcgaagcaaacgacgccccgaacacacccaagccacgcccaattcctatctctcgccgcgcatcgacgacggcgcggacgccatgatcctgcgaacgtacgggcgcagatcccgctccttctccgacggcgggggcggggtctcgtcctcgcaggacgcgttcgactgcgacgacgccgccgacttgctggtgtcgtcggcctcgcagccgctcccgctcccgccgtcgcaggagtcctcttcgatgtgggacttcgacgaggacccacctccgtccccgccgcggccccggccggaggggcggcggcgcggggcaagaagaggagggtgggagctcgcggaagcccccgcggtggcgccgacggcaacgctgatggaggcggaggagtacggagagatgatggagagcgtggacgaagtcacgttcgcgctcgacgggctccgacccgcagcgcagaagcggacgcggcgggccagcctgctcgcgctgctcgggatctgcgcctccgccgagcgccgccgcgtgctccggtcccaaggactggtacagcaaattatcgatgctattttggttctggacattgatgatcctccctgcgctattgctgcaggagctcttttatttgttttggcaagtgatgtccaagacaataattcgctggattcagaaacttgtgtccatttccttcttaaattattaaaccctccagtgaatgttgttgatgccaaagcgccatcaataggttccaaacttcttggaatcagtaaatttcagatgcttaacagttccaataaggatgcagattctagttcagaggacatacttttaaaagttgaagaaatcctcttaagctgcaaagagatcaagccactagacagtgatgataagaaaacaacaaggccagaactatgttcaaagtggcttgctttgttgacaatggaaaaggcgtgcttgtctgctgttgcattagaggatacatctgagatggtgttgaaacttggaggaaattttaaagaaacattaaggcagtcgggtggccttgataatatttttaatgtcatggtgaattgccattcagagctggagaaacttgtaaaggatgcctccactacggatgtggagggaaaggaaagagctcctctgcaaagcgctgcactcctcttgaaatgtttgaaaattttggagaatgccacatttctaagtgacaacaacaagacccatttgctcagcttgaatcgaaaattgagccctaaatgccccccacttccttttgttggtgtcattctcaatattattgaattactatcagccctctctcttcttcagaaaccttccactgtttcaagaaaagcagacccaaaaaatactaaagtttgcaatggggcttgctctgccgacagtagatgtttgaacttattgaatcatcatggcaagtgcaataactcaaagaaaaagagtcctttactgaatcatcatggcaagtgccaggattgctcatccaccaaatttttgaagctcaatgtaagaaaggaccgttctaaagctaattcaaccagaggttcaagtggttggatttctataaaagcacgtacttctgattggaactccagagaaatggcaaaaaagcgacgtctatcagaaaatgcacaaactgctttgagtaatggtggtgatgatccatttgcatttgatgataccgatcaagaaccttcaaattgggatccatttggtccaaaaaggaaatcaccacagaagcgagcgaaacgatctaatggtgaactagtgctggatgattgtgacactgcagtaacgggaagtcctgaattatgtcaacctgaaggtattaatcagtcaggtgcaacttctgattctaaggctgcagatgagtccaaccttttagaagattgccttttggcatcagttaaggttcttatgaacttggcaaatgacaacccttctggttgcgaacaaattgcgtcatgtggtggaattaatacaatggcctccttgatcattaaacattttccctcatttgatttctccatggacagtaacaatcaaatgaaagaaagagtatcctctggtgatctgtcgtcttcccagaacagcaagtcactccaaatcaaaactaagcaattgcgagcctatgaacttgattttctggtcgccatattgggattgcttgtcaaccttgtggagaaggataaccttaatagggtacgacttgcgaatgcccgtgtttctgtcaatctatctcaaagtccagatactgaagaggtacagagggatgtcataccccttctctgttcaatattcttagcgagtcaaagtactggggaaactgctgaagctatatcaccggatgacgaagaatctttgttgcaaggagaacgcgaagccgaaatgatgatcgtggaggcctacgcagcacttgtgctcgcctttctttcaacggaaagtatgaaggttcgaggagccatttccagctgccttccggacaacaacttaaaagttcttgtaccagtgctagagaagtttgtgtcatttcacctgcagctcaacatgatgacaagggaaacacattcagctgtcaccgaagtcattgaaagatgcaggcagtcatagaagttggaagagggcgccctgtacagattaaccgacctctctgcagtgcagccgaagccacacacaggtgttgctcctcacctggccagggcgcaacgaattgattgatgccagaggctggcttgggagctaacagtgtttctattctttcttttgcccctcctgctgttctgatcctgtcatgtgcatctcctttagtttcttctccacacactcccccccggaaatcatgtagtccatattatgagtggaacaataacagtgtaggctatagggaatgtagttgtggtgcttcagttcttcgtctctgttttacatgttgtattttcgtgtcacatggaatcagtgaccacacatgcctcaatctgacaaattaagagtgtatatcacataatagtagtgtaatttaactatgtctctttttccgtataaagaacctattagttggaagcatcttccggttgcagaaaatgaccatgttgtatgcaaacggtgtaacctggtgtacacaattctttcgttgctatgtactgttctgagggaattagaacccaggtcttctgttgcttgagcttaaa

SEQ ID NO: 39270 - DNA, 1010 bp, Zea Mays
ttcttttcttttctgtaggttgaactcatagctgatcttcatgttatccatgctagcaatgtattgcgtttattcatatttctcttttatagtagggtgggtatatgtgataaagcatgtattcgataaagcagatctttccaagtagggaactaaattgaaaattgtattttatgaactttatgtttagtttcatggatcagtttgaggcatagctaagtataatttatatgattacactcacatccacttggtgtttttaaaatgtttgcaacggtccactattgagttcgaaatactgaacctcaaactccttgtcaaggtacacctcgtgtagcgattttctgactttcctgagtgaggcggcgctattggctttgtctattgtgtagttgcaaaagaatatgtgaattaccagtcagtggagattgagagggattccccggctagaagctcaagcggattaggaagtggctcatcttcatccagtgtttattttttcagtaaccagaggatgacaagcctactacaagagttggtcctaagttataaaataagcctaactttttttacagagtacacaaatgtcaggttttcctgtttgggctagcaccacaaatggaaacaaaaaattggactcagcccatcgtgaagatatgaaggaagagcactgtcccattattctgtttttcgaagaccatgtttctagcatgaacatgccagcatggtgccatcaacaacttccctgttagctcacggtacaccatgctccagcctgtcccctggttatcactgtggtgctgattgtgttcccaagatgcactgaaatagagcaagatcaaatgaggatgaagttactgtgtagagatttttgttccccctttgtagcagcacccatggatttttatttgcacagaattactctcttttactggttcattcaataattcaatttgttgcttggaaaccactgtataataaatacaaatgctatggtatgattttgtgaa

SEQ ID NO: 39271 - DNA, 1293 bp, Zea Mays
cgcgagcacgacgcgtttggttggcgccgccgcaacagtcacccattcctgcaaccgcatgggcattgccacagtttggcgcacctgccaagggccacagggtgtgctttaacgggccctccccttgtagcggattctggcgaggtccgaaggcccaacaggcctcaatctagcccaatctgtccgttcagcccgtccgcgggccagagtcgcgcgactggagtaccgcggcggcgaaccaagcctcgagcgaaggcggcgaacggaaagccgcctggcgactccagatctctccggcctgctcctcggctcctcgctcctcctgcgccgccgcggaggcagatacagcctctggatccagccccgctgcatctccgctgtggttggagtttctgaatggccaatcccagggatgcggtggacgtcagctcctccatgtcggagctgagcgtagaagcagcgccttcatcgattgaggttcaagtccccaagcagggttctcctcggcacgcggataccttagacagagaatggatccacaggcagagtcagtttcagaagatgggatatcgtgatggtgtaacagaagggcagaaggactctgcccaggaaggcttcaatgttgggttcaggcaatctgtaaacgttggctacaaatggggccttgttcgtggggttggcagtgcgctagctagtcttcctgacagcttgaaagaaaaactggtgccggatgttcagcgtagggggaaattacaggacctgcaccgctcagtgcaagaaatatcagcagatgatgctgtccagatgttccacgagagtatctgccagagcaaccgtccttccgatggatcaggatcacacgtaacatcaacctcggatggagctacagaatcaaataggatgaaaagcctatcaaaggaccttgtgttgctgttgcgcgaatgctcggatattaaagtgagtgaagagctggcgtcagattcatgaacaaggtgcccgggaatttcaaccgtgttttctaggtctggcagaatcacatcgagttcccagattactgaacatataaccttagctgtcgatgaacgtgattcacggattctgttttggaaggacctggtactcaaaaggctcgagcttcagagacatggagtgtagctgtagatcctgttattacatatttcccttttgctgcaacctgtaactagaattgtaactgttaatcctataaatttgcagttcttaaacattaaacaatagtaatgcttttttctccctgcattttatcatcttcct

SEQ ID NO: 39272 - DNA, 1209 bp, Zea Mays
ctggaatttcttgccaacagccctctgcgggctgcggctctgcccttcttcctgcagtagagagccgccgcccctcccaaatccccttctccctcacgtctctctctccccaagccgctcctcaccaagcccatctcagccgctccctccagccctcacctcgccggccctagctgctggtcgccgtcgaccgcgagctctccaacgcaggcggctcgctgcgccttcccctcgccggtcatccctgctccctcggcttccaaaccatggccgcctctcctccatctcctccctccccagcgcctccctctctgctcctgcactcggagcccagtactccagctcgccaacgctccctccctgctcaccggccaccaggaagctcgccccatcccctgacttgtcgtgtcttgggccgtcacggcactctcatcttgcgtcgtcgccttattgctgttctggtggagaagaaaggaactctagtgcatcacacaccttgtgcttgacgaaatgtttgaatcagaatttatcatcgcatccgcaatttggtttaatcatgcactacggcatgattaatggagttactgaagaagggcacccaattcaattgcccccggttgctgatcggacatttcatttgctcaaacagaagttggtccaagctcctgttctaggtcttcctaacgacttcagcaagggtttcgtgctagaaacagctgtcttcatgcaatcgaagaatctcgtggcttatttgaataagcacctttgtccaagaaaccaagcttcatcgaggagtgtttggcaatctttatggcaattattgacgaatggcggccatacttgcagcaccgtcaaatcgtgattgtactccatcttactgagcagagggtgaccttacgtttgtagcataaagtcctgctcaagctcattgacttgcattatcaaattcgcacaaacaggcaacggctgtaccgagcgactgatttggcacatatatatataagccgagacagtgggagaggagagctggacaacaggcaacgaattgtaattgaatcttctgaatactaaaggaaagcggtcacatcccattaatttgcacggtctctgtgggctgattccccacccttactcatccttatctctcatttcaaacttgtaaacagtacagtctcccatttatatgaatctatcattatgtatacgacg

SEQ ID NO: 39273 - DNA, 4235 bp, Zea Mays
ccaaacctaactgacattcgagcaatcgagcggcagccgtcgccgtcaattccaagcagcctacgccgcctcgccgatggccgccggcggccacctccgcccgggctcctacctgggggacgtatcagcgctctccttgctcccctcctcgccgcaccctctcctcctcgccgggactggatcgcagctgctcttgtacgaggtgggcgctgccaggctcgttgcgtcgttccgagtgttcgacggggtgcgcgtccacggcatcgagccccggagcggaggccccggctgtcacagctacacgcttgcgttgtttggcgagaggagggtgaagctattctccctcggattcggtgttgaagcagatggcggtgaggcgcggctggagctggagcagaggctcccggggtttgaccattgggtgctcgacactcgtttccttgaggtcgatgggctgcttgcgattggtctgagtgacaattcagtagcgctgtgggatctgagcaagcgtgcgttggttacccgagtgaagtctccagagaagtgccttctgtattccatgagaatgtggggagactctgttagagagtttcttgtggcatccgggaccattttaaacgagattctcatatggaaattggcaccgcaagttctgggatcctccatggtatgctccaatgaaggaaatacttctgatgtaaacagtcccaaaattatgaatcctgatgatagtcagcacatggcagttcatcttggtaggctcaaggagcatgaaggctcaatattccgaatagcttggtcctctgatggatcaaagtttatgtctgtttctgatgaccgtagtgctcgcgtgtggactttgagtttcaaatcacagggtttcgccaatcatacagccagtcacgacaatgttgaaattataccaaaactcacactttttggccatagtgctaggatatgggactgctatgtttctgattctatggttataactgctggtgaggattgtacttgttgcatttggggaatggatgggaagcttatcaagatgttcaaagaacacattggacgaggaatatggcgatgtttatttgacccaagctcactgcttgtggtcaccgctgggtttgattcagcaatcaaagtgcaccatctatgcaactccatttttcatgacatagtggacgataaaaagcaaaagcgagtatgttcgctgtctacactttgcagaagaaaatgttctgtatgttgccacaaataatggatatctgcgtcaggccaaactctctaacatagaggatggaggacataattgcccttggagatggacggggaaatgttactattgtccgtttaaccagtagcagcagtgaacctaaactagacctatcttttacctggtcagcagaaaaagataggcaactactaggagtgtactggtgcaaggctcttgaatccacattttcacagctgatcctaggggtgtgcttaagttgtggaacataagaaatgtcctgttctcaagtactgatattatcaatgcacctcagatgtttccacctgtagcagtgtttgaaccgtcctttggagctcgaattatgtgtctagatgcatctcctgaagaggagatccttatagctggtgataaaaagggtaacatcacagcctatcctttccctaaaatattggtactgcatgacagtggtctgatgcaacagaagatgcttccatgttgtcgctttaaaggagctcatggcatttctagtgtcacgagtgttcatatagaagactccacttctgatcatattgaaattcacactaccgggggagatggttgcatttgctttttcaagtatggaagaattgcacaaaagattgaattttttggaatgaggcaagtaaaagaactgggcaccattcaatccatctacactaatcttgcatctgagagccaatctagtagtacctacgcaataggtttcacctctgcagattttatcatttgggaccttgagaatgaaacaaagatggctcaagtatcctgtggtggctggcggcgcccttattcttattatcttgggacagtccctgaatatcagaactgctttgcctttgtaaaggatcatgatattcacattcacaggcactgggcaccaactcatgataagaaattactcgctcaagttctccatttgcagtttcatggtagagaagtgcactcgttgtgtttcataaatccagcaagccattcagatcctgagaatagctcagatctgttgatagcaaccgggtgtgaagatggaactgtgcgccttacaggatttttgactggtagttctggaaaatggcattcctcaaagttgctaggggagcatgtaggcgggtcagctgtgcgagctacatgcttcataccagagacctacacagtaacatataattcatgtaactacagttcgaacggtatttctgatggcattgctgttgaaaaagacgagactttcttactcatatctgttggatcaaagcaagtcctcactacttggattttgcaaccgaggaatgcagaaaacagacaagtatattcaagtggcttagatattgactccaagcaaaactccagaaacttggaaaacgttgattcagccatgtcatttcaatggctaactacccacatgccaccaaagcttcctaggaacagactgaaatctggccacataaaacagagggttgaggaaggaaatttttctgttgttcagccaaatatggacgttatggatcacatggaaaatgactggcgttacctttctgttacagcatttcatttgaagcatccggttctcagcaggttgacagtatgttttgttgctgttgcttgctcggatgcaacagttgtgctccgtgctcttctgttaccttctcgattgtggtttgacgttgccttcttggttccacatgcatcaccagttttggtgctgcggcatattatcatcaatgctagccactataaagatgatgctggagacagataccttattgcgagtggatcaacagatggtagcatcactttttggaacctgacagagaccattcatggcttcatgcaactaatatcagagactcaaccacatatgagtattgattatcaaaagcgtcccaggacaggaagagggagtcaaggtggtcgtctccggtggagatcactgtcatacgcttcgaagaagagagatggagatatgtcatcctctgacggaagcaacccgggtagcctaaacactgctgaaaattcatctgaagcttctggtgtggaaaacactcagattgtagtgcatgaagcaagtgacagctcaaaaactgagatgccttcaagtacccagtcatgtgatatacctgaattgagaccaatgcactcgttatccggtgttcaccagtcaggcgttaattgcctccacatatcattctcaacacctgacaagtcatactgcattataagtggtggagatgatcaatctgttcagcgcttcaacttcagagtaatatcttcggaggattgcttaacaaccccagcaaggctaaattcgcatgacaatgacacacttaaaattctatatcaacataaggtagcatcagctcatagtgcagcagttaaaggaatctggacagacggcacttggtcgttctctactggccttgatcagagagtaagatgctggaagatgggattagccggccaattcacggaatactcccatgctatcattagcgtgcccgagcctgaaactctagatgttttccatgaccgggcaaagaggaagtaccacattgctgttgctggaaggggtatgcaaatggtcgagttctcaccacctgaagatgattgactacaatgattgcaacccctgctatggatgtcacatggatgttgattttgctcggcttgcgtggatcatgtagttctatactgagacggttttttttaaaaaaaaaatggttaaggatgtaacaaacagagaatttgatgtgttatcaggctatgacaaacagatcctacatatacacatataaaacactgttttgcatttgcaatgtataatgtactatttacagagtggagtttcaaatgagggattgagatgagtaagctgctagagatagtcttagaaacgtttggtgcgcaggggagcactgtagcagggaagtgtggcctgacgatacgtaaactgttgagatcatcgttg

SEQ ID NO: 39274 - DNA, 2238 bp, Zea Mays
ttgacactcgttttgctagacacatatccatacctcaacaccgatgccggaaccatgtccccattcgagcacggcgaagtgtttgttttggacgatggtggtgaggtggacttggaccttggaaactatgagagatttctggacatcaagttgactcgtgacaacaacataaccacggggaagatataccagtctgttattgacaaggaacgtagaggagattacctaggaaaaactgttcaggtcgtgccacacatcacagatgaaatacaagattggattcaacgtgtggcaatgaatccagttgatgacaccgaagagccagctgatgtttgtgtcatagaacttggtgggactataggggacattgaatcaatgcctttcatagaagcactaggccaattttcataccgtggcctggaaacttttgcttggtgcatgttagtcttgtaccagttctaaatgtagttggtgagcagaaaacaaagcccacccaacatagtgttcgcggacttcgaggacttggactcatgcctgatattttggcatgtcgcagtacacagccacttgaagaacacgtgaaagtgaagctcgcacaattttgtcatgtcccgataccaaatatcattaatctccatgatgtcaccaacatttggcacattcctttgttgctcagagatcagaaggcccatgaagctattttgaaggtgttagaccttcagtgcgcgagtaaagttgctcgagaaccccaattgtctgaatggactgaaagagtcagcagatgtgacagattgaaatctccggttaggattgcaatggttggaaagtatactggcctgtcagactcctacctatctgttataaaggctcttttgcatgcgtcggttgctttggacaggaaacttgtggtggactgggttccttcctgtgatcttgaagattctacagcaaaagagactcctgacgcctatgaaaaggcatgggagtcgttgaagggtgcagatggtgtgttggtgccaggaggttttggagacagaggagtccaagggaaaattctggctgcaaaatacgcgcgagaaaacaacgttccatatcttggcatttgcttgggcatgcaaattgcagtgattgagtttgcacgctctgtcatgaagttgcacggtgctaacagcacagagtttgatccaaccacaaaaacaccatgtgttgttttcatgccagaggggtccaaaactcatatgggagcaacaatgcgccttggttcaaggaggacctttttccaggccactaactgcaaatctgctaaactgtacggcaatgcttgctacgttgacgaaagacaccgccacagatacgaggtgaatcctgacatggtcccagaatttgagaaggcagggctttctttcgttggcagggatgagagtggcgaacgcatggagattatcgaactaccaactcataggtttttcgtcggagcacagtttcaccctgaattcaagtcaaggcccggcaagccatctccgcttttcttaggattggtagcagcgtcatcaggccagcttgaccacttgctccaacgtggccttaccagttcagcaggcagagacatctgcggcaaagggggagcgcagaaaccaaaagcttgccagaacgggcatgtcatgaagccactgaatggcctggtgcacgggcactattcagcgactcgctgcaatggcgtcattcccatctagcaggctgttttcgcttgttctttttctttccgttctacctacctgcagggcaaccaggaagagaagggctgtttgctctagcgacacggcagccgtttccgatgttttaacgaggaagcaattggcatgcaaagctgtcgcgcgcattaagaggcaaatctagcagcttattagctagggttcgattagtagtagtagtaatccgatgttgctggtttatttgttagtttgtttgctaagaaagattacaagggttagtgatgtgcagctagctccagtgtagcctgccgtctcgccccatttgtacattgtaaaaccactgctactctccatgattgactgaatggatgagtataaacgtattggaccaacatgctcggtgttataaaaatctaagttgcaatccaactgtagttgtctcggggatgttcggtaaagttgcgtgagctggtggcacgagctatgggtttggtaaaggcttagcagactcatatgtacatttgca

SEQ ID NO: 39275 - DNA, 2640 bp, Zea Mays
cgtaaagctagtagtgccttccgtcgagtctgacagcttgccagtgtcagtgcaatggtgactagcaaatcctcgtggagccaggttgtaaaaaataccaggccgacaaacctgtccgttgctgcaagaaacctccaaccacaggaccttggagccgtgatatttggttgcacaaacagtaccattcaagagtgtcactcacggcaactttttggcttgccaaaaacacatatttcatatgtacgaaacattaaggaaggactacctctcttcctcttcaattatgatgatcgaagattgtatggtatttacgaagcttcagggaatggaaaattctgtcctgaatcaaatgcatggtcacaagatagcaagggcaaaacaagctatcctgcccaggttgcaatgcgggtaaaggtgtggtgttttccgctagcagagaatcagttcagaaatgcaattatagccaattactaccagaaaattcccggtgtccctggccagaagcttcattttttcaagtttgaattggatcatgctcaaacacgtgttttgatggatatgtttactccttctccttctcccaacagtttctggacgccccctgctgcagcaccagctgacgagcatgcgaaagaattagtgttgtcacctggatgggcaccagagtgtgaagggaacaataacctcaaatcagaaaaggttgtcaagtcatatgcagacatagtgaagaagaacacatttgtggaagttgggacaagagatgtggatgtggaacatgcaggctcaggtgatgaatcttctggtggtttcgatgaactggattgtcagtacacaccaacagagagggaggactacgctctatcagatagggtggttcaagtgcaacaacagtaccctgataagcaggcagaagtgcttagctttgatcgggttttacaagggcgcatcacttttcctggtcagcagtggcattctgatttttatgccaatactacccaaactgaggataacgatgcatatagctgcgagtatgcccaagaggtcaaatatgcaattctggatggcagctctaatttgccagaaaccttagattctgaagttgataaactgtccctggggcattctgatttgctggtgcagttgttggactctgaatcatgcacagaagctaagctgattgatgcagtgaaacagttatctggacgaatagaggcttggtccaacaaagaagtcaaacatctacaagggatgaatgagaggttactgaaaagaattgttgaactaaagggaaccgttatgacattgaattctaaaatagatcctttaaccctagatgattcacttaaccagtttgtagaacaatgtttgggttcagaagatgtcatttatttagttggtggttttgatggcttctcatctttgccatcactagactctttttccccttcattggacatactaacaccccttaaaccaatggctgttggcaagtcatattcctcaactgttgcactagagggcaagatatttgttcttggtggtggtgatggtgcttgctggtttgatacagttgactgttatgaccgaagccgtgatgattggtccacatgcccatcgttgacttgtgacaaggggagccttgctggggttagtgtcaacgggagaatctatgcatttggtggtggagatggaaccaagtgtttctctgatgttgaaatgtttgatcctgtgcatggaaagtggataaagaatcaacctatgctggaaaagcgctttgctctagctggtgtagcactaaatggtgcgatttatgctgttggtggcttcaatggtgttcaatatttgagctgtgctgaaagacttgatcctcgggagcctaactggaaaatgctaccaaagatgagtgcaggaaggggctgtcatacacttacagttcttaatgagaagatattctcgattggtggatatgacactagggctaaagcaatggtgtctactgttgaggtgtatgagccaaggatgccatcgtgggtgatggttgaacccatgaactacaccagaggatatcattcttcagctgtgctcggtggctcaatattcacctttggtggggtgaaaggtgaagcagacacaatcttggatgtggtggaacactacaaggaagggtgtggctggatgacaacgggattgaagtcgattggcagaagatgctactgctcagcgattgttctctgactgtaactgccttaaaaccaagtgagaatgaggagactgataataggtaaaactaatatattaatattaggtaaaaactaagaaggctcttgcttagcctgaactgacaacactagacacgatggacctcgtagtttctgaatcggcgaactgtaaaacaaacattgagctgtttgtgttgtccgacactggatggtgggtggatgcatgcatgagtgaatcggtactgaactgatgtagagatgacacttccatggatgaatatccaagtatttgactctgtatgttgagctttttctctttccggttccagctttttactaaagcagcttgcctaaacaaaaaaaggcactgtaaatggacctgtgacatttacctgaatttgtttgtcagggcgcttaagca

SEQ ID NO: 39276 - DNA, 474 bp, Zea Mays
gataggacaagatggtactccagaacacaactgcacaagcacgtattacttccatcttcccgcagcttctttgctacttcgcggcagcgtttcttatcctctcgtttcaccgggcaagtggcgtggttggcccggggcctccggcttgcaaattggcctcctccaactccttatcctccaccatatgttgaagccttgattctgcagcttcccagtccctgacacaggattgtaattgtcgtgcaactccattcctccgtttttcctattcccgtattttaccaatcctgcattctaaaggggacctcagtctctgctgccgttcctcgacgatcctaccaattgtgccgaaggaccgtccgatgtttggtgtgtggcttctttatgaggaggaacgtttggcgaaagccctggatggcattaggtggagctaatggtggtgacactttggaagctcatgaggaagactgtgat

SEQ ID NO: 39277 - DNA, 1098 bp, Zea Mays
cctgattctgccgctgcccaccagattccttatttcatcctgaagatgagctcctcctgtagtcctccaatcatcctccattttcttgctcttgatctttgaggacttggaagttcctagccacaagacgaaaaacattgtgcaatacattagacagatggatgactcaaagaaggttctgttggtggatggaggcgacattgataagaagctaaagctggccactcaaaaccttcactacgttaacgtacttccttccattggcctcaacgtctacagtatcctccagcatgacacccttgtaatgactcgggccgctatcaacagaatcgtcgagcggatgcatacccccatcaaccgctagcaaggagggtttctgagtcgcaccactgcttcttacagccagcaacctgtgctttttcgttccctgttaaagctcgaaggtttcctgttatcttggtgctaacatggagctgcaacgtgagctgtttattttctgtcagactggaggtaccgaccgaggtaggagggaaatgttgtggccttttgtaagcaggtcattggatgtttattttagattattttttggcgttttacccacactacccttgaaacttagtgagttcttatccagcaaataagattatgtaatcctggattatataggtccaaagcttgggacagcaatttgtttagagtcctgtataatctagctgtcacgtcgcaggactcacgtggagaaagatgaagggatttgcatcgtttagggtttagtaagtggcagcggattctgtatttacttggatttggtccattttcatagaagttggctgaaaacgaaaggtttggttggcagaagccaattctaagagacataagctaaaacaaataggcccatcatccatattaaataagctagattgtatatttttagaagcaaacaaataggccctattttaatctaaaattttactgtctacgctgtaaatctcgccgcaccttgatttcggtccgtccgtcgcagccgaagtatgaatttgatgttttttaaggtccaaacaagcacaacaactctattttgtcacgccaacaaaaaaa

SEQ ID NO: 39278 - DNA, 1895 bp, Zea Mays
ctcgggcactcggctcacggcggagcaaaccctctcggcctctcctcctgagtcctgcctccgtccctcatatattaaccgcaattttgtcttcgcttccgtcgccagattcctccgcaccgccatggatgaccttgagcatgtcatccttcttgcctccgactcacctgctgccgcagcggcgtccccatctatccgcgcggaggctctcgccttctgcgcccgcgcccgcgacgagtccccgccgtcgtcgctcctccgcctctgcctgtccggcatcgcctcctccccgcacgctcaagtccacttttggtgcctccagtccctccacgacgcgctcctccgccgccggctcgtgctccccgacgacctcgcgttgctccgctcctccctcctctcgctggcggtttcctctcacgccggatcgccaccgttcctccgcaacaagctcgcgcagcttgttgcgctcctcatccgcctcgagtacccccatgtttacccctcttacttcattgatctcctcccgcccgcaccgccgcagcctggccccacggacatgttcgcgcgggttctaatctctctcgacgacgacctgctctcccaggagtacccccgcaattctggcgaagccgccgacgctatgcgggtgaaggattccatgcgcgcacagtgcgtgtcccagatcgccagccactggcacgccgccgccgtgactctccgtacagccgaccctgcggctgcggcggtggcccttgacgcggcgcgcaggtgcatctcgtggattgatgtcggactggtcgccaatgatgtcttcgttcctctattctttgacattgcgatgtcccctggaagcgcgtctccactcgctgctgcagcggtggggtgcctttctggtgtggcgtcgaagaggatggactcaagggcgaaggtgggattgctgaggtcactcctggctgcacagcaggggcttggtagcccagacaatgggttgaaaatggcacctttggtgatagcatatgctgcagaggctctcgaatgtcatagcaggcttggccctagtgatgctgatggagctgcagcattggagatgctggaagaggtgctaccagctgtatttgcagctgcagagagcggtaacgatgaagatgtggattctggttccgtgcttgagttcttatctggctatgtgagcacaatgaaggcaccatctgagaagcagttggggcacttgggacggatcttggaggtggtgcgggtacagatgtcatttgatccagtatatagggggcatcttgatgtgcttgacaagatagggaaggaggaggaggacctcatggcagagcaacggaaagatttgatcgtattattccggagcatttgtcgtgttgcaccagctgcagctcagctattcataagtgggctgattgtgacagctctctcatctgcagaagctagtgtggaggatgttgaggttgctcttaccctgttcttccggcttggagaagctgtgggtgaggaggagattcggactggggcagggctgataggccagcttgtgcccatgctcctaactgcgaggttctcgtgtcacacacaccgcttagttgcattggtgtacctggagacagtaacccgctacatgaagttcatgcaggagcatgtgcagtatgtaccacacctgcttggcgtgttcttggataaccgtggaatacaccatcagaatgcccacgtgagccgtcgtgcaggatacttattcatgagggcagtcaagtcattgaaggcaaagctagtgccttacctggataccatactgcagagcctgcaagatgtactaagtcaattcacttctatgaattggccaaacaaggatactaagtttcccagctcagaggacg

SEQ ID NO: 39279 - DNA, 3479 bp, Zea Mays
ggaagcaatttttttgctaaaagccgactttctcacagtgcaaaactgaaagcacccctggacctgttttaagtggctttcggatgaaactgtgaaaacatatatcgaagaatttttaacgactattagtggtttacactaaacgttttttagctttttaatagctcacagcctacaacagcttcttccacatttcacaatctataacattttttttcacaaccacaacgcaaccgaacagacttcgtagactcgtagttccctaaaactgactactagaatcaattcgatcgaaacagggccttatcgtgggcttcacagtcctgacggcaaatatcaagatgagcccatcaaatacagtagagattatgggctctaatttatacctgaccacagcgtcttcctctgtggtcaagcacggcccttttacatttctctttcctcctcctcccgcccggcggccccgcgccgccgctttgttctcctcttctcgccgccgttcagcggcgcgactagcctcgtgctctttgcccctctaggttgttcgtgttacaatagctttgttactgctcctgtttcggccctcctgttttagaagttcctggccgcctcacacgccatgcacgcagcatgttcgcgcaattgcttgagcgacctgcttcactgccagaggcattggcgatgccgatgcccgtaccagctctctccggcacgaggcatgacgcgtggccgcagtgtgaaggaccggagcaagaagaagcgcgtccacgcgctcgaggtagccaccgagcgctggaaggttctctccaaagtgctcgccgtcgtcgacgcgctcaagaaggaggatgagcacgtcaccccgctcaagcgcctcgagatcctgcggccgcagctcggcctcgtcaagccgcacaaggtggcccacttcgtgcgtcgctcgccgcacctgttcgaggtctgccgcgacagccgcggcgtcatgtgggcaggcctctcgccgcaggcagaggcgctcgtcgaggaggaagcgcgcctgctagaggatcactcccctgtggccgtgcagtacgtcaccaggatgctcatgatgtccgtggaccggcggctgccggtcgacaagatcgcccacttccggcgcgacatgggacttcctcatgactttcgaacacggtgggtgcacatgtttccggagcatttcaggctggtcagattggaggatggtgagtatttggagctcatctcttgggacccaacctgggcagtcactgagcttgagaagaaggcgtctgtgtcgactggcgatgccattgccagttcgccaggagagctgtcgcttccgtttccaatgaaattcccaccaaatttcactacttactacagatttcgaggaaaagctcatcattatgtgaaaatgggcaataccgatcagtttcagaaggtcacctacctgtccccttatgcagaggcaaagggattgactcctggatcgccagagtttgataagagggctgttgcagtgatgcatgagatactgagcttcatgctggaaaagaggctggtgactgatcaccttacacatttccgtcgtgagtttgtaatgccacagaagcttatgaggttactattgaagcattatggcatcttttatgtttctgagaggggaaagaggttgagtgtgttcttaactgaggcatatgatgggaacgaactgatagagaagtgtccgttggtgcggtggagggaaaaactccttcaacttactggttacagagggagattgaagaatcttggtaaagtcgacgtgtgttctgattcagatgagtacttattaggccatgatgatgatgatgatgtattggatgttgaaagtgaaaatccagatgacatcttagatgactgttctatttcagatgattctgagatggatttaggggatgcagatgcagatgaattttgcagagactgagttggtggcatgtgtgtagcagaaaagaacaaaaaaaaaagttgtgttaagtttgttatgaaaacaaagttcagcaataactgtttgtgactttaagctcaggatataattgtgtactatactctagctgctgtcatctatggagttccaagtaacacttgaggcggactgtattcttctctcgtcagttgtatttggactttcaaatattagtcaaagctcaaacagatcacaatgatttgaaatggcacgcttgaatattgcttataccagatcagtgtcctgtgatgtgttctttagaaaaaatgatgggacaaaacatgcaactgctatactcaagttatgatttatcgaagatatcttcatttaaacagtcataggtttcctttaagaactcataaggcaggagccaggaggtgatgaattagaagttcagatgtgtacatgtctacctcagtgtgccaatggacattatctcgcttcagcattcactggccgctccgtcgagaagatcggccaccttcgctgcaaacatgctcacatggcgatcagaggcgcggcttaatgcaaccacatgggagcgagacacgcccccatttacttcatcctgggtcgttgccaccatgaatgttgttcctgctctacagatctcccagcccacccatccatccatcctctactccccgtttcctgtttatgcttattcggacgggtgccaccaccatgttcctcatttaaggctccacacggcaacgcgtcctgattctctcgaaggacctaacaatggcggtgctgctggaagttcgccggactgacaaaattgcattcccattggcatgcttccggatattctctcgccgtccagacttccggaatttatgggttatgggcgatggaacggaggatcctcctctcctcatcctgtagatctatattcccgatctgaattcattgtacgtttggttttttttctttctaaaagatgattttgatgtgcagagaaaaggggttatccatgccggttgtctggatcaatccgacgcctggaccatcggaccggaatacctctccagctgaaaccgttgcgacagtgccattaagagatacgactacgagaacggaacgctactgggatggaagccaaagattgcgagtgatgccgcggactgacgaaccctcaaccaactggttgtatcgtatggatgtccgagactccgagtgcgagaggatgaacgtcactagcagagtggttaaccctcgcggactgtggtcaagctgtcgcttttgctgccgctgtccactctgcctgtcaggcgcgctatgagcctgagtgaggtcttcgctggctggctcgcggttcacatgtggccagcagatcgttcgtgtcactgtgtaaaacactgttatatccttgttttcatacgctacaatcattgtttatttttctaataatgtaatttacttcttatataaaatacatgatttaggactttaaccgatagagcgcaatttg

SEQ ID NO: 39280 - DNA, 3112 bp, Zea Mays
gataggatttccgagccacatcgcagtttattcggtgttcgagactagaagcctggagaaacgtttgttgttcttccagaacacgccctcggaatcctatcgcctcccacagcacacgacgcgcctttgctgaactctctctgtcgccatgctgccggcggtcgccgctgcatcccccggcctctcacatctgccgcgctaccaccaccttggccgtcgctttcacctccgccgccaccgccttctacctgctattccggccaggctatcgtgtggggccacccacgcccgccgccttctccttgccggcgcgttcgcaaaaggggagggttcttcaggacaggatgttgatcactctgctggtgccacaaattctgggtctgcataccttggtctcttcgttcgattgcttggcttggataatgacacccgtgatagggagcatgctgtttgcacactctatcaatactcccttggtggaaggaagagcatcgatgagataatgcaattccctggttgtattgttctcatcattagcctcctgaaatcagagtccattcttgcctgcgaagcagccacaggtcttctgcgtaacattacgtcagttcacatatataggaagatggctggtgagagtggagcaatggaagaaatcattaatcttctctgtaaatctacaataacccccaagattctagagcagtgtttgtgtaccatttggaacttttctattgatgaaaaatggaggtacaaggttctgaagagcgatgtcctaatgaagattgttggttacctggatgaagaagacatacaagtcaaagaagccgctggtggtatcatatcaaatttagctttgagttcctctagtcatggagctttggttgaagtaggcgtcatcccaaaattggttcatcttttgcaaaccaaagaagatgactataagattattagaaaggaagctaaaagttcactaatacagctggccactgatgattgttactacagccttataatagaggagggtctagttcgggttcctttggttggctcagctgcatataaagcctttaaacctctccctcattcatggccctcttttcctgatggctctaagattcagcggagttctcatccctcaaagtacggtgctaccgaactgctccttggcttgagtgtcaatgagaacgatacaaaaccagatgaagctaaaattaatgctatgataggacgttctaatcagcaattccttgcacgtgttggagctattgagttggatgatcaaggacaagaggaatctggatctgaaaagaatgacatgtataccattttgccatgggtagatggtgttgcacggaagctggggctgttaaacctctacttcagctgctcaagcacaaagatgtacatgttagagaagctggtgcttatgcgttggaaaaattatgtgtaagtgccacagtctgccataatatcaaaacagaaggtggactagaattgcttgtaaatatagtcaaggatcgacatactccagtagaactactagagaagataatttatatactttctcgaatgtttgacatggggatttgcatggttgctgtgccggatactgaaggttataaggatagtgaaaacagtgcaaagacatctgttaaccaagagatgtccagcgagttgatctttgattttgatgctatctcacacttaacggaagttctaaaggaagcatcgccaaggttgcaagcaaaagtctgttgtgtacttgaccatatagcagcttcggagcaacatgccaccgcaatgactgctgcttgcactggttcagtaattgaagctattcttgaaataggggttattcatgggaccagaagtgactctgagaactttgaaattcctagtgtagttataaaagaactcagtgaggctgtgtctgcagctgtgaggttactctcaaagttattgaactttgatcttttcatccgcagcataaacggtgaaaaaatcacttctttgctaagaagaacgctcaaatcaaatttcccccttcagtcaaaggattgtcttgcggcatgcctcattaagctagaatccagagctggcttatcaggagatcatggtgttagtagtatagatatggagataactatctatgagactattccaaggctaattgagcaaatgatgatatcactttcgtttgaaaataaaagaagtgctgtaatagagctcaacaagataatatctggtggtgtgctggaatatacaagagcagtggcagattctggaggcatatttccactggtgaaaatgcttgaagaggcggatggagatgcactggaggctatcttatctatcttatataatctgagcatggatccagagaatcacccagcaataattgctgctggagcagtgcctctgttgaagcggattgttcgtacagaagccccacaatggagtagtgcaattcagctgttgagaacattgcctgtatgacattgatgaagaaaatggccattcatcgccaacaaacattataaactgcacttagggcctgtttggtttgatggctaacttgccacactttgcctaacttttgtgcctaaggttagttcttcaattcgaacgactaaccttaggcaaagtgtggcacatttagccacgaaccaaacagccccttagtgcatgcacagccaatttcttagattgaggttgcggttgaacctagctccagctccctatcatcatcaaaatttgaattttatgatctggaagaaagcatcagcaaggcatttcctccaaagtagcgatatatgctgcccttttggctagttgaaaagcacaccggggcctgatgtgtccttttgctcacatcacatgccacggcaatagctagtaccacgaactattttggataccggcagtttgctggttgtgagaggacccaagaaagttcaaattgtagcttgctaaatcgtcgtgtttcgacactaggtgactttactctttaaaaatgctatcctttttgtgtaacctgaaatcctgaataacctccacggtgccaatatcaaaagaatctctttttgactccagctggggtaatcgtgaggca

SEQ ID NO: 39281 - DNA, 2337 bp, Zea Mays
cttttaaaggacgcaaatcaaagttcatgagggaaaactgagggtaaccaccaggaagtggaagatgagtacggagatgagtactatgatcaagatgagtatgatgaggaaggttcgggtgctggggatgagtattttgaggaggaagagcctacagagggacaaaaggagatcctagaattgagagaacgattaaaagagcagattaggcgaaaggcaaaggctgctgcttcctgcacagctggcagatcgtcttctttacaaatacctcaagccagggacaaatttggctctttctttgggccatccaagccggtgatttctcgtcgagtgattgaagaaagaaaatcattgaaagaactgcatagcacagttgcaagggagccaaggccttcgggagtacataaggacattccgtcgtcctctaaagtgcaaagtaaagtaaatggacatcagcataaacagaaaattgttaatcaggtaaagaagaaggccgaggcacttaaggataaccgggattattcatttctactctcggatgatgctgacctgtcatcctctccaaaggagaagcctgctgctagatcttccttgactcaaagggctgatcgtgaggtgatgcgaacaacagtgaagagcaaggcaccaacaagtcaacctgcacgggtgtcaaatggatatggatctaagaacaaaatgtcaactcaaaggcatgccgaaggtagggtagataccatgagaaaggaggctttcttgaacagagaaagggttgtctcacgtgacaatgaaaggatgcatgaaagggttgtttcacgtggcaatgagaggatgcatggtagtgcaataaatgggtccaaccaggcaagtactagcaaaaccacaatccaaaagcttacaagcagaggttccattgctaataagcaagcttccacggatctgaatgatgctgctctgaggaagagcagtgtagccccaaagcaccatttctcagaggttgacagatcaaaatccttgcaaagccagaagatgcagtcagctggtcagagactgcagcattcttcccatggtcagaggccacatcaatccatgcagcataggccgcagcagtcattgcagagtcggaggccacagcaaatgactcaggatcagaagccacaacagtctttgcagagtcaaaggactcaacagtccttgcagaataaaaggcaacagcagtcctcacatattcagaaattgcagtcctcacatactcagaaatcgcagtcctcacaagcacacagaccacagtcgctaagtaacaggtcccaggagttacgaggacaaaggcctctttcttcacagggacaatacttggagcaaagaagagtacaggcaaatgatagagtcaaacaagctgaaaggcacattcggcctccctcgaagtccatgccatctcgaccagtctcctctaatggaattcgcgatgatcatgcaaagagaaagcaagtggtaaaaagaagatttgatgacgacgacgatgaggacgaccccttggcaatgatcagaaatatgttcgggtatgatcctagtagatatgcagggagagatgaggatgtcagtgacatggaagcagattttgctactatagaaatggaagagaaaagaagtgcgaggatagctaggcaggaggacgaagagcaacttcgcttgattgaggaagaagagagacgcgagcaggagaggaagaggcgaaagatggcacgaggccgatagtccaacacgcgtcatatttgggtgttataattgcacagacctgattgcctgaagacgaggcccatggtcgatcatacgggcgcgttgcagacaacaggaaaacttgccacgtggattatatggcggcaaatcaaggaaaacggcaggtgggcaacgctgggcacctgtaacaagcagaatgttaggcgcagtggtttagttgacgaagctgacatagacccatatataagctctcatcagattgtttggatcacacaaggctcccaacgttgcagcgcttcatcagattattctaaattctagccacatgctgattctttctgttaagcctatataaggatgcctaatccaagtagctcctttgttcatttttgtttgggtgtagtgttgtactccctccattttttttatctgacggttgttagtttaaatttgaactgtccggcgccaaataaaaaaatagaggtagcaacaaacaatgtgtttgatttttttggtacaattttgaccttcgtcagacgatcactgcacagcagatttcgagtttctatgcctgtgatcacatgaagtctattccgctcgcaa

SEQ ID NO: 39282 - DNA, 815 bp, Zea Mays
atgggtggaagaaaaattcagatgcttatcctaatattgtctttaatgcctagggatttcatggctattcctgtgagtacggggtcctcagaatctgcctttagtgcagctggtagagtccttgaaaaaaataggacatcactatctcctgaaacactttacgctttagtctgtgctaaagactggttgattggattcaatgacgaagaagaaggtgaaccaatgactggaaagcgaatgtttgattcagatgatgaggaatatgattgggaaatttgaagcaggctaaggagttccttggtgcttccggtgacaagcgaaaggaagtcaattaactctgaatcagtgtttgcatgcaggttacacacaacattttattgaatggaaagaggacactcggtgaccacaagatcatcagatgatcatttgatgaactaattctcatcaagcatcaatgtcaccaactgtgtagaaatactgaattttagcatggagcgtctttgtaaacattttagcatggagcagtttctcatcgatcatggctgtcaagttctatttctctacacagttgcactttgtggttgttttctatcatttgtttgtgagcccatggattttactaatttattagcttgtggtggtgcttgcttgtatatgaaggcccttggattggcccgtggatttttaaaaggatcgaggcggattaggatgtcggggcattaaaaaacggattgaattgagttgtatcaaatcaatttggatttaagtagggctgggttcactttttaaacttataggattggagtggggttggg

SEQ ID NO: 39283 - DNA, 2009 bp, Zea Mays
ctataggccaactaggggaaccaacgagtgacttttttcaacctctgcctgaaattagctcccactggaagtcgaactccgtacctgaggggtgctactagagtcatctaaccaactcagctagaggtgcactatcaatcttacatatgaagctggccaagaagcattatcaatcacaagcctgctggaagggcaactttcatgttactggaggactgatacatacttgtgatggacttgaagcccatttccctttagaaatttctgtaagagtttatgaagcttcaaaccaaatgcctgaaattttaaatctagaggctgtacctatttcccagctgtggccaaaaaaattcaagatggtacctcccgacattgaggatattggactatggtttctgagcagtcgccaaaggccacactggagttttgatcaccttcttgaaaaagtttgttcacatactggtctgttcacaaaaattggtgatattgagttggcagtgttttcatcgaagttgcttacaccacaagatcagaggaaagatggcaaattatatttctggggtgtttttgggaagcatatgaggaagaagtcatgccaaccaaacagtcatataaaaaatgtggagataagcaatcccagtcaaccaaatggcaaatctgaggaagtaggcatgaaattggatatgagaaaaggcaaagaaaaagagagtgctaaatctgacgaggtattggattcaacaggaggcaatgataccgatagggtcaatggctgcgtggcagtgcttgaggctcctgattcagaccctgcatccagttgctcggttccggctgcctcttctcttggcggatattgccatcatgactctgcaaaaaatagctcttctatcttagattcttcatgccagcctgctgacggatcttctgttagcccagacctcatgctggacataccccctggaatttctgcgcatatacctcctggcttcacaaaagcccactgtcagcttcagatgggaactgctgctctgtcttttgctgataggcatcgcagtctgatttcggacattcctccaggctttactgaagttcatcgtggactccctcctgcaattccacctgctggaccagcttgtgtgtcgacccctgggactgaaaagaagcccttcgttaggttctcgcttaatgtcccaaggcctgttggaatgggagctccacctggatttactccactgcatgcagtgaagaaagagcctgggctgcctgatgtccatgagaccgcagataagcacacactacattctttggcagctgcggcagctgcagtggttaagcctgggaaaggaggtgaaatgaaaatcgcagacaatgaggtaaagactgaacaagatgaaaactcagaggaacgagattttccaaagatcaggaggctttcagacctgtactgtaggccttcggaggacagcactgaattttcccagcgtatgcctgcacgcttgcccgacaagtttcaggagcagagacccgagaaacgtcttgtgcatccacgggaggaggtcgggcggcgatgatgcctgcaaaggggccgatggcagcatcgccaggtggtcgtctggatagcgagtgcgttgtatgtggtgaagagttccccgcagagtgatttctaggattacctcgacaaagggtactagactgctttgtgttagtgattatcctgttcagcggcaatgatgtacatgcctggacaattagcatgctgagcttgtgcgtacaggccagcacttatcgtgaagtccgtgctacatcatcgaaacggttaacgatattgggtagttttggtgaaacccatgcatcaaatgtgatggtcgagcagcattactgtttttatagtgggaccaacctatcaaatgtgacgaaaagggtgaaattctattctagatccccaaatattgactattgaagagcatataaactaccagaaaatggaacttacatgtcaccgtgtaatcatc

SEQ ID NO: 39284 - DNA, 2210 bp, Zea Mays
cgacagtcgacaacacggtcaccaactgctcccgtctaacgatcaggatccagacgccaaggaagaagggtgaggtagaggttgacacagaaatcaattttctcctttctcggtctcgcgagcaagcctcgccatggatatctgcaccagttgcttccaagccagatattagagctgcctactacttgcgtcgcgcggagagcgggttgggaccagaaacaagagtagagcaagactcctatcttttttccacgcgccagtcttctctgaaccggtgaacccattcctcctcctcttcctactcaacgccacgatcgaagaggagactcagtcaatctcgccttgctctcctcttcgacccatcgtcggttcctgggatcagcatcgacgagcaggatttttccggctgtggaggattactgctgcttgacaaatccgagcgcaaaggttgcttcctgacgcgttcccccatggcacgagcaggagcacgagcacgagcaggagaaggcggctagaaggttcctgctcccgggcgtgacctctcacacggcatggtcgttgcttcgccggggaggcgcagcggggatggtcgataggagcagggccgtgctcatcggggtcaccgccggcgtcgcggccgcgctggtcgcggcggcgggcgtgcttctggccgtctggctctaccgccggcgggccagcgtcgccgcacggacgcgctccccggagtcgccctcggcgacgctgcgggccggcggcgccggtcgcgccagcctcgactccagcgtctccgtctcggtggtctccgagagcgccgccgactggggccacccgccaccgcacaaacgcgccgcgttctgggcctggagaggcggcgccggccacaacggcagggagccgccaccgctgtccgtctccgggatcccaaaataccattacaaggatctgcagaaggctaccagcaactttaccacaattcttgggcaaggatcgttcggccctgtgtacaaagctgtaatggccactggtgaagtggtagctgtaaaggtgctcgcgagtgattcaaggcaaggggaaagagagttccagactgaggtagcattgcttagcaggttgcatcataggaatcttgttaatttggttgggtattgtgtagaaaaaggtcagcgcattctgatttatgagtacatgagcaatgggagtttggcaagacttttatatggcgacaataaacgaagtttgagctggcaagaaaggctgcaaattgctcacgatgtttctcatgggattgagtacctgcatgaaggggctgttccttctgttattcacagggacctaaagtctgataatatacttttggaccattcaatgagagccaaggttgcagactttggtctatcaaaggaggaagtgtatgatggaaggaagtctggccttaagggcacctatggctatatggatcctgattacatgtccacaaataagctaacaaagaagagcgacgtgtatagctttggcataatactttttgaactgataactgccataaatccacaacaaggtctgatggagtacattaatctgcgattggaggggaggggagggttgattgggacgagatactggacaaggacctcctagtagggaacatccctgaagaggttcggatgcttgctgatgttgcctaccgatgcgttaacaagaatccgaggaagcgcccctggatatcagaggtcacacaggccatctcaagactcagacagcaccagctgataaagcatgatgcgataactctgccgaggagtgagaccaggaccgtccttaggaggatagactaccagcacgtggagcttagtgacctcactagcatcaaagaacttacgccgataagggcatcatgaactcgtgagcttgttctagtatgtaggttgctttatagagttagatttggacttggttcggcgatgttgtagctgtttgatgaaagcatcaggtagctagatcgttgaaagatgtcttggctgcaatgagagctctccttaattggagttctgtactgacctgaggtttgaaatcgttgtaaaaaaatcaacagtagtagctgtagcatttgataaaaaaagactttataaactgcatttttaccatggccatgtgagtacagacactgaattcgacagtagtagctcagtgtgagtaaagacactggattt

SEQ ID NO: 39285 - DNA, 3446 bp, Zea Mays
tttggtccgtcgtctccgctcctgccgacaccggcacaacaccgctcgcagtgactcgatccctgccgccgcagcctgctgattgcccgcaggccctcgccctgcccgatcctgtctccctgatccctccaccggtgcgatgccctctgccctcggcaggcggcagctcatctcgagtgctcccttctcgcccaccacggccgtgctcgcgtagcccggccggcgtcaccgccggaaaggtgtaggcgggaacacccgcgccgtgctgcaccgcccgtccgctccgggccccagttctcttgcgccagcacccacagcttgtagggcgcaggctggcggccgtagctccggtccatcggttggaccttcaagtctgacctgaaaattttggaaccaatggaagaggaagagtatagctctgaaacatctaatgaagaagatggcgaaaaagaaggaaatgctgctgagagtgatgtcttcagaccagttgatgtagatccagcatgtttaccaagagtagggatgatatttgactcggaggaagatgcctttcagttttatgtgacgtatggttgtcacgcaggttttggtattacaagaagatctaacaatacctttgatggtttccgctatcgctctacattcatatgttctaaaggagggcagtctagactgagatctggtgtgacaaaacctgcaagaaagcgaggtgtgaagactggctgcaaggccaagatgattgtgaaggatgcccattttcaaaatcgctgggaagtaattgttcttgagttggagcacaaccatccattggatccgaacttgcttaagtttaagagacatttgaagaactccccttttacgataaatccacctcaaatttgtgagtctgagggacaacagagcaactcagctcttgtacattcaagcagagttgttgatactggtataacttcgtcttctacacagattgaattcaaagccaagatagatagaaataggaaattgaagctcgcagaaggagacttagacgccttgttggattttctcaacaaaatgcaagaccaaaacccttgtttcttttacagtttagatatgaatgagcaagggcaactaaggaatgtcttttggtctgacgccaaatcacgcagttcatacaattactttggtgatgttgttgctattaatgtcacaaacttcagcgatcagtatgatatgcagtttgtgtcattcatgggaactaaccaccatgcacagccagtgttactaggttgtggcctgcttgctggtagatctcttggggcttatgtgtggctttttggtacatggttaagatgtatgaatgccaaaccaccacattcaataattacaaactactgtcatgatgtagcgatagctatcaaaaaggttttccctaacgcacgtcaccgtttttgcctttcacacatcttaaatgtgcttcctgaaaagttggaagaaattgataacaaagatgaaattatttccacattcaccacactagcctatgattatgttactatgactgattttgacagagagtggcaagatactatccaacattttcgtttggagagaaatgaatggctgtccaaactatatgaggtcaggatgcagtgggctcctgtttatgttaaggattcattttgggcaggaatgtctgtcacagacagaagtgatagtgtaactgactattttgatggctggttgatgtcaggaacctctttgaaaatgtttgtagagcaatatgaggaagctgttaaaggaaagttagaaaaggaatcttacgaagatttacgatcagctcagatgaggccaccaatggtgacggggttgcctgtggaagatcaagcagcaaaggtgtacactgcagaaatctttcagaagttcttcaatgaaataggacattcatttcattgcaattataatatacttgaacggaatgagtcagtggttacatacatagtttcggagcatgtcgatcaaacaaacaaggtagactacaaagttgcttatgataatgttcaaggtgacatatggtgcctctgccgtttgtaccaatccaaaggaatattgtgcaggcatgcactcactgtactgagacaggagcttgtgctgatgattccacaaaaatacatcattcatcgctggtgcaaggactgtaaacaaacttgtgcttccatatcccagcctgtctcagcaggtaatcaggaactgggaagctacgatgatctgtacaaacttggccacctatactttgcagaagttgtggaatttggttccatgaactcagaatcaaaagaatatgctttgtcaatcatgagggaagtcagggataaagtgatttcatatgagaaatcactaagagatcaaagggttgacagccatgtttcaacagccaactttgcatacaatcctgtgaatgaggattttactgatgatgctttgcctatctctcttagtacaaagggctgggatcttacccaaggccaatctaaacgttcccgaaagaagaagctggcgaccccaactgttcttgatactttgaaaaagaaaactaaaagggcatataacaaaaggaggaatgccactgcaaacaccctgaacacatctgccactgcaactgacggcataactgatggcacaaatgtggagaacatttcgtttgatttgtcacaatacaacaatgccccaagcttccactggcctgaaagcagcagcaggtctcagctccactgagtaggcagcaatgcaatcgtggatgccttccaaatagactaagttctgacagtcttgtaagggcttgttcggttattcctatcttctgtggattagatgagattggaaaaaaatatgaaagattttgacttgaaagattttgacttgtttgggattaaaacgcacccaattccactcaatctacatggattgagagcaaaaccaacaagccctaatttggaaaaaaaaaaaaactagaggtgatggatcaggtttgacctttctattcctgcctaggactctaggagtcagtgaccacctgaataaaggtgaaaagggaagggattcaatgtggtgaagtgacatctaccatctatgtaccaatttagtggaacgggttctctacataatcattcctttttttccttccatggatatttgcagctcccgattgatttatctgaaccatgtaaattaggtcagatgcccctgaatcgacctgatgtttcactatggatccctcaggaaatcatatgccccttctctgatgaagctgtttgtaacaagatgtttattgcttcaccaagttcatctgttttcgctaatatttgttccgttcaatttctatgatcaaattattatatttgttctgtccagataatattttgtatcattttattctttttttctcaaacatgcaggagaactgtgtg

SEQ ID NO: 39286 - DNA, 2151 bp, Zea Mays
atgtgataatagtgtctgtattctgataattggtaattgatatccctattaaccatacaactgtccttttatagatgtagaaatccacttgccccctgacaatagccccacaaggcagccactcctaacattccccaccgcttaaaatgcggcttgcccccaagccgcgaaccatgatcgtcaagttgccggagaccatgcacagtccaagcacgcaaactccataggtggaggccacggttgcttgaatcctccactgtgagcaattcctgctaagtcatgaaccaggggctttaccatggaaccaagctggtgattgtccgtctcaacgcagctgagcaccttgcccagttcttccaccatttcattcagtatgccctctacaccaaggatgttggcagttgatgaatactgcctcagcatcgatgagtagctccacttatcaggcttggaacgatcatccatggacgccttcatgtctccgaagatctcctcagcctcgtccacatagtcaatgtcgacgtacctggatagaagcatgttgtagagcatcacgtccattgcttcatccttcatcagccggtacacagccatggcatcctcatcgtagtgtgccctggtgtatgcatgcaggagacaacagtaggtcaccttgctgtgctgcacctgcttgtcaatcatctccctgtggatgctcttcaccacccaaggttgcaatgcgtggcccatgacatacaacattgtattgcacatgaccagtctcctcatatagcggcagtccagtccacctcctccgaatccggcggtcgccgccggccatcgccgcggcggatatggcgtccctccgtgtggtgtcggtgctagtgttggtggcaatggcggcgagcgcgggcggcgtcgcggcgcggcctctggtcgggggaggcggggcgtgggagaacagggcgccgctgcagacgtcgcgccccttcaacatcgcgcaccggggctccaacggggagctccccgaggagacggcggcggcctacgcgcgcgccatcgacgagggcgcggacttcatcgaggcggacatcgaggccaccaaggacggccacctcgtctgcttccacgacaccacgctcgacggcaccaccgacgtcgccgaccacccggagttcgccggccgccggcgcaccctcgaggtgcagtgggccaacgtcaccggatacttcgtcactgatttcacgctggtggagctcaagacgctgcgggcgaagcagcgatgggacttccgtgacaagtcccacaacggcgtctcgccgatcatcacgttcgacgagttcatcgacgtcgcgctgaacgccaagagggtggtcgggatctacccggagatgaagaaccctgtgttcatgaacaagcacgtgcagtgggctgacgggaagaagtacgaggacaagttcatcgcgacgctgaagaagtacggctacggcggcaagtacatgtcgccggcgtggcgcgccaggccggtcttcgtccagtctttcgcgccgacgtcgctggtccgcgcggccggcctcacggactcgccgctcgtcttcctcgtcgacgacgtgaccgtgcggaccgaggacaccaaccagccgtacgacgagatcacctcaggcgagcacctggactacatgaagaggtacgtggtgggcatcgggccctggaaggacacggtggtgccgccgaccaaggacaaccggctggccacgccgtcggacctcgtcgcaatggcgcacgcgagggggctgcaggtgcacccctacacgtaccgcaacgagaacaagttcctgcacttcgacttccggcaggacccctacgccgagtacgactactggatcaacgatgtcggcatcgatggcctcttcaccgacttcccggcgagcctccgccggttccaggagtggaccgccaagaacaaagactgattgtgaggttactgtcttggtagcgggcttctttgattcagtcattcagatcgtagctctggagatgttttcagagtgtagagacaattctttggtgttccttgttttaaatagccatatattttcttgattggatcagtaacacagttcttaccggttgttcatcataacagaccagtaatgtgatctcatcttcaca

SEQ ID NO: 39287 - DNA, 3294 bp, Zea Mays
ctcaatgcagcgttttccatccatccctccctcctcttgcgcatttccaccacctcgcaccaggctccactcctctccttcccttccctccccctttcgctcccctcctcgctcgcctcgcttctcgccgagccacccgaccaattcccccgccccccgcgcgcccagatcgccgccattcccttccccgccctgccgcgacgatcccgctgccaccgcaccttctccctcccgtcgtcctcccctccccgcagctggcggtcggtcggtcggacggaggaagccacagccggcggccagagagcgccgcagcgtgcccgcggatgggctggtaggaggcggcggcggcggtgactgtgttagcggcggcggcggcagccatgtatttcgccaaactcgatgactcgcccatgttccggacgcagatacaatcacttgaggagagtgctgaattgctgagagagagatgtttgaagttccataaaggttgccgtaagtatactgaaggactaggggaagcatacgatggagatattgcatttgccagctcacttgaaacatttggaggaggccacaatgatccaatgagtgtcgcttttggtgggcctgtaatgaccaaatttacaattgccttaagagaaattggaacatacaaggaagtcctgcgctcccaggttgagcacatgttaaatgacagattactgaattttgttgacattgatttgcatgatgtgaaggatgctcataagcgctttgacaaggctagcctctcatatgaccagattcgtgaaaagtacctatcattgaagaaaggtacccgaccggacataacaacagcaattgaagatgagcttcacagtgctagatcttcatttgagcaagctcgtttcaacctggtcacttcactttcccatgtcgaggcaaagaagagatttgaatttttggaggctgttagtgcgacaatggattcacatcttcgttattttaaacaaggatatgaactattgcatcaaatggagccatatattaatcagacaattggcagaagttcacataaacagatcgaggcagttatgcagtcaacttcaaaaggcaaggtagagaccatccgtcaaggttatctttcgaaaagatcttcaaacttgagagccgactggaaaagaaggttcttcgtacttgatagtcgaggaatgctgtactactatcgaaaacaaattactcggccacctgctggttgttccatgcaaagaaacgttaacccccctgaacatggttctgggttgttgagcagattgttctcttctcattaccatatacatgatgaaaagtctgtcgcacgtcatactgtaaatttgttgacatcgaccattaaagttgatgctgagcaatcagatttgaggttctgtttcagaattatttcacccacaaagatctacacattgcaggcagagagtgcagtagatcagatggactggattgaaaagataactggtgttattgcctctttactgagctcacaatcgccagaacagtgttttatgtcaagccctaagggcagtggtcatgataggagtaccagtgatggaagctcctttacaagttcagtggaatttgaaccttccgtaatcgatgatttagtactggagaagtactctggaaatgggcagcatgatgtaataagaggcacacatcatcacagaaccagcatgaaacctgaaaaaccaattgacttgcttaggaaagttgatggcaataatatgtgtgctgactgtggtgctttggaacctgattgggcatcattaaaccttggcgcacttctatgcatagagtgttctggggtgcaccgaaatcttggagtgcatatatcaaaggttagatctctgacacttgatgtcagagtttgggagccatcagtaatcaatctctttcagtcattaggcaacatgtttgtcaacaatatttgggaagacatgttgccagatgataattcaagtgctgatggatcagacacatcacagtacctctctgttagcaagcctaaacacaaagatgtattctctgccaaggagaagtttattcatgccaagtatgtagacaaagagtttatacggaagcgtagcatggatgagaatcaattagctgagcagatgtggaatagtgtagctgcaaatgacaagaaaacagcatacagtctcattgtgagatcacgtgccaatgtaaatttagtttacggagagatgccttctagcccatttttgactcttggaaaggcacttcagcaagagcaaccggtttcaccgcctgatggaagtcctaaatttttcgattgcaattcacatgacaagatttctcctcgggagcccctttcccctgctagcacgagttcacgcacagatgacatggaggacggttgcgaaggtctttccttgctccatcttgcatgccgtgttgcagacgttgggatggttgaattacttttgcagtatggtgctagtgtaaatatgaatgattctaggggtcggacaccccttcatcactgcattttgaaaggaagacatcggcatgcaaagcttctcctctccagaggggctgattcacaagccatggatcgagatggtaggacagcattgcagtatgcaatcgatggtggaacaagcgacgaagacattcttgcattgttagaggatcatagtagatgatcttgcaaccacaccttcagtaaattgaggttctcttggtgtggtcaactcaactaagaccttgttcggttagctctcaatccatgtggattgagtgtgattgggtgggttcaaatcccaaacaagtcaaagttcttctaatttttttccaatcctatccaatccatgtataatgggaataaccgaacaagacctaacagggatccagccccgctcggtcctagcttgtcgtgcagacaatccgaattcatggcatgaaagcaacctatgtacatgtcgttctagggcttcagtatcatgatgcgcatgttgtttctttccccgccgtttgcttgtttagcatcagtggtccttatttagtcatctggcaaacggtttggttttgtttgctgcaggtgatgcatagtaagcttgtaaatggagttgcttctcttaattttctagtcatcttttatcatgaagtagatgtggcattctaatgaaagatggttgtacatattgagatgtgctgttgtggcatatatgaaatattggcatggtgtggatggtatatacgaaagttgtgcttgcttaatcagaatatattgcattgttg

SEQ ID NO: 39288 - DNA, 1364 bp, Zea Mays
accagaacactcccctttcccctcctctcctagggtttcacagtgacgcttcctcaccaccgccgtcgcagagatgcagtccctcgtgcccttcagtacggcttcgtccgcaaggcctatggcgtccggaccggcgagacgctgtgcccggggatctcgtgcgaggagagcgccatccacaagcctcgctccacctgccgccgttgactggtccaccccttctgtaatccttactgtttcacgctcgctccgcaggctcgctccacccaccaccggtggtcgggggtgatttattcattggagtttactgcatttaggttgctcaagattcagttttgcttagaccatcagataaactctactagcacatactctgacttcagattggacatgagagagagactgcaaatttgtctgatgcaaaaaaatcatcgataagtcaaaccttcagataaagtcagtcatggcattggatcatctaaaaattatatttatgttcaagctaagaaggaggctcatgtcaaagaggtacgtacattctattccttttcgacaaaagttgttgtaggagggacaatctaaaagtattgtgcaagatatagagcatgcactcatcatatctaagtgatcggagtgatattgattagcttattagatggatattggcccagtttatctttcatttttttctatagctgttagaattttactttgctcagttcatactataaataatatgagactcttgttttgtggtccaagtgtttagcgcttagggtgccttggaagtacgctagcttgttgtcatgaagaagtcattcaagttccttccagcacttcctatatttcttgacataatgtttcatcatgttcttggtgtaatattgtcattgtcatttgttcttgtctttggagagggatcatgtctgggctcacactggggctcatgtcgctcggcctcgtcgagctggtgatcctccaatgtagcgacataggcatctcaagagaccattaatattatgaagaggtcgatggaagaaaataacaacctccaactattaaacttcaatcgagaacaagtgcctccagcttatgtctgcttgaccactatatgatctacaaccttatggctactatagaagatagttatagtagctctgaatgtgaagttatacgatcattttcaattatccttaatatttatcactttgagtttaagttataagattggctttggattttaagttaaaggatttgaagatatatgtattgaagttatatgcttctttaatgaatgaaatatttgtgttcaacagattcatacaatattattgttggtgtaacattccatgatgatatgaatt

SEQ ID NO: 39289 - DNA, 1817 bp, Zea Mays
gttctagtagccggttctcaatcctcacccaagcgcctctaggccgaggctcggaggccacggcgaggaggagcagcagctgccagcaggggaggacacggatagtagccggcctcccgccgcccgaggcccaaccgcccccgcaattactgttgttgctgcgtgcagagcggttttgaattgccgtctcctacccaggaataatccatggccccgcctccgccatggcttgccgccctcctcttcctcctcctacccgcgctgctgccggcggtcggctccgtctccggcgcggcggctgccggcatcttccgggtgcggcgtaagttaccagccggagttggaggggacactggcgccaacatcagcgcccttcgtgcccacgacggtcgccgccacggccgccttctcgcggctgccgacctcccgctcggtggcctaggtctccccactgacaccgggctctacttcacggagatcaagctcgggacgccgcccaagcgctactacgtccaggtcgacactggcagcgacatcctgtgggttaactgcatctcctgctcaaaatgcccccgcaagagcggactcgggttagacttgacgttctatgaccccaaggcgtcctcgagcgggagcacggtgtcctgcgatcagggattctgcgcggccacctatggggggaagctgccagggtgcactgccaatgtgccctgcgagtacagcgtcatgtacggtgatggtagctcaacgactgggttcttcatcaccgatgcgctgcagtttgatcaggtgactggggatggacagacacagcctggcaatgctaccatcacattcgggtgtggtgctcagcaaggtggggatttgggcaactcaaaccaagctcttgatggaattcttggttttggtcaggcaaatacgtcaatgttatcacagctagctgctgctggtaaagcgaagaagatatttgctcattgcttggataccataaagggtggtggaatttttgctattggaaatgttgttcagccaaaagtaaaaacaacaccgttagtagctgacatgccgcactacaatgtgaaccttaagtcaattgatgttggtggcactacattacagctcccggctcatgtttttgaaacaggagagaaaaaaggcaccataatcgacagtggtactaccttgacataccttccagaattggttttcaaacaagtaatggatgtgtgtagatgatggattcccgaccatcaccttccattttgaggatgatcttgcactgcatgtgtatccacatgagtactttttcccaaatgggaatgacatatactgtgtgggattccaaaatggtgcattacaatcaaaagatgggaaggacattgtgcttatgggagatcttgtgctttcaaacaagttggttgtctatgacttggaaaatcaagtcatcgggtggactgactataactgttcgtcgagcattaaaattaaggacgacaagacaggcacaacctatactgtcgaatcacatgacatatcctccggatggaaattccactggcacaagtccctggttctgttgttggtaacaatggtgtggagctatttatagtacactaactctattgtacaacacgaacacgcacttaccgaaattcatttgattcgtattcttttcacaaaaaagaatatctagggttttaacttgcgttctctgaccacggaaaacgatgaaaacaaaaacgttgtgtgccatacaatgagcctgtgtgtcactagtgttatgctgagacaagtgttgatcccacttttgggcaggc

SEQ ID NO: 39290 - DNA, 3252 bp, Zea Mays
tccgaattcccaaaccgggtatacgctcatcggttcctcggcgctcgcctcgacctccgactcgaagcggccctcctccctcgccggacgacggcgacggccgtggccgtctaacacatccgtggggaaccgctcccttagttgggcctcctccggccatggtgcacagcgcgtacgatgctgtcgagctggtggctgacgtgccgggccacatcgaggccgtcgcctcccacgctgggaagctcctcgtcgcggtttccgacaccgaaggcttcctctggggctccgactgctccttgcgcatctactccgctccttccccctccgacggcggcggcgagatccggtgggacgggccctacgcgctcgagcggcaggagccgcggttctggcggcgcccgcccttagccatggaggtcagcgccagccgcgacctcctgatctcgctctccgagtggatcgcgctccaccgcctccccgggctcgagaccgtcgctgtcgtctctagcaagacaaagggggccaacgtctttgcttgggacgagcggcggggcttccttgccgtcggtcgacagaagcgactcaccgtcttccgcctcgacagtgggcgagaatttgttgaagtgaaggaatttggagtgccagatattctgaaatcaatggcctggtgtggtgataacatatgtcttggaatcaggcgggaatatatgataataaatagcatgaccggggcactaacagaagtgttttcttctgggaggatcgctcctcctttagttgtgcctctccttactggggaactgatccttggcaaggataacattggggtattcgttgatcaaaatggtaaacttattcaagacggcagaattatttggtcagacacaccagcttctgttgttatacataaaccatatgccgtggcccgcctgccacgacatgtcgagatacgctctcttaggccccccaatgcattggttcagacagttgtgctccgtgatgttcaaaagcttgtccaaactgaccactgtatacttgctgctctatctaactctgttcatggtttgttgcctgttcctattggagctcagatagtgcaattgaccgcttctggagaatttgaggaggcgctagcattgtgtaagctacttccaccagaggattcaaatttacgggcagcaaaggaaagctcaatacacataagatatggacactttttgttcgataacgggagttatgaggaggcaatggaacagttttcagattcacatgtggacattacttacgtgttatctctgtacccatctattgttctgcctcaaacaaatattataggtgatcatgacaagctgctggacatgccagaattagcaagggaatcctccgatgtgacagatgagatggaatcatactctttacagcttcaagaaccagatgataaatctccattggaggtaaagaaaatgagtcacaatgctctagctgcccttgtgaagtatttgcagaagaaaagaagtggcataattgagagagcgacggctgaagtaacagaggaggtggtctctggagctgttcaccacagcttaaaattatctgagccatataagtcaaagaagctgagcaagaaacgagctcagacacatacaagctctattgctagagaaatggcaactgtactggatacttgtctgcttcaagctcttattcttactgggcagtcatcaggggcaatagagttgttgaaaggactcaattattgtgacctgaagatatgcgaagagtttttgaaggaaaggagagaatatatggttttacttgaactctataaaagcaatgaaatgcaccgtgatgctctccaactactcaatcaattagttgaagaatcaaaatctgaaatggagaatacatattttaataaaaaatttaactctcaaatgatacttgaatatctcaggcccctttgtagatctgacccaatgctggttttagagtcttccttgtacgtccttgagcgcaacccatcagaaactattgagctctttttgtctgaaaatgttccagcagatttggtaaattcatatctgaagcagcatgccccaaatttgcagtcaacttacttagagctaatgctctcaatgaatgatactgggatcaaccctaatctgcaaaacgagctggtacaactgtacctttctgaagttctagactggtacaagattctgaaggaagagggaaactggacagagaagacatattccccaacacggaagaagttaatatctacgttggagagcaattcaggttacaatacagacgcacttcttaagcgccttccccaggacgctctttttgaggagcgagctatattgtatgggaaaataaatcaacacctcagagctctctctctctatgttcacaagcttcagatgccagagcgagcagttgcatattgtgaccgtgtttatgaagaaagagaacaacaaccgtccaaatcaaatatctattttaatcttctacagattcatctgaacccaagaaaagctgaaaaggaatttgagcagaaaattattccagttgcatcacaatactctggaatccaaaaggctagtgctactaagcccaaagggggtcgcgtaggtaaaaaggttgtagagattgagggggctgatgacatacgctttagccccagcggaacagatagtggccgaagtgatggtgatggagatgatgtaaatgaccgaggccctataatgttaaatgaagcactggaactgttgagccaacggtgggacaggataaatggtgctcaggctcttaggctgttaccaagagatactaaactccaggatcttgtatcatttcttgagccactattgcgtaactctagtgaacatcggcgcaattatttggttatcaaaaacttgattttgcgggcaaacttgcaggtcaaggaggatctgtataatcggtgtcaagctgttgtgaagattgatggagatagtacgtgttctctttgccataagcgtgttgcaaatagtgcttttgcaatatatccaaatggacaggctttggtgcattttgtctgctttaaagaatcacagcaaattaaggccgtcagaggagcaaactctgtgaaacgtagataatatggccgtgatccaggtacacccttgaacgggacactgacaaatcaatatcgagtgtagcatgatgtatcgatcgaatctgatatcctcatctttgtcaaaccag

SEQ ID NO: 39291 - DNA, 1962 bp, Zea Mays
gttgcttgaaaatttttccgcattgaagcttttcgagtttaagcatgttgacaggataaattgttgtgctactttttgagtcacctgtttggttggaggcctcccaggcagcaatttcagccccaggcctccaaaattgaacgcctgagattcatgcctaggccaggatttttcacattacaagaggaggcatcagcaaggcttcctgtggtataaatttaagtgaagacatttttgctggtttcaactcgactctaagaagaggaaacgtcacccatcatgagtacatccaagtgggaaaagggcgcgatgtaggtctcaatcaaatttctctctttgaggcgaaagtggcttgtggaaatggggagcaaatactcagcagagatatatacaggctcggtcatcgatttgatttcttccggatgctttcatgctattttacaactgttggcttttatattagttcaatgatggttgtgataatagtttatgttttcttgtatgggagactgtacttagcattaagtggactggagtttgcaattatgaaacaagcacggatgagagggaaccgtgcacttcaagcagctatgggatctcagtctattgtgcagctaggtcttttgatggcattgccaatgtttatggagattgggctagaaagaggtttcagaagtgccctgggggatttcataatcatgcaacttcagctttgttcagtgttcttcactttctcccttgggaccaaatcacattattttggccgcacaattctccacggcggtgcaaaatatagggcaactggcagaggttttgttgttcgccatgtaaggtttgctgagaattacagaatgtactccagaagccattttgtgaaaggacttgagctgatgctactgctagtagtctatcagttatatggcgatgttgctacagattcgactgcatatatacttctgacatcatcaatgtggttcttggtcatcacttggctgttcgctccattcctcttcaatccatcaggatttgagtggcagaaaatagtagatgactgggatgactgggctaagtggattagcagtcgaggtggcattggggttccggctaacaaggcatgggaatcctggtgggaagaggaacaggaacatttgctgtccacaggtctactgggccgtttctgggaaatcatactctctctcagattcttcatattccaatacggtatcatataccacctgaatatatctgctggcaacaaaagcatctctgtttatggtctttcttggctggttattgttgctgtggtgatggtcctaaaggtggtatccatgggtaggaagaaatttagtgcggatttccagcttatgttccgacttctcaaattgttcctgttcatcggatctgttggaacactggcagttcttttcactgttcttcatcttacagttggtgacatattcgcaagcttccttgcatttgcacccacaggatgggccattctgcagatatctcaagcaagtaaaccggtcatcaaggcgtttgggctctggggatccgtgaaggccctctctagggggtatgagtacctgatggggattgtcatcttcgtcccggtggctgtgctggcatggttcccatttgtctcggagttccagacgagattgctttttaatcaggcatttagccgaggccttcaaatctctcggatcttggctggcggcaagaagcaaagataatgttaattcaggaaacattcgtacacacgggttaggcaagggattagctccaggatgattgttgtacatgggtcatgggtgtttgttggaggaattgtaaggctgctgatgctttcagagtcttggctgtatacacaaggctggtttttctttgtcatttccgttgtgtgtcatacgacattgttgcctcttggctcttggtacatacctaggctatatattttca

SEQ ID NO: 39292 - DNA, 520 bp, Zea Mays
gaacaacattataattaatataatataaataagtaccattcaatatatcataaataagcattgtcaaacaacgcatacataagtgtactctaaatctaaactaaaatacaactgtttgcactaatgttaagcctaactttatatgaattcaagtctccacacttttgcggctaccaaatttgaattccattctatgttttcttgtacaacaaataggagaaaactagacatagcaaaaagctccaagcaacacgtggatggtctcaaagctgcccttatgcttctccctgtgcttgatgactcctacacgcctggtgttcctcccgccagtcaccatgttgccgacgtcaaacttgatgaagtccataatcttgttggtctccagatcaatcttgatggtgtcgttggccttgatgagcgggtcggggtagcggatggtgcggccgtcgtaggtgttcaggtaggggatgcctttcatattggtctcgatcgaagctgagtccattgtaatctgctcgat

SEQ ID NO: 39293 - DNA, 3606 bp, Zea Mays
cactttgtagaaattcgctcaatagcccggctgacgtcactaattcaccctctctttccggccgccgccacgggctctccatggaacggctcaaatcggcggtgccgcccgacctccggcgggccgtcggcgagggcacggccgccgatctagctaacaccacctctcgcctgttcgccttcttcgacagccttcctctcttccaccaggttatgcaagaactgaccgaccccgagcttgcgttgtgtcgcaaagacaaggtgaaggctgtagagttgaagggccacggcaacgcgtgcttctctaggagggagttcgggaaagctctcaggcattgcgccatgtcccaattaattcgggtggcatggatgtgaacttggtatcttcattatatgtcaatcgagcctccaccatgcataaattaggtctgttcgaagaatctctaagggactgtgacagggccataaccatttctcctaattattctaaggcttggtacaggaagggaatggtaaaaacagcgctcaagaattattcatctgcaatacatgatttagaggtggcattgagccaggaagtgacttcttcggggaagagtaacatagaacaagagctgaagttgattttagagaagcatgaaagtgtcaatgaagctgggacatcaaactgtgatagcaaggatagagatttgcctcttgcaggacaacctcataaaattgttatagagagtatttcaacaccaaacaaaggtagaggaatgatttctacagatgatatccccccagcttcgttgattcatgttgaggaccctcttgctgcgattatcatgaaatcttcccgtgaaacacactgccacttttgcttcagtgaaactccagccgatgttgtattctgtccttcatgtacaataccaatttattgttcaaaaaggtgccaggagcaatcagcaggtcatatttctcgtgatgaagatactaatcttggatattcaacgaatgttgcaaacctgagtataacttcgagttgcaagtctccaagatctaagctatttgctgaacataggcatgaatgtggaggtgcccactgggcagctgttttaccagctgatgtagttttagctggacgaataatagcacacagcatagtaaaaaggatgccgtctgggaagagctttgctttctctggcccaaatttggatctagttcaccattatgatcaacattctcctgccaacaagttggaatcacatatatatgcaattgtcctattgttatgcctccaaaatcattatagatcagaccttttgtggacagaagattctttatcacaggtatatatggcgtttatcttcagacattattgttctgatatacctggttaatgagtatgatctgaaattgatggcgatttcagctcaagattttttataaattttcacaatgctaattgttatcaaatgtcttggtccatactgttttggtggagataaccagtctccttggggattgccagtttcatgttccttagtaatcttaatctcatctctacaataccagtgtttgtcgaacttccttctgtatagtccctttgaacttccttctgtatagtcctctttacacacttttacttgttctgatacttagaaagccattttttaacatgcaagaatttgtatcattacatttaaaaaaggacacaataaaagctctttcacttgtaaattaggtgaacacatcaaaccaaacaaaataggcagaaaagcagaaccaacgaggattattgttatataatcaaatcttaaatgactaaatagcctctagatcaatagccatcctgcaatgcaagtctgcaactgtgtctaacatgttacctaaagcccactggttacactcatggtggtcagacaagaaatcagacaagcttggaactcaagcttcagtcagatatgcctaaggtacctgggttcaacgatgttcttatctataccatggttttgtttctcattactaagctttcctatatactgcaattcccccaaaacttttttctctgggggtatagagaaactatggggtatcacattcacattttgtttttgggaaagaagaaactcatgtgttgattatcctctacagctggttcttttgatatttcaaatcaaagtcaattcaattgctattgtctgtatgaggtcgatggacagaggcccagagcacacaataaatagaggtttttatgtagctgaaggtgcaaaaatgtgtagtgtggagcaggtcagggttgcacaagctctttatgtatctggtagcctgttcaatcactcatgtcagcccaatgtgcacgcatattttctttcacgtgcgttcgtgctgagaactactgaatttataaagtccgggagcccagttgaactgtcatatggtccacaggttggcgagatgcatatttcagagagacagaagtcacttcaagagaattactacttcagttgtcaatgttcaagttgttcagagctaaacctatcagaccttgttatgaattcattctgttgtccacaaagcaactgccttggtgccatatcggaatcaacttactacaggtccaaagagaatttcgtgaatgtttcccttggaggatcttatgtctgcaaactatcattgcccgatgtatcgaaggttgatatggatatggagaatgtcgccaaatctctcttgcaaaatagtggtgtcagtctgaacatagatcatggatgttgcatgagttgtagatcctgtattgatctgtcgtctgctctggctacatcacacagggaagaatctaccatcgataggttgaagaaacatacattcctagacaagactctcatcacagaggcattacaatctctaaaacaactcaagaagttgaggcacccatatagcaaggctctcgcgcaggccgaagacacaatcgcagaggcctttgcgaaggtcggagaccaagaactagcacgaaagcactgtgaagcatcaattcagatcctcgagaagctgtaccacccaaaacacatcatcattgctcacgagcttattaagcttgtttcgattctgctgtccctgggagatggggcaagcgccgcagccacattcgctcaagcagaggcaatattctctctttactacggatctcatgtggagaaggttttgacatacatgggtgccctgaagaaagctgtcattgacgtgtagcgtgctgacaatcctcacgcgggaatggccaacacggttctgcagaatcatctcaccttttgcgcttcttcgaggagttaatgtaggggaaaacccaaaaaatatttacaaagcagtgtggtattgcttgtagtttagtttgttctagaaaacacaaactagctcaaccaaacttcctggctaatgagtttggtggatgttctgagtgcctatgttaatgacttgtttcataaatttttttcgtatatactcgttgccttacaaactcggtcggtagaggaaagatcgctcccacggtattatattaagaagaagctcaattgaagcctcaaccaagaaaggtcatgaaagctgtcttcctgcaacatgagggtccgtc

SEQ ID NO: 39294 - DNA, 1811 bp, Zea Mays
ggaaaaaattcccgtcgtctccactccaccagtccacctgcatcctccctctctctctcccgctcccgtgctctctccctctccccaggatccgaattgccagcgcaccagtcgagctcgcgggacctcgccggcgccggcgatggcctcctcccttttggccggacggggagggggccaccaccacaactggggggagacgcgcgccccgctcgagcccataccccccaaccctagtcccagccagccccacccgcgcgccgacgggtccaagtccaagccgcgggcggcggccggctacgtgaagttccgcccggcgtccctgggccaccgcgaggcccgcgcgctccgggaccgcctcgcggtggagctcggccaggtccgcgccctcctctcccgcatcgacacctggcagcagcagggcccgccgccgcgcgcggtgctccgcggggcgatgcggaagcggtgcggccagatcctcagcaggctgcgcaaggacaagcgcagcgtgtggttcaacgcgcccgtcgaggtggagcgcctcggcctccacgactaccatgccgtcatcaagcgccccatggatctcggcaccgtcaaggagggcctcgccgccgggaggtacgcctcgcacgacgacttcgcggccgacgtccgcctcaccttcaccaacgcgctgcggtacaacccggtcggccacgaggttcacacgttcgctggcgccctcctcgcctacttcgagaggatgtacaaggaggcgctcgtttgtttagaggaagagcgcaagcgccttgagccgccgaggccagtggcggctgagctgccacctccgccggcagttgagcctgtcgaggcgaaggctaagacgagagcagggaatgtgaggatgcggaagcccaaggcgagggagcctaacaagagggagatgagcctggaggagaagaacatgctcaggctggggctggtgagcctgcccgaagagaagatgcacaatgtgcttcagatcgtgcgcaagaggaacaacaacccggagatgcttggggatgagatcgagcttgatattgatgagatggatgttgagacacagtgggagcttgatcgtttcgttactaacttcaacaaggcgctcaagaagtcccagcgtgctgcgatgttgaatggtggcgttgctgatgtaaccagtactgctgtggctgaggatgacactgcacctgtgggcgatgtgcctacattggttggcaatgacgatgcggagagtgaggaacctgtgaagagcactacagtggctgagcaggtggatgagtatgttgatattggggatgaaatgccagcagccacttaccaatccatggagatcgagaaggacgctgaaggttctgagtcgaggagctcaggggacagtgcctcaggagctggcaatgctcattctttgacttaggggaggttggtaacaataggatttgaaaatctgaatgatccgagttcgtgtgcagtacagcaccatgtgtatgtaagctggaggtggaaggtactggtgtgttaaaagtagctgatcgaccttctcgtatgaagggggccagggctagtgtctgtgttcttaatggtagggttgatcgaccttctcgtaattgatgctttgtgcatgacattaaagtatggttttataagtaacaatgcagtatcatttgttgggtgatgacttttgatgtaagagttatttctgcattttggataggattacgcaagataaatttcaacgaccatgcaaatttgtgttgactgttgagtttgttctggtggtgttgcttgat

SEQ ID NO: 39295 - DNA, 2121 bp, Zea Mays
gtccggttttcagttggtagccacgcgcacggggacggggttctccctttgctgtcgcccccgcctccgattccgcgatgataacccaccatccctccctgatccgcccatctgtcctcaccctccgtgccgacgtcctccgtcggcgcccaacactgcacgccgtcgcctccgcgccgcctccccgattgtggtctttgcgcgccaccaccggtggaacttcgcccgtcagtggcgatggaggcaaacgcgctgtgccgcttcccacgcgtgggcccgccctgctcggcttcgtgcgtagcaacttcctcccgcttgctctcattggtgggatcatattgggtcttctagatcctactcttggatgccttgcacacaaatactccctgtcaaagtacagcacttttgggatattcgttatctcaggactgaccctgcgcactagggagcttggtgcagcgttagaagcttggcctgctggactatatggactagtatgaccttatgtttgttctgtggctgccagacttagggcatgtttggtttgtggctaaatgtgccacactttgcctaaggttagtcattcaaattgaataactaaccttgggcaaaaaagttaggcaaagtgtggcaattgaggcaacaaaccaaacatgcccttacctattctaatatcattctgtggcacaactataagtatgttggaataaagttctcactgccgtttgatccaaggcataattcaaggaaattccatgccattgattttctggcatttatttcttaccaggagtgctaattgcctttctgattatttttttcagttcctatacttctattggtcatcaatggagcacccagcacctgcaataagtttgctaatgtattatattattgtatataattgcagggatctattttgctgtttacaccctttcttgctcagtttattatgcaagttcagttcttcccccctgaatttatcactggtatatgggtcaagcacatgcctgcttttcatgatggattttctgtcttcattccaccattttttgttgccatcgattaactcatacttttgtgctccttatagcttgtttttttggcatcttacagggttagctatgttttgctgcatgccaacaacactatcaagtggagtcacactaacacagcttgttggtggtaactctgcacttgctcttgcaatgacagttgcatccaatttacttggcattataatttgttggagggggggcctctacagactgcagccgccgcgtgatggagggggagcagctcacgctcgagcagagggccgccggtactgttcatctgcatgaatagtaccacgtctccccagccaacagcccgacggcgcccaagcgtcggagttctggtcctggacccgaaacctaccactcgtgctacctccgtaaccctagatccataacaaatagttagataagtttgactcagggcaaagctaaatcgacttaaaatctgaaacttgctgagtattttttattagtaatttttaataaagtaatttctgatcaaaggcttgctccagtgaaatgaactacacctttaatttcaaacgttcggttcactgtctagattatgaatgagccttttttctatgtacaaataatttattgaaaggtgaaaaaacattctatgctgagcaatctggtcattcttctttgtgatcatggaatcaggtacctctttctcttgcaaaatacattagcaatggtgttggggtttccttgcctactgagcaattattcaaaagtcttgtcaccagccttctaatccctcttattatagggaaggttgctcgagaaacctcaaaaggtattgctgattttgttgatggaaatcgacaaggcttttcagttgcaagtgctgttctcctcagcctagtatgtctctaatttgaacatatgccagttgacatgttatttacttgctctgtagctcccttgatttgtccttcagcatgtcatgcttttgggtccatatatatagtgcttcactgcttccagcccaattacccatcccttttggcgaagcgggtacaagagggaaactgatgcatgcataaacctatcctga

SEQ ID NO: 39296 - DNA, 3148 bp, Zea Mays
ggttggcctgtctgctcggcccgccgtcgtctcagctcttgtgttttctgttacggaaaaaaaaagaagaaaaaacaagccggggacgacggcggcgaggacgacgacgacgagagggacggaactggaccagcgcacgtgccgagatggcggcgctggatgacaaggccatgacggacctggagacgctggaggaggaggaagtgctgcgccggttaggcacagcggaggaggcgggcctcaccgacaacgaggccgcgcgacgcctccgtctccacggccccaacgtcgtcgtcctctcgcaccacgtacgtctccactctagatccctcctcctgcatgttgattcctccaccatttgccgcttttcaattgtcaaacctacaagagggcagcatgcttcatggattcctaatggcgctcttctcgctctggggatgggatcatgtcttccccaagtacaataacatggtccgggtcatacttaactccatgtcgtgggttacagtactgactatagttgtgtctcttgctatcacctcagctggccaaagatcatgcgagctggccatcataattttcgtagtagctacatgcctcatagcatgctttactgcaatgcttgttttagagtatgctaaggctccgctggaggccaaagcccacgcaccaagggccaaggttctgagagatgggaattggagagatgtacatgcagcaaatctggtcccaggggatatcatatttctcaaagttggggacattgtcccagccaatgctcgcatactccgatttcagaaaatcgacacaatgacttgctgggccaaaaggtctgttgattgtgcgcatggcttcctcctatactatgcttggactgtttcctgtggccaaggaactgccgttgtcattgcaactggacgtggcattcccagaagtacattgcggctctacccacaacgttatgctcgacctgggcagcttaaagaaggagccatgcttactggctgcttctgtgcttccctggtacttgttggcacttttgctgagatagtcttaagatttttgttccaaaaacaaaattacagaggcatgccactcgacgcccattttatgccattgattggtggaatcccgatggcaatgcctacttttttttacctggcattggcattgggatctgtaaggctttgttttctggggattgctagccggggaacagttgcacttgaagatctagcaagtgtggatgtaatcctcttcaacatgactggtactttaacgtgtaatcagccctgttttgtacgggacaagattgagatgtttgcagatagcgttaataaagaccatgccatagttttagctgcacgggcatcaagatctcaacatgagttgtacattgaaccaattgatgcagctattctaagcctccttgatgatccggagcaggttgctttctctaactaaggagaattttaatgggtatgcttcttttaaatgaagatgcatactgaatttgtaggcacgactcggtgttcaagtcttagagcatcatgccagtttctttgttgcactgaaactgatgttccagactacatacatcgacgaaggcaatagattcaagtgttgcgtattcaaaggtgatcctgcaaaggttgctcatcactgtggcagcagcaaagaagttaaagagaaaataagcatgataatggatgaacttgcccttgatggatatcaggccatagctgtaggacatcaagtaggcaattggatttcacattagcatgctttaacttgcaaaaattacgatctatatttatttagtttgttttgccttcctccaggtagactcttgttgggactttattgcccttctgccttacacagatgaccttagaagcgatagtgctgatgttgtcgatagccttatcgatctaggtttagatataagagtcctcacaggtcattctgttgtgcatatcgccatatcctgctgtcgagatttttgctattgtcattttctatgataaacatgtcttcatcatatatgtatattgttttgtcctctctacagaaagtccattgtcgaccacaaagcaggtttgtggaaagcttggaaaactaggtaccaatgtggtacctgcacatatagtgtttgagttagctcgcaataacagagaagtccattcaaacatcaacgggatttctgatctctttccagaggacaaaagcgatatagtaagaagactaagaaatttcggttgtcattgtgcaatggttgggtatgaatttcttgatcatgatgccataggagagagccatattgggatttcagttgctgatgcaactgattacacaaaaagtgaatctgatcttgttttgactcagcctgcactgatgcctgtttcttcagcagtgcaaatcagtaggaagatttgtcagatgctaagaagctacacttatgttgctgttttgcagatattcaccatttcatcaactgtccatcttgtacgtcctttgcaatgttatttgaaagggtggaattgaacaagtcaccagataaatggagagttcagaaaatcattacaagcggtgctgcttttggaagctacatagttcttactactgccattttttatagggttgcaacaactgcaaacccttttgcatgtaaattcaaacatatatcactgatgggcagtgatgaggaaatcagatctgctttgttccttcagattagcacagtaaaccaggctattgcactctttgttcattctgatggttgctgtatcataagatggcctggaccttttgtcacatttgcctttgttgtttctcaaacggtcgcaaatggagacacgcaaagatgactagtgaaaagttgttgacaatatgcttgcgttcagctatcctacacatagttcttacctggtttctgtacgtaatacttgatgttagggtgcaacagccagtctctagtagatagatcgaacacatagttagggctttttccttctgcagtgtcatctgtaaaactctcaagttaattaatatcttgcataatagattttgcagttggttggcccttcatgattcagaacttgcaactgtgagaccactatattattttaagttaaaactttgctgaagc

SEQ ID NO: 39297 - DNA, 772 bp, Zea Mays
cttttcatttcagagctgtggtagactggtaggttggtagctgttactgaaaaactaagagaaggcaggacggggaaaggagatggagctcaacagcatcccctatattgcgtcgtggtcttcctcctcgagctgcttctactacagctacagtcgctgcgcctgcaggtgatgttagagaactctcgttcccgtacgcaaatgatgcagtcttgtctgcatggaagcaaacgacctgagaaatccttatgtacagaggtacaagagatgggaagctggtaacaaaagcttctgcagctggtcctagatcttcctggcgtataaggaggagagaccttgcttctgccattttactcccttttctgattcctcgtgttaacatctctatcgcggctgagatatacgacgcatcaattattcgaagtggtgtgaggagtgttttaaccaagggcaaggctgctggtgtgcttcggttggttttccatgatgcagggacttttgaaattggggacggatcaggtggcatgaatggctctataatttatgaagttgacaggcctgaaaacattggcctaaatagatccataaagatactaagaaaagcaaaagaaggaatcgacaacgttcagaaagtgtcgtgggcggatctgattgccgtggctggcgctgaggcagttgcgctctgtggcgggcctgagattccagtaaggctaggaagagtagattctagcagtgctgaccctagtggaaaagttcctgaagaaacattgga

SEQ ID NO: 39298 - DNA, 487 bp, Zea Mays
cgcagcatgcctgtgacggcgtttctctccttccaagcgcctctgaatctctcacaccacggtccctcctgcttgctcgagagcttcggccccggcgccatggatgagagctttgcgagcaccagcaggaagcttcagcctcagcgcgcggagtagaggaaggtgtcgtttagcggatgcccgagatccgctagctttagcgtgtgcggggacgtgctctaaatttatcgaacattttagcgtgcgttgctggacccatagaggaggtagttgtccgctaaatttaacgtacatgaccatttactggtcgttgttggagacaaccttatgccacgcgttcgctaccacttgtgttttaattgatttctagggtttgaacctcatctctacttgcttgatatgtacttgatatgcaacaactcctttgaagaagctcaacgctccttagggagaccagtatcacacttgatctaagcctcatttcaat

SEQ ID NO: 39299 - DNA, 1606 bp, Zea Mays
cccggctcggcccggtccagcccgcttcggttcttcctcccagtcccgtccgtcgcttggctgctgtagaggtcgcccgtcgccgtctcccccctgtccggtccggctatctctctctccctccctgctcggctttgacctcagctcgcaatgaactctctactgcggccgccgctgccggggccgacgcctagactgagcgcgaggcgtcgggtctcgtcgccagcgccggtgcgggtcggctcggcggtgctggccggcggcgagcgcagatgccaacgggggctagcagtggcgacgtcggtggctccgtcgtggatggaggaggccggggtggcggtgctggaggagggcgggcggaggaacccgtcagtgtcggactcgtaccgcgcggcggggctgccgcagcccaacgccacggtgctggatgcgcaggcgcgggtgtgcacagggcccgcacagacgcgcccgctcggggaggagcaggccatgcgcgtcctcgacactatcctccgctccgcaattggagaactcaaagaggagccagtctctagtgcacagttaggtgcattcttcgcaggcatgacaataagagctaactcgtttccagaggccacccaatggagtgagggcgagcgacgcgccatgagcatattttggccacgccttgtgcaggtccttcctcctgaggtgaagtttatagcagaccctgaaggcacgatcttgggtgcgaatggtttagcagagcctcggtatgttggccaaggaactggagagatgagactcgtcggtgctctgagggaagtgcttgctggtggccatttaggttatgaggaggttcaatgcgtactaaaggatatcctaccaattggatcgagttcagattcgacagtggttagtcaagcactgctagcggcatttttgattggacagcggatgaatagagaaactgatcgtgagctcaaagcgtattgcctagcctttgatgatgaactaggtcctcctccggttgctgacgtcaagtcgttgacacactatggtgaaccatatgatggcaatacacgtttttttaagagtactctatttgttgcagcggttcgagcctgctatggtgaatcctgcctcctccacggtgttgaatggatgccacccaagggtggaataacagaaggacaaatgcttaaattcatgggtgcaaacatacacttatccccaacacaagccaagatattgttggaggatgaaactgctggttttgcatacttgaatcttcaggaagcttgtccaccattatattcgattattggactcagggagcatattaagaaacggccaccgttggctacctctgagaaagttcaacaatttgtgaggttatgcctatggatacctttaaagattgaaaactttaccttgaaagaattttcagagcctcctgatctttgaacaactaataaggtaaagatttagtaaatcactgtcacactttcttaataaattgccaggtggtttactagctttagctttcacctttcaaagtatctcttcactaggatattttacgcaaaaaaaatctcgtgggacttttttaaggtttaaggactgt

SEQ ID NO: 39300 - DNA, 2598 bp, Zea Mays
agcttacaggggaagtaaaagctgctatgggaataccatctttctacaaatgggtcgtcagcaagtacccaagcatcatctcccctgtgaaggacgaaccagaggagtgccctgatggcatcatctacgacaacctctacctcgacatgaattgcatcatccattgctgcttccacccacaggaccagctaacgcatgcagacatagatgtgcgccctccgacgacggccaatgaggtgttcgagtccatgttcgagtacatggaccgcttgttccgcatcgtcaggccaacaagtctgctgtacttggcagtagacggcgttgctccttttgccaaaatgaaccgaatacgaaggggacgtttccactccgccatggaaagacttgctgaggaaccaccgcgagagatttccgaagtttctgaccccaatgtcatcagcccaggtactgagttcatggagaaggtatcagaagccctcgagtactacatccgtgccagatttaacagtgacccctggtggagagacatcatggtaatactctctgatgcgagtgttcctggagaaggagagcacaagatcatgtctttcatccgtgcgcaatgcagcatggaaggctatgatcccaacactcgacactgcttgtttgggcatgatgcggatctgataatgcttgctttggcatctcacgaagtctacttctctattctgcgtgaggatgtgctctaccaaaatcaggaagaaacggaagggaatccgaagaaatcatttctgtttttgaacatgtgggttctgagagagtacttggagattgaattcaagatactggacccagtctgcgagactgatattgagaggctaatagatgacttcatctttatttgtttccttatgggaaacgatttcatcccacatattccgtcacttaagacgcaagagggtgcggttgatcttctcatcgaagtgtacaaaacaaccttcaacaaaatgggagggtatattaccaacacagacaaagtcaaagataagtatggtgcatatctggaagtctcaaggctggaaacattttttcatgaactctccatgtatgaagataaaattttcctcaaaagatatgatctgaaacaggattcgttgctggagacatatcatgaaatgttgcgtgaagctccagaaagcgaaagaccagaactgagacaaaaattagatgatctcctttttaatgaagaaaacccatatgacagtataagactaggcttaccaggatggaagtctcggttcttcagggagcatttcggtgccaaaacttctagtgaaattgggaagctgcagaacgacatggcgcaaaagtacttagaaggactttgttgggtgcttcaatgctatttcgcagacgttccatcatggagctggtactacccgttctatgttgctcctttcgtatctgatctcaaaggtctatctaggatcgagatatctttcactgtggacaaaccattacgaccattcgatcagcttatggcagttttaccgatgcaaagctggggtgctctcccaaaatgttacgagaaaaaaagggacacccctttttactacccgaggttggtgcatgccaaggatgggaaatatttcttgtggaggggcatctctgaggaactgcggctttcggccagcgaaatggtagatagaaagctcacgacccttgaatcgagacggaataccactaggaaagagaaggtgtttctgcacaggagctcgaactctgtgccacacaatggaggctcaagctctctgccacacaacgaggttactgaacaagcatcgcactgttcgatgcagaagcttccgatagattcagctacgagtggaattggagggtggatagcgcctgcttacaatgatggcttctgcgacggtttcttcccctcacccacaccaaacctgcaggacataacgagtgatcagacaatatcaggtatgttcttcaaccctgaggcggcgaacccagttccaagactgcttggcaatgtcagagttcctgacaagactgttacgggagctgacatctccaagaggccactctggcacacgtacccgggatcaaggccgccgcgcatcgttcagaggccggacaccgtgtggaagccgagcacgccggcgtcgccgcgggaagagcacaagaacgccggcacgggctggatcgggcgggggagagggaacgcccttgccgccgccgccgccgccgagacgcaatggaagagcagcagctacagctacaggagagggggtggtttccagcgggcggccatggcacaaagccgaggaagcagcagcagcttcgacggcggcggtgcgtacagtttccggccgcttggaagtgcgccgtggaccgccggggacggcagccgaagcggaggcgccggccatggcgggattgtgcagccacgtggttggtaggaaactagctcaggaatcaaatagcttggtgatctcatcccaccgtgtatattctgtgcccgtgtgccgactgtatatatagcttctacgtttcttttctctaaaaggatgtcctctgttttttaacgtgaaaaatcatgaa

SEQ ID NO: 39301 - DNA, 991 bp, Zea Mays
atggcaccttcccgaagtcggaaatttcgaacccgacctccaatctcatattcttatgcacttcacaaccgcgataggatcaatttgttggtgtctttgaaaaatccacagatcgatctaagacgggccaataacacagagatcatgttgacaaaaatcaaaatgccgctccctgatatgatgagtgctgctctagctttggacgattcagttttggatgctgaccagattgaaaatctaataaaattttgcccaacaaaagaggagatggaacttctaaagaactacagtggggacaaggaagctcttggcaagtgtgagcatttctttctagagttaatgaaggtgccaagggttgaatctaagcttaagatatttgctttcaagattcagtttcagtctcagggatgtcagaaagaatttgcagactgtatcatctgcttgtgaggagctcagaagctctgagaagttgaaggttatcatgaagaacattctgttaattgggaatacattgaatcaaggcacaccaagaggccaggctgttggttttcgcttggacagcctcctaaaacttatagagacccgtgccactagtggtagaatgacattaatgcattttctatgtaagtcccttgcagagaagtcaccagaagtaatggattttcatgaggatcttgtccacttggaagcttcttcaaagttgcaactaaaagcattggcggaggagcagctggcagtggtaaaggggctggagaaagttgaacaggagctaactgcttcagaaagtgatgggccggtttctgatgttttccgtaagactttaaaggagttcattgattgttcgagtgctgatgtatgctccttgtcagcattctattctgaagtaggtaaaagcgcagatgcacttgctctttattttggagaagaccctgctaaatttccttttgagcaaggtaatattcatgcctatagacccatggaaatggtttaa
